United States Patent Application Publication US 2011/0183924 A1 - sequence listing, part 91

SEQ ID NO: 299234 - DNA, 1681 bp, Homo sapiens
ttcctccaaaatcctttctagccagagaaggtttttctcaactgataaggcaaagtctatgctttccatcttcttggtagttggattaaatgggagaaaaatggggtacaattatatatgtaaaaaaaaaagagggacagaattatgatccacaggggaaaactgaaacgtaagtgaaaaatgacatgagaaactaagagtaagtatatcttgtttacattttctttatttcactataaaatatattagggttttagtcttaaactttattatttttgtctacagtcaataaatgagaaccagattgcagatggcaatttttgtacgatggaaatttttatttgaccatataattaataggattagtaggatgtgatggcagaaaataactttcctagagatgaatatgcctggtaactagcagagcaacaaatgtaatttcaaaatataaacagcacaaaaaaaaaaacaactcaaaatgaattaaagacttaaatgtaagacctgaaaccataaaactcctaggagaaaacaacaggggaaaagctccttgacattgagcttggcaatgattttttggattcgacccaaaaacacaggcaacaaaagcaaacataaacacatgaaactacatcaaactaaaaagtttccttacagcaaaggaaacaatcaactaaaaacacaacaaaaatgtgtgcaaaccatatatctgataaggggttaatatccaaaatatataaggaacttacaattcagtagcagaaaaacaacctgatttcaaaataggcaaaggacctgaagagacatttttccaaagaagacgtacagatggccagtagtgaaaagatgctcaacatcacaaatcatcagggaaatgcagattagaaccacagtgagatatcacctcatacctttttaaatggctattatcaaaaattcaagaggtaatcagtcttagtgaggatgcagaataaagggaacctttgtacactgttggtggcaatgaaaattgatatagccattatggaaaacagtatggaggtttctcaaaaaattaaaaatagagctaccatatgatccagcaatcctaattcttggtgtatatccacagaagatgatgtgtatccacatcagaagatgatgtatatccaccacagaagatggtgtatatccacagaagtagtgtatatcaaaacatcacactgtacaccttccagtatatactatttgtatttgtcatacatcggtaaagctggaaaaaggttaaagaaaaatagaaacaaacaaaagaaagaaagtgggctctgaaagggaaaaagaaaacacaaacagcagccatcttagtggtaaccaacaaagtggaaggcaggttggtttaggttgttacctaaatgttcatcctcacactgcccaacccatctgttttccaaatattcattaaattcagacaactacagaaatgtaggatcatttctctctagagagttgtcagtggagtcatcccatcttcttccatactagaatatttgtacctaatattttctgacgacgatcttcttccactggagcattggatcttcaatagcgaggcgaagttctcccttgttcccatcgaaggatttataaagagagacgggcgaggtcggttctgcgactgtgattgcgggtgcttgctttctgg

SEQ ID NO: 299235 - DNA, 5182 bp, Homo sapiens
ccaacttatttaaaacaaaacaattttgtaggtattattatacccatttcacagatgatgataaatgagaccaatagaagttaaataacttgccaaaggccacacagctggtgagtgatggagaacgaattaaaactcaagtgagcataattctaaaagccatcttctcgttagtgtttctcactatccaggtctgcctttgccttatttaactgaagttaagccatccttacctgtgatcacctagcctctcagtttggggggatcattacagcgggtttttaactcccaatgttctggtccagtttgctttacatgttcttatttatacattgtcaaggatgacctcaggacagtacagcaaggacacagtggcacttcacattttgttcccacgaaatgactggggcataatctcagatcatcttcctttagaatgtggaaacatcagcagaagaatattagtctttatacaagtcaaatccaaaatgacacatgtgaaaactaatagagctgactttcagccatgatagctttggcacacctcacatccctttgttcaacctctcttccctcaacggagagctgcattcctgggaatttctgttgtgcacttttcccacttgccctgctgtcatttaaaggtgaacattctagttttgctaagaaaaccctttccttcatttggaatgaacagcaattttattacttttgaccttaaaatgagtttgctgccttcaaatcttttcagcgccttcatcacgctctgcttcggggcgatcttcttcctgccagactcctccaagctgctcagcggggtcctgttccactccagccccgccttgcagccggccgccgaccacaagcccgggcccggggcgcgcgccgaggacgcggccgaggggcgagcccggcgccgcgaggagggggcacccggggacccggaggccgccctggaggacaacttggccaggatccgcgaaaaccacgagcgggctctcagggaagccaaggagaccctgcagaagctgcccgaggagatccaaagagacatcctactggagaagaagaaggtggcccaggaccagctgcgtgacaaggcgccgttcagaggcctgcccccggtggacttcgtgcccccaatcggggtggagagccgggagcccgccgacgccgccatccgcgagaaaagggcaaagatcaaagagatgatgaaacatgcttggaataattataaaggttatgcctggggattaaatgaactcaaacctatatcaaaaggaggccattcaagcagtttgtttggtaacatcaaaggagcaactatagtagatgccctggatacactttttattatggaaatgaaacatgaatttgaagaagcaaaatcatgggttgaagaaaatttagattttaatgtgaatgctgaaatttctgtctttgaagtaaatatacgctttgttggtggactactctcagcctactatctgtctggagaagagatttttcgaaagaaagcagtggaacttggggtaaaattgctacctgcatttcatactccctctggaataccttgggcattgctgaatatgaaaagtggtattggaaggaactggccctgggcctctggaggcagcagtattctggcagaatttggaaccctgcatttggagtttatgcacttgagccacttatcaggaaaccccatctttgctgaaaaggtaatgaatattcgaacagtactgaacaaactggaaaaaccacaaggcctttatcctaactatctgaatcccagtagtggacagtggggtcaacatcatgtatcagttggaggacttggagacagcttctatgagtatttgctgaaggcctggttaatgtctgacaagacagatctggaagctaagaagatgtattttgatgctgttcaggctatcgagactcatttgatccgcaagtctagcagcggactaacttatatcgcagagtggaaagggggcctcctggagcacaagatgggccacctgacctgcttcgctgggggcatgttcgcactcggggctgatgcagctcccgaaggcatggcccaacactaccttgaactcggggctgaaattgcccgtacttgtcatgaatcatataatcgaacatttatgaaactgggaccagaagctttcagatttgatggtggtgttgaagccatcgctacaagacaaaatgaaaaatactacatcttacggccagaagttatggagacttacatgtatatgtggagactgactcatgatccaaagtacaggaaatgggcctgggaagccgtagaggccttggaaaaccattgcagagtgaatggaggctattcaggcctaagggatgtttaccttcttcatgagagttatgatgatgtgcagcagagtttcttcctggcagagacattgaaatatttgtacctaatattttctgacgacgatcttcttccactggagcattggatcttcaatagcgaggcacatcttctccctatcctccctaaagataaaaaggaagttgaaatcagagaggaataaaaagacattttatattttattctgctccattcccttcactgtataccttaataattccttttctggtaatcaggcacatgatgaactttgattagtaggtctgtgattaagttcttaaattgttttgcagtcttttatgtttattatcataggtataggtggacctaaattccttatcatatcctttattaattcagccagtgtatccaccagttttttgtttatgtttttaagtaacctattatctctggatttcatgaaggtgtaatatcgtttttgttaaactgaatagaattgtatagcgatgacctcttaattataatttgatttgactgcaaaactttttcctcctctaagaggagatgatgtctgctttaagctgtaatgttttgccatgttgcaaaaagccataataataagtataaaaaagctttttcctttacaatttcatgttaatctggtttgtctgtccaccagagacagatcttctgtgacagcctccttatgcaggtctatcattatttgatagaatgtcttctaaaatacttcactcacattgtaattcaaattagaaagtcattccaaaaggatcatgtcatgttgacctcatttcatcggaactgcagtatatttttgttggttaattatattagtgttttctattttgtaaatgtgtcctttaattttactttaaatgccctgtgtcatttctggattatatactagttaatttcttccattccctactacacagagaggtgagctttcaaattttgcagagctctgctatcactgaattacatttatctgaagaaaatagtacaacttaatggattagcttttgggtttaactgaatatatgaagaaattgggtctgtctaaagagagggtatttcatatggcttttagttcacttgtttgtatttcatcttgatttttttctttggaaaataaagcattctatttggttcagatttctcagatttgaaaaaggctctatctcagatgtagtaaattatttcctttcagtttgtgaaagcaggatttgactctgaaagaagctttgccaattttacttattcgtgatcaatcaaggaaaatctaataaattttaggccaaataagaatatagcatatttagtatggttatagtcaacacagagatcacaacttagaagaaatataaagaaatggccactccccatcccccacagtcctggagtaaatcaaaatcaatatatgattcttttaaacattaagtttgaaataggaatggttttctcaagaatagatttggtgtgataccttgtgtttgcttacattggcccactatatatacatatatatttatgtagatatacttccatgaaagggctaatacgatgcatatactgaagggcaaggactttgaccatgtgaattttcagccgagaatggtcagaaagatcagtacaaccccatggattaggctgaaacatatgaaattgctgcatttgtagtttaaaaactgtcagcagtttcatatggttccacctaatattattgaagacaattattttcttagctatcaataggcttaatagttttagttattttagcttttgaaagtgttttaaaagatttcctttatcggacaggaccatctttatgacctgctttctgtttttcaatatcatacattggtgtatgtcaaagaataaattagtaaaattagtaaatgaaaaagactcttccgtacatcattatttccatgctaatgtgtgtctgtgatccagaataacttctcccactcatatcttcagttcacctaatgaaatgaatggatagcaagagccctttgttcccaggactttaaggcaaaatattaaaaattattgccaaaattaagaatataatgtttgtataaatgtccttgaatttgccatttaaattaactcattttcttttcactttgatttgaaagctgataagtatttctgcagcagatagaatattaaaatcaggttgtgtgtacacactgcactatgaggtaccttggtgtcctggtgtgaatagacaagaagctgtactatatgttgctctctcagtggcaacaatgaagtttttgcaattctagaacttggatttttttttaacaaaagtcccaaaacaccaaaaatgtaaacaagataagagattaatattgtagtgatgtaatttaattaaagttatattttgggttaattttaacaactgaagtcttattgttgaaacttattttcaacaaaactgtgcagttaaatttgtatacgtattcacatactgaaagatgaaccgttaaaatagcacttaattttgtgtttcttcaatatgtcttgatatactttgtgcaattaatattacacatgtaagttgtatggcagtttacagaactcaatgacttgtcatgaggttttcatatgagctacacattgtgtacattgattgttttttatttttacataaatccattctgtcattttcaactttatatataaatctccaatgttatgggaaacaatagattgacacataatttttaaaaattatatttgtaaaatttctctattgtgaataaagtcttttaatatatctcc

SEQ ID NO: 299236 - DNA, 5129 bp, Homo sapiens
ccaacttatttaaaacaaaacaattttgtaggtattattatacccatttcacagatgatgataaatgagaccaatagaagttaaataacttgccaaaggccacacagctggtgagtgatggagaacgaattaaaactcaagtgagcataattctaaaagccatcttctcgttagtgtttctcactatccaggtctgcctttgccttatttaactgaagttaagccatccttacctgtgatcacctagcctctcagtttggggggatcattacagcgggtttttaactcccaatgttctggtccagtttgctttacatgttcttatttatacattgtcaaggatgacctcaggacagtacagcaaggacacagtggcacttcacattttgttcccacgaaatgactggggcataatctcagatcatcttcctttagaatgtggaaacatcagcagaagaatattagtctttatacaagtcaaatccaaaatgacacatgtgaaaactaatagagctgactttcagccatgatagctttggcacacctcacatccctttgttcaacctctcttccctcaacggagagctgcattcctgggaatttctgttgtgcacttttcccacttgccctgctgtcatttaaaggtgaacattctagttttgctaagaaaaccctttccttcatttggaatgaacagcaattttattacttttgaccttaaaatgagtttgctgccttcaaatcttttcagcgccttcatcacgctctgcttcggggcgatcttcttcctgccagactcctccaagctgctcagcggggtcctgttccactccagccccgccttgcagccggccgccgaccacaagcccgggcccggggcgcgcgccgaggacgcggccgaggggcgagcccggcgccgcgaggagggggcacccggggacccggaggccgccctggaggacaacttggccaggatccgcgaaaaccacgagcgggctctcagggaagccaaggagaccctgcagaagctgcccgaggagatccaaagagacatcctactggagaagaagaaggtggcccaggaccagctgcgtgacaaggcgccgttcagaggcctgcccccggtggacttcgtgcccccaatcggggtggagagccgggagcccgccgacgccgccatccgcgagaaaagggcaaagatcaaagagatgatgaaacatgcttggaataattataaaggttatgcctggggattaaatgaactcaaacctatatcaaaaggaggccattcaagcagtttgtttggtaacatcaaaggagcaactatagtagatgccctggatacactttttattatggaaatgaaacatgaatttgaagaagcaaaatcatgggttgaagaaaatttagattttaatgtgaatgctgaaatttctgtctttgaagtaaatatacgctttgttggtggactactctcagcctactatctgtctggagaagagatttttcgaaagaaagcagtggaacttggggtaaaattgctacctgcatttcatactccctctggaataccttgggcattgctgaatatgaaaagtggtattggaaggaactggccctgggcctctggaggcagcagtattctggcagaatttggaaccctgcatttggagtttatgcacttgagccacttatcaggaaaccccatctttgctgaaaaggtaatgaatattcgaacagtactgaacaaactggaaaaaccacaaggcctttatcctaactatctgaatcccagtagtggacagtggggtcaacatcatgtatcagttggaggacttggagacagcttctatgagtatttgctgaaggcctggttaatgtctgacaagacagatctggaagctaagaagatgtattttgatgctgttcaggctatcgagactcatttgatccgcaagtctagcagcggactaacttatatcgcagagtggaaagggggcctcctggagcacaagatgggccacctgacctgcttcgctgggggcatgttcgcactcggggctgatgcagctcccgaaggcatggcccaacactaccttgaactcggggctgaaattgcccgtacttgtcatgaatcatataatcgaacatttatgaaactgggaccagaagctttcagatttgatggtggtgttgaagccatcgctacaagacaaaatgaaaaatactacatcttacggccagaagttatggagacttacatgtatatgtggagactgactcatgatccaaagtacaggaaatgggcctgggaagccgtagaggccttggaaaaccattgcagagtgaatggaggctattcaggcctaagggatgtttaccttcttcatgagagttatgatgatgtgcagcagagtttcttcctggcagagacattgaaatatttgtacctaatattttctgacgacgatcttcttccactggagcattggatcttcaatagcgaggcacatcttctccctatcctccctaaagataaaaaggaagttgaaatcagagaggaataaaaagacattttatattttattctgctccattcccttcactgtataccttaataattccttttctggtaatcaggcacatgatgaactttgattagtaggtctgtgattaagttcttaaattgttttgcagtcttttatgtttattatcataggtataggtggacctaaattccttatcatatcctttattaattcagccagtgtatccaccagttttttgtttatgtttttaagtaacctattatctctggatttcatgaaggtgtaatatcgtttttgttaaactgaatagaattgtatagcgatgacctcttaattataatttgatttgactgcaaaactttttcctcctctaagaggagatgatgtctgctttaagctgtaatgttttgccatgttgcaaaaagccataataataagtataaaaaagctttttcctttacaatttcatgttaatctggtttgtctgtccaccagagacagatcttctgtgacagcctccttatgcaggtctatcattatttgatagaatgtcttctaaaatacttcactcacattgtaattcaaattagaaagtcattccaaaaggatcatgtcatgttgacctcatttcatcggaactgcagtatatttttgttggttaattatattagtgttttctattttgtaaatgtgtcctttaattttactttaaatgccctgtgtcatttctggattatatactagttaatttcttccattccctactacacagagaggtgagctttcaaattttgcagagctctgctatcactgaattacatttatctgaagaaaatagtacaacttaatggattagcttttgggtttaactgaatatatgaagaaattgggtctgtctaaagagagggtatttcatatggcttttagttcacttgtttgtatttcatcttgatttttttctttggaaaataaagcattctatttggttcagatttctcagatttgaaaaaggctctatctcagatgtagtaaattatttcctttcagtttgtgaaagcaggatttgactctgaaagaagctttgccaattttacttattcgtgatcaatcaaggaaaatctaataaattttaggccaaataagaatatagcatatttagtatggttatagtcaacacagagatcacaacttagaagaaatataaagaaatggccactccccatcccccacagtcctggagtaaatcaaaatcaatatatgattcttttaaacattaagtttgaaataggaatggttttctcaagaatagatttggtgtgataccttgtgtttgcttacattggcccactatatatacatatatatttatgtagatatacttccatgaaagggctaatacgatgcatatactgaagggcaaggactttgaccatgtgaattttcagccgagaatggtcagaaagatcagtacaaccccatggattaggctgaaacatatgaaattgctgcatttgtagtttaaaaactgtcagcagtttcatatggttccacctaatattattgaagacaattattttcttagctatcaataggcttaatagttttagttattttagcttttgaaagtgttttaaaagatttcctttatcggacaggaccatctttatgacctgctttctgtttttcaatatcatacattggtgtatgtcaaagaataaattagtaaaattagtaaatgaaaaagactcttccgtacatcattatttccatgctaatgtgtgtctgtgatccagaataacttctcccactcatatcttcagttcacctaatgaaatgaatggatagcaagagccctttgttcccaggactttaaggcaaaatattaaaaattattgccaaaattaagaatataatgtttgtataaatgtccttgaatttgccatttaaattaactcattttcttttcactttgatttgaaagctgataagtatttctgcagcagatagaatattaaaatcaggttgtgtgtacacactgcactatgaggtaccttggtgtcctggtgtgaatgcaattctagaacttggatttttttttaacaaaagtcccaaaacaccaaaaatgtaaacaagataagagattaatattgtagtgatgtaatttaattaaagttatattttgggttaattttaacaactgaagtcttattgttgaaacttattttcaacaaaactgtgcagttaaatttgtatacgtattcacatactgaaagatgaaccgttaaaatagcacttaattttgtgtttcttcaatatgtcttgatatactttgtgcaattaatattacacatgtaagttgtatggcagtttacagaactcaatgacttgtcatgaggttttcatatgagctacacattgtgtacattgattgttttttatttttacataaatccattctgtcattttcaactttatatataaatctccaatgttatgggaaacaatagattgacacataatttttaaaaattatatttgtaaaatttctctattgtgaataaagtcttttaatatatctcc

SEQ ID NO: 299237 - DNA, 4264 bp, Homo sapiens
ttcctccaaaatcctttctagccagagaaggtttttctcaactgataaggcaaagtctatgctttccatcttcttggtagttggattaaatgggagaaaaatggggtacaattatatatgtaaaaaaaaaagagggacagaattatgatccacaggggaaaactgaaacgtaagtgaaaaatgacatgagaaactaagagtaagtatatcttgtttacattttctttatttcactataaaatatattagggttttagtcttaaactttattatttttgtctacagtcaataaatgagaaccagattgcagatggcaatttttgtacgatggaaatttttatttgaccatataattaataggattagtaggatgtgatggcagaaaataactttcctagagatgaatatgcctggtaactagcagagcaacaaatgtaatttcaaaatataaacagcacaaaaaaaaaaacaactcaaaatgaattaaagacttaaatgtaagacctgaaaccataaaactcctaggagaaaacaacaggggaaaagctccttgacattgagcttggcaatgattttttggattcgacccaaaaacacaggcaacaaaagcaaacataaacacatgaaactacatcaaactaaaaagtttccttacagcaaaggaaacaatcaactaaaaacacaacaaaaatgtgtgcaaaccatatatctgataaggggttaatatccaaaatatataaggaacttacaattcagtagcagaaaaacaacctgatttcaaaataggcaaaggacctgaagagacatttttccaaagaagacgtacagatggccagtagtgaaaagatgctcaacatcacaaatcatcagggaaatgcagattagaaccacagtgagatatcacctcatacctttttaaatggctattatcaaaaattcaagaggtaatcagtcttagtgaggatgcagaataaagggaacctttgtacactgttggtggcaatgaaaattgatatagccattatggaaaacagtatggaggtttctcaaaaaattaaaaatagagctaccatatgatccagcaatcctaattcttggtgtatatccacagaagatgatgtgtatccacatcagaagatgatgtatatccaccacagaagatggtgtatatccacagaagtagtgtatatcaaaacatcacactgtacaccttccagtatatactatttgtatttgtcatacatcggtaaagctggaaaaaggttaaagaaaaatagaaacaaacaaaagaaagaaagtgggctctgaaagggaaaaagaaaacacaaacagcagccatcttagtggtaaccaacaaagtggaaggcaggttggtttaggttgttacctaaatgttcatcctcacactgcccaacccatctgttttccaaatattcattaaattcagacaactacagaaatgtaggatcatttctctctagagagttgtcagtggagtcatcccatcttcttccatactagaatatttgtacctaatattttctgacgacgatcttcttccactggagcattggatcttcaatagcgaggcacatcttctccctatcctccctaaagataaaaaggaagttgaaatcagagaggaataaaaagacattttatattttattctgctccattcccttcactgtataccttaataattccttttctggtaatcaggcacatgatgaactttgattagtaggtctgtgattaagttcttaaattgttttgcagtcttttatgtttattatcataggtataggtggacctaaattccttatcatatcctttattaattcagccagtgtatccaccagttttttgtttatgtttttaagtaacctattatctctggatttcatgaaggtgtaatatcgtttttgttaaactgaatagaattgtatagcgatgacctcttaattataatttgatttgactgcaaaactttttcctcctctaagaggagatgatgtctgctttaagctgtaatgttttgccatgttgcaaaaagccataataataagtataaaaaagctttttcctttacaatttcatgttaatctggtttgtctgtccaccagagacagatcttctgtgacagcctccttatgcaggtctatcattatttgatagaatgtcttctaaaatacttcactcacattgtaattcaaattagaaagtcattccaaaaggatcatgtcatgttgacctcatttcatcggaactgcagtatatttttgttggttaattatattagtgttttctattttgtaaatgtgtcctttaattttactttaaatgccctgtgtcatttctggattatatactagttaatttcttccattccctactacacagagaggtgagctttcaaattttgcagagctctgctatcactgaattacatttatctgaagaaaatagtacaacttaatggattagcttttgggtttaactgaatatatgaagaaattgggtctgtctaaagagagggtatttcatatggcttttagttcacttgtttgtatttcatcttgatttttttctttggaaaataaagcattctatttggttcagatttctcagatttgaaaaaggctctatctcagatgtagtaaattatttcctttcagtttgtgaaagcaggatttgactctgaaagaagctttgccaattttacttattcgtgatcaatcaaggaaaatctaataaattttaggccaaataagaatatagcatatttagtatggttatagtcaacacagagatcacaacttagaagaaatataaagaaatggccactccccatcccccacagtcctggagtaaatcaaaatcaatatatgattcttttaaacattaagtttgaaataggaatggttttctcaagaatagatttggtgtgataccttgtgtttgcttacattggcccactatatatacatatatatttatgtagatatacttccatgaaagggctaatacgatgcatatactgaagggcaaggactttgaccatgtgaattttcagccgagaatggtcagaaagatcagtacaaccccatggattaggctgaaacatatgaaattgctgcatttgtagtttaaaaactgtcagcagtttcatatggttccacctaatattattgaagacaattattttcttagctatcaataggcttaatagttttagttattttagcttttgaaagtgttttaaaagatttcctttatcggacaggaccatctttatgacctgctttctgtttttcaatatcatacattggtgtatgtcaaagaataaattagtaaaattagtaaatgaaaaagactcttccgtacatcattatttccatgctaatgtgtgtctgtgatccagaataacttctcccactcatatcttcagttcacctaatgaaatgaatggatagcaagagccctttgttcccaggactttaaggcaaaatattaaaaattattgccaaaattaagaatataatgtttgtataaatgtccttgaatttgccatttaaattaactcattttcttttcactttgatttgaaagctgataagtatttctgcagcagatagaatattaaaatcaggttgtgtgtacacactgcactatgaggtaccttggtgtcctggtgtgaatagacaagaagctgtactatatgttgctctctcagtggcaacaatgaagtttttgcaattctagaacttggatttttttttaacaaaagtcccaaaacaccaaaaatgtaaacaagataagagattaatattgtagtgatgtaatttaattaaagttatattttgggttaattttaacaactgaagtcttattgttgaaacttattttcaacaaaactgtgcagttaaatttgtatacgtattcacatactgaaagatgaaccgttaaaatagcacttaattttgtgtttcttcaatatgtcttgatatactttgtgcaattaatattacacatgtaagttgtatggcagtttacagaactcaatgacttgtcatgaggttttcatatgagctacacattgtgtacattgattgttttttatttttacataaatccattctgtcattttcaactttatatataaatctccaatgttatgggaaacaatagattgacacataatttttaaaaattatatttgtaaaatttctctattgtgaataaagtcttttaatatatctcc

SEQ ID NO: 299238 - DNA, 5552 bp, Homo sapiens
  misc_feature (5460)..(5460): n is a, c, g, or t
  misc_feature (5552)..(5552): n is a, c, g, or t
ccaacttatttaaaacaaaacaattttgtaggtattattatacccatttcacagatgatgataaatgagaccaatagaagttaaataacttgccaaaggccacacagctggtgagtgatggagaacgaattaaaactcaagtgagcataattctaaaagccatcttctcgttagtgtttctcactatccaggtctgcctttgccttatttaactgaagttaagccatccttacctgtgatcacctagcctctcagtttggggggatcattacagcgggtttttaactcccaatgttctggtccagtttgctttacatgttcttatttatacattgtcaaggatgacctcaggacagtacagcaaggacacagtggcacttcacattttgttcccacgaaatgactggggcataatctcagatcatcttcctttagaatgtggaaacatcagcagaagaatattagtctttatacaagtcaaatccaaaatgacacatgtgaaaactaatagagctgactttcagccatgatagctttggcacacctcacatccctttgttcaacctctcttccctcaacggagagctgcattcctgggaatttctgttgtgcacttttcccacttgccctgctgtcatttaaaggtgaacattctagttttgctaagaaaaccctttccttcatttggaatgaacagcaattttattacttttgaccttaaaatgagtttgctgccttcaaatcttttcagcgccttcatcacgctctgcttcggggcgatcttcttcctgccagactcctccaagctgctcagcggggtcctgttccactccagccccgccttgcagccggccgccgaccacaagcccgggcccggggcgcgcgccgaggacgcggccgaggggcgagcccggcgccgcgaggagggggcacccggggacccggaggccgccctggaggacaacttggccaggatccgcgaaaaccacgagcgggctctcagggaagccaaggagaccctgcagaagctgcccgaggagatccaaagagacatcctactggagaagaagaaggtggcccaggaccagctgcgtgacaaggcgccgttcagaggcctgcccccggtggacttcgtgcccccaatcggggtggagagccgggagcccgccgacgccgccatccgcgagaaaagggcaaagatcaaagagatgatgaaacatgcttggaataattataaaggttatgcctggggattaaatgaactcaaacctatatcaaaaggaggccattcaagcagtttgtttggtaacatcaaaggagcaactatagtagatgccctggatacactttttattatggaaatgaaacatgaatttgaagaagcaaaatcatgggttgaagaaaatttagattttaatgtgaatgctgaaatttctgtctttgaagtaaatatacgctttgttggtggactactctcagcctactatctgtctggagaagagatttttcgaaagaaagcagtggaacttggggtaaaattgctacctgcatttcatactccctctggaataccttgggcattgctgaatatgaaaagtggtattggaaggaactggccctgggcctctggaggcagcagtattctggcagaatttggaaccctgcatttggagtttatgcacttgagccacttatcaggaaaccccatctttgctgaaaaggtaatgaatattcgaacagtactgaacaaactggaaaaaccacaaggcctttatcctaactatctgaatcccagtagtggacagtggggtcaacatcatgtatcagttggaggacttggagacagcttctatgagtatttgctgaaggcctggttaatgtctgacaagacagatctggaagctaagaagatgtattttgatgctgttcaggctatcgagactcatttgatccgcaagtctagcagcggactaacttatatcgcagagtggaaagggggcctcctggagcacaagatgggccacctgacctgcttcgctgggggcatgttcgcactcggggctgatgcagctcccgaaggcatggcccaacactaccttgaactcggggctgaaattgcccgtacttgtcatgaatcatataatcgaacatttatgaaactgggaccagaagctttcagatttgatggtggtgttgaagccatcgctacaagacaaaatgaaaaatactacatcttacggccagaagttatggagacttacatgtatatgtggagactgactcatgatccaaagtacaggaaatgggcctgggaagccgtagaggccttggaaaaccattgcagagtgaatggaggctattcaggcctaagggatgtttaccttcttcatgagagttatgatgatgtgcagcagagtttcttcctggcagagacattgaaatatttgtacctaatattttctgacgacgatcttcttccactggagcattggatcttcaatagcgaggcacatcttctccctatcctccctaaagataaaaaggaagttgaaatcagagaggaataaaaagacattttatattttattctgctccattcccttcactgtataccttaataattccttttctggtaatcaggcacatgatgaactttgattagtaggtctgtgattaagttcttaaattgttttgcagtcttttatgtttattatcataggtataggtggacctaaattccttatcatatcctttattaattcagccagtgtatccaccagttttttgtttatgtttttaagtaacctattatctctggatttcatgaaggtgtaatatcgtttttgttaaactgaatagaattgtatagcgatgacctcttaattataatttgatttgactgcaaaactttttcctcctctaagaggagatgatgtctgctttaagctgtaatgttttgccatgttgcaaaaagccataataataagtataaaaaagctttttcctttacaatttcatgttaatctggtttgtctgtccaccagagacagatcttctgtgacagcctccttatgcaggtctatcattatttgatagaatgtcttctaaaatacttcactcacattgtaattcaaattagaaagtcattccaaaaggatcatgtcatgttgacctcatttcatcggaactgcagtatatttttgttggttaattatattagtgttttctattttgtaaatgtgtcctttaattttactttaaatgccctgtgtcatttctggattatatactagttaatttcttccattccctactacacagagaggtgagctttcaaattttgcagagctctgctatcactgaattacatttatctgaagaaaatagtacaacttaatggattagcttttgggtttaactgaatatatgaagaaattgggtctgtctaaagagagggtatttcatatggcttttagttcacttgtttgtatttcatcttgatttttttctttggaaaataaagcattctatttggttcagatttctcagatttgaaaaaggctctatctcagatgtagtaaattatttcctttcagtttgtgaaagcaggatttgactctgaaagaagctttgccaattttacttattcgtgatcaatcaaggaaaatctaataaattttaggccaaataagaatatagcatatttagtatggttatagtcaacacagagatcacaacttagaagaaatataaagaaatggccactccccatcccccacagtcctggagtaaatcaaaatcaatatatgattcttttaaacattaagtttgaaataggaatggttttctcaagaatagatttggtgtgataccttgtgtttgcttacattggcccactatatatacatatatatttatgtagatatacttccatgaaagggctaatacgatgcatatactgaagggcaaggactttgaccatgtgaattttcagccgagaatggtcagaaagatcagtacaaccccatggattaggctgaaacatatgaaattgctgcatttgtagtttaaaaactgtcagcagtttcatatggttccacctaatattattgaagacaattattttcttagctatcaataggcttaatagttttagttattttagcttttgaaagtgttttaaaagatttcctttatcggacaggaccatctttatgacctgctttctgtttttcaatatcatacattggtgtatgtcaaagaataaattagtaaaattagtaaatgaaaaagactcttccgtacatcattatttccatgctaatgtgtgtctgtgatccagaataacttctcccactcatatcttcagttcacctaatgaaatgaatggatagcaagagccctttgttcccaggactttaaggcaaaatattaaaaattattgccaaaattaagaatataatgtttgtataaatgtccttgaatttgccatttaaattaactcattttcttttcactttgatttgaaagctgataagtatttctgcagcagatagaatattaaaatcaggttgtgtgtacacactgcactatgaggtaccttggtgtcctggtgtgaatagacaagaagctgtactatatgttgctctctcagtggcaacaatgaagtttttgcaattctagaacttggatttttttttaacaaaagtcccaaaacaccaaaaatgtaaacaagataagagattaatattgtagtgatgtaatttaattaaagttatattttgggttaattttaacaactgaagtcttattgttgaaacttattttcaacaaaactgtgcagttaaatttgtatacgtattcacatactgaaagatgaaccgttaaaatagcacttaattttgtgtttcttcaatatgtcttgatatactttgtgcaattaatattacacatgtaagttgtatggcagtttacagaactcaatgacttgtcatgaggttttcatatgagctacacattgtgtacattgattgttttttatttttacataaatccattctgtcattttcaactttatatataaatctccaatgttatgggaaacaatagattgacacataatttttaaaaattatatttgtaaaatttctctattgtgaataaagtcttttaatatatctccaaaaaaaaaaccactccaccttactaccagacaaccttagccaaaccatttacccaaataaagtataggcgatagaaattgagacctgtcgcaatagatatagtaccgcaagggaaagatgaaaaattataaccaagcataatatagcaaggactaacccctataccttctgcataatgaattaactagaaataactttgcaaggagagccaaagctaagacccccgaaaccagacgagctacctaagaacagctgagcacacccgtctatgtagcanaatagtgggaagatttataggtagaggcgacaaacctaccgagcctggtgatagctggttgtccaagatagaatttttgtcccttttttgcn

SEQ ID NO: 299239 - DNA, 4076 bp, Homo sapiens
ccgaccggccgtgtttttcagggagaaacggcaagcctttgaaactctgaagactgcaacaatgcaatgtatggggagatggaggtttgccccttccaccagatgatgaaacatgcttggaataattataaaggttatgcctggggattaaatgaactcaaacctatatcaaaaggaggccattcaagcagtttgtttggtaacatcaaaggagcaactatagtagatgccctggatacactttttattatggaaatgaaacatgaatttgaagaagcaaaatcatgggttgaagaaaatttagattttaatgtgaatgctgaaatttctgtctttgaagtaaatatacgctttgttggtggactactctcagcctactatctgtctggagaagagatttttcgaaagaaagcagtggaacttggggtaaaattgctacctgcatttcatactccctctggaataccttgggcattgctgaatatgaaaagtggtattggaaggaactggccctgggcctctggaggcagcagtattctggcagaatttggaaccctgcatttggagtttatgcacttgagccacttatcaggaaaccccatctttgctgaaaaggtaatgaatattcgaacagtactgaacaaactggaaaaaccacaaggcctttatcctaactatctgaatcccagtagtggacagtggggtcaacatcatgtatcagttggaggacttggagacagcttctatgagtatttgctgaaggcctggttaatgtctgacaagacagatctggaagctaagaagatgtattttgatgctgttcaggctatcgagactcatttgatccgcaagtctagcagcggactaacttatatcgcagagtggaaagggggcctcctggagcacaagatgggccacctgacctgcttcgctgggggcatgttcgcactcggggctgatgcagctcccgaaggcatggcccaacactaccttgaactcggggctgaaattgcccgtacttgtcatgaatcatataatcgaacatttatgaaactgggaccagaagctttcagatttgatggtggtgttgaagccatcgctacaagacaaaatgaaaaatactacatcttacggccagaagttatggagacttacatgtatatgtggagactgactcatgatccaaagtacaggaaatgggcctgggaagccgtagaggccttggaaaaccattgcagagtgaatggaggctattcaggcctaagggatgtttaccttcttcatgagagttatgatgatgtgcagcagagtttcttcctggcagagacattgaaatatttgtacctaatattttctgacgacgatcttcttccactggagcattggatcttcaatagcgaggcacatcttctccctatcctccctaaagataaaaaggaagttgaaatcagagaggaataaaaagacattttatattttattctgctccattcccttcactgtataccttaataattccttttctggtaatcaggcacatgatgaactttgattagtaggtctgtgattaagttcttaaattgttttgcagtcttttatgtttattatcataggtataggtggacctaaattccttatcatatcctttattaattcagccagtgtatccaccagttttttgtttatgtttttaagtaacctattatctctggatttcatgaaggtgtaatatcgtttttgttaaactgaatagaattgtatagcgatgacctcttaattataatttgatttgactgcaaaactttttcctcctctaagaggagatgatgtctgctttaagctgtaatgttttgccatgttgcaaaaagccataataataagtataaaaaagctttttcctttacaatttcatgttaatctggtttgtctgtccaccagagacagatcttctgtgacagcctccttatgcaggtctatcattatttgatagaatgtcttctaaaatacttcactcacattgtaattcaaattagaaagtcattccaaaaggatcatgtcatgttgacctcatttcatcggaactgcagtatatttttgttggttaattatattagtgttttctattttgtaaatgtgtcctttaattttactttaaatgccctgtgtcatttctggattatatactagttaatttcttccattccctactacacagagaggtgagctttcaaattttgcagagctctgctatcactgaattacatttatctgaagaaaatagtacaacttaatggattagcttttgggtttaactgaatatatgaagaaattgggtctgtctaaagagagggtatttcatatggcttttagttcacttgtttgtatttcatcttgatttttttctttggaaaataaagcattctatttggttcagatttctcagatttgaaaaaggctctatctcagatgtagtaaattatttcctttcagtttgtgaaagcaggatttgactctgaaagaagctttgccaattttacttattcgtgatcaatcaaggaaaatctaataaattttaggccaaataagaatatagcatatttagtatggttatagtcaacacagagatcacaacttagaagaaatataaagaaatggccactccccatcccccacagtcctggagtaaatcaaaatcaatatatgattcttttaaacattaagtttgaaataggaatggttttctcaagaatagatttggtgtgataccttgtgtttgcttacattggcccactatatatacatatatatttatgtagatatacttccatgaaagggctaatacgatgcatatactgaagggcaaggactttgaccatgtgaattttcagccgagaatggtcagaaagatcagtacaaccccatggattaggctgaaacatatgaaattgctgcatttgtagtttaaaaactgtcagcagtttcatatggttccacctaatattattgaagacaattattttcttagctatcaataggcttaatagttttagttattttagcttttgaaagtgttttaaaagatttcctttatcggacaggaccatctttatgacctgctttctgtttttcaatatcatacattggtgtatgtcaaagaataaattagtaaaattagtaaatgaaaaagactcttccgtacatcattatttccatgctaatgtgtgtctgtgatccagaataacttctcccactcatatcttcagttcacctaatgaaatgaatggatagcaagagccctttgttcccaggactttaaggcaaaatattaaaaattattgccaaaattaagaatataatgtttgtataaatgtccttgaatttgccatttaaattaactcattttcttttcactttgatttgaaagctgataagtatttctgcagcagatagaatattaaaatcaggttgtgtgtacacactgcactatgaggtaccttggtgtcctggtgtgaatagacaagaagctgtactatatgttgctctctcagtggcaacaatgaagtttttgcaattctagaacttggatttttttttaacaaaagtcccaaaacaccaaaaatgtaaacaagataagagattaatattgtagtgatgtaatttaattaaagttatattttgggttaattttaacaactgaagtcttattgttgaaacttattttcaacaaaactgtgcagttaaatttgtatacgtattcacatactgaaagatgaaccgttaaaatagcacttaattttgtgtttcttcaatatgtcttgatatactttgtgcaattaatattacacatgtaagttgtatggcagtttacagaactcaatgacttgtcatgaggttttcatatgagctacacattgtgtacattgattgttttttatttttacataaatccattctgtcattttcaactttatatataaatctccaatgttatgggaaacaatagattgacacataatttttaaaaattatatttgtaaaatttctctattgtgaataaagtcttttaatatatctcc

SEQ ID NO: 299240 - DNA, 5522 bp, Homo sapiens
ccaacttatttaaaacaaaacaattttgtaggtattattatacccatttcacagatgatgataaatgagaccaatagaagttaaataacttgccaaaggccacacagctggtgagtgatggagaacgaattaaaactcaagtgagcataattctaaaagccatcttctcgttagtgtttctcactatccaggtctgcctttgccttatttaactgaagttaagccatccttacctgtgatcacctagcctctcagtttggggggatcattacagcgggtttttaactcccaatgttctggtccagtttgctttacatgttcttatttatacattgtcaaggatgacctcaggacagtacagcaaggacacagtggcacttcacattttgttcccacgaaatgactggggcataatctcagatcatcttcctttagaatgtggaaacatcagcagaagaatattagtctttatacaagtcaaatccaaaatgacacatgtgaaaactaatagagctgactttcagccatgatagctttggcacacctcacatccctttgttcaacctctcttccctcaacggagagctgcattcctgggaatttctgttgtgcacttttcccacttgccctgctgtcatttaaaggtgaacattctagttttgctaagaaaaccctttccttcatttggaatgaacagcaattttattacttttgaccttaaaatgagtttgctgccttcaaatcttttcagcgccttcatcacgctctgcttcggggcgatcttcttcctgccagactcctccaagctgctcagcggggtcctgttccactccagccccgccttgcagccggccgccgaccacaagcccgggcccggggcgcgcgccgaggacgcggccgaggggcgagcccggcgccgcgaggagggggcacccggggacccggaggccgccctggaggacaacttggccaggatccgcgaaaaccacgagcgggctctcagggaagccaaggagaccctgcagaagctgcccgaggagatccaaagagacatcctactggagaagaagaaggtggcccaggaccagctgcgtgacaaggcgccgttcagaggcctgcccccggtggacttcgtgcccccaatcggggtggagagccgggagcccgccgacgccgccatccgcgagaaaagggcaaagatcaaagagatgatgaaacatgcttggaataattataaaggttatgcctggggattaaatgaactcaaacctatatcaaaaggaggccattcaagcagtttgtttggtaacatcaaaggagcaactatagtagatgccctggatacactttttattatggaaatgaaacatgaatttgaagaagcaaaatcatgggttgaagaaaatttagattttaatgtgaatgctgaaatttctgtctttgaagtaaatatacgctttgttggtggactactctcagcctactatctgtctggagaagagatttttcgaaagaaagcagtggaacttggggtaaaattgctacctgcatttcatactccctctggaataccttgggcattgctgaatatgaaaagtggtattggaaggaactggccctgggcctctggaggcagcagtattctggcagaatttggaaccctgcatttggagtttatgcacttgagccacttatcaggaaaccccatctttgctgaaaaggtaatgaatattcgaacagtactgaacaaactggaaaaaccacaaggcctttatcctaactatctgaatcccagtagtggacagtggggtcaacatcatgtatcagttggaggacttggagacagcttctatgagtatttgctgaaggcctggttaatgtctgacaagacagatctggaagctaagaagatgtattttgatgctgttcaggctatcgagactcatttgatccgcaagtctagcagcggactaacttatatcgcagagtggaaagggggcctcctggagcacaagatgggccacctgacctgcttcgctgggggcatgttcgcactcggggctgatgcagctcccgaaggcatggcccaacactaccttgaactcggggctgaaattgcccgtacttgtcatgaatcatataatcgaacatttatgaaactgggaccagaagctttcagatttgatggtggtgttgaagccatcgctacaagacaaaatgaaaaatactacatcttacggccagaagttatggagacttacatgtatatgtggagactgactcatgatccaaagtacaggaaatgggcctgggaagccgtagaggccttggaaaaccattgcagagtgaatggaggctattcaggcctaagggatgtttaccttcttcatgagagttatgatgatgtgcagcagagtttcttcctggcagagacattgaaatatttgtacctaatattttctgacgacgatcttcttccactggagcattggatcttcaatagcgaggcacatcttctccctatcctccctaaagataaaaaggaagttgaaatcagagaggaataaaaagacattttatattttattctgctccattcccttcactgtataccttaataattccttttctggtaatcaggcacatgatgaactttgattagtaggtctgtgattaagttcttaaattgttttgcagtcttttatgtttattatcataggtataggtggacctaaattccttatcatatcctttattaattcagccagtgtatccaccagttttttgtttatgtttttaagtaacctattatctctggatttcatgaaggtgtaatatcgtttttgttaaactgaatagaattgtatagcgatgacctcttaattataatttgatttgactgcaaaactttttcctcctctaagaggagatgatgtctgctttaagctgtaatgttttgccatgttgcaaaaagccataataataagtataaaaaagctttttcctttacaatttcatgttaatctggtttgtctgtccaccagagacagatcttctgtgacagcctccttatgcaggtctatcattatttgatagaatgtcttctaaaatacttcactcacattgtaattcaaattagaaagtcattccaaaaggatcatgtcatgttgacctcatttcatcggaactgcagtatatttttgttggttaattatattagtgttttctattttgtaaatgtgtcctttaattttactttaaatgccctgtgtcatttctggattatatactagttaatttcttccattccctactacacagagaggtgagctttcaaattttgcagagctctgctatcactgaattacatttatctgaagaaaatagtacaacttaatggattagcttttgggtttaactgaatatatgaagaaattgggtctgtctaaagagagggtatttcatatggcttttagttcacttgtttgtatttcatcttgatttttttctttggaaaataaagcattctatttggttcagatttctcagatttgaaaaaggctctatctcagatgtagtaaattatttcctttcagtttgtgaaagcaggatttgactctgaaagaagctttgccaattttacttattcgtgatcaatcaaggaaaatctaataaattttaggccaaataagaatatagcatatttagtatggttatagtcaacacagagatcacaacttagaagaaatataaagaaatggccactccccatcccccacagtcctggagtaaatcaaaatcaatatatgattcttttaaacattaagtttgaaataggaatggttttctcaagaatagatttggtgtgataccttgtgtttgcttacattggcccactatatatacatatatatttatgtagatatacttccatgaaagggctaatacgatgcatatactgaagggcaaggactttgaccatgtgaattttcagccgagaatggtcagaaagatcagtacaaccccatggattaggctgaaacatatgaaattgctgcatttgtagtttaaaaactgtcagcagtttcatatggttccacctaatattattgaagacaattattttcttagctatcaataggcttaatagttttagttattttagcttttgaaagtgttttaaaagatttcctttatcggacaggaccatctttatgacctgctttctgtttttcaatatcatacattggtgtatgtcaaagaataaattagtaaaattagtaaatgaaaaagactcttccgtacatcattatttccatgctaatgtgtgtctgtgatccagaataacttctcccactcatatcttcagttcacctaatgaaatgaatggatagcaagagccctttgttcccaggactttaaggcaaaatattaaaaattattgccaaaattaagaatataatgtttgtataaatgtccttgaatttgccatttaaattaactcattttcttttcactttgatttgaaagctgataagtatttctgcagcagatagaatattaaaatcaggttgtgtgtacacactgcactatgaggtaccttggtgtcctggtgtgaatagacaagaagctgtactatatgttgctctctcagtggcaacaatgaagtttttgcaattctagaacttggatttttttttaacaaaagtcccaaaacaccaaaaatgtaaacaagataagagattaatattgtagtgatgtaatttaattaaagttatattttgggttaattttaacaactgaagtcttattgttgaaacttattttcaacaaaactgtgcagttaaatttgtatacgtattcacatactgaaagatgaaccgttaaaatagcacttaattttgtgtttcttcaatatgtcttgatatactttgtgcaattaatattacacatgtaagttgtatggcagtttacagaactcaatgacttgtcatgaggttttcatatgagctacacattgtgtacattgattgttttttatttttacataaatccattctgtcattttcaactttatatataaatctccaatgttatgggaaacaatagattgacacataatttttaaaaattatatttgtaaaatttctctattgtgaataaagtcttttaatatatctccaaaaaaaaaaaaaaaaaaagaaacaaaaaaagaaaaaaaaaaaaaaaaaaaaaaaaaaaagggggggggggaaaaaaaaaccacggggggcacaaatctatccgccacccacgtttagatcaaaggggccccaagagagagacaaaagaaagcgacggcgacacaacaaccgggggcacacgcgtacgactagggagagcacaatcgcggtagtaggacacacacaaaaaacgagaacaaacaggaccgtgacaccacctgcgattgcctaataaaaaggcagaaacggcacgcacagcgacgagcacgcagcagaaacaccacacgcagcaccatgtac

SEQ ID NO: 299241 - DNA, 4022 bp, Homo sapiens
ccgaccggccgtgtttttcagggagaaacggcaagcctttgaaactctgaagactgcaacaatgcaatgtatggggagatggaggtttgccccttccaccagatgatgaaacatgcttggaataattataaaggttatgcctggggattaaatgaactcaaacctatatcaaaaggaggccattcaagcagtttgtttggtaacatcaaaggagcaactatagtagatgccctggatacactttttattatggaaatgaaacatgaatttgaagaagcaaaatcatgggttgaaggctttgttggtggactactctcagcctactatctgtctggagaagagatttttcgaaagaaagcagtggaacttggggtaaaattgctacctgcatttcatactccctctggaataccttgggcattgctgaatatgaaaagtggtattggaaggaactggccctgggcctctggaggcagcagtattctggcagaatttggaaccctgcatttggagtttatgcacttgagccacttatcaggaaaccccatctttgctgaaaaggtaatgaatattcgaacagtactgaacaaactggaaaaaccacaaggcctttatcctaactatctgaatcccagtagtggacagtggggtcaacatcatgtatcagttggaggacttggagacagcttctatgagtatttgctgaaggcctggttaatgtctgacaagacagatctggaagctaagaagatgtattttgatgctgttcaggctatcgagactcatttgatccgcaagtctagcagcggactaacttatatcgcagagtggaaagggggcctcctggagcacaagatgggccacctgacctgcttcgctgggggcatgttcgcactcggggctgatgcagctcccgaaggcatggcccaacactaccttgaactcggggctgaaattgcccgtacttgtcatgaatcatataatcgaacatttatgaaactgggaccagaagctttcagatttgatggtggtgttgaagccatcgctacaagacaaaatgaaaaatactacatcttacggccagaagttatggagacttacatgtatatgtggagactgactcatgatccaaagtacaggaaatgggcctgggaagccgtagaggccttggaaaaccattgcagagtgaatggaggctattcaggcctaagggatgtttaccttcttcatgagagttatgatgatgtgcagcagagtttcttcctggcagagacattgaaatatttgtacctaatattttctgacgacgatcttcttccactggagcattggatcttcaatagcgaggcacatcttctccctatcctccctaaagataaaaaggaagttgaaatcagagaggaataaaaagacattttatattttattctgctccattcccttcactgtataccttaataattccttttctggtaatcaggcacatgatgaactttgattagtaggtctgtgattaagttcttaaattgttttgcagtcttttatgtttattatcataggtataggtggacctaaattccttatcatatcctttattaattcagccagtgtatccaccagttttttgtttatgtttttaagtaacctattatctctggatttcatgaaggtgtaatatcgtttttgttaaactgaatagaattgtatagcgatgacctcttaattataatttgatttgactgcaaaactttttcctcctctaagaggagatgatgtctgctttaagctgtaatgttttgccatgttgcaaaaagccataataataagtataaaaaagctttttcctttacaatttcatgttaatctggtttgtctgtccaccagagacagatcttctgtgacagcctccttatgcaggtctatcattatttgatagaatgtcttctaaaatacttcactcacattgtaattcaaattagaaagtcattccaaaaggatcatgtcatgttgacctcatttcatcggaactgcagtatatttttgttggttaattatattagtgttttctattttgtaaatgtgtcctttaattttactttaaatgccctgtgtcatttctggattatatactagttaatttcttccattccctactacacagagaggtgagctttcaaattttgcagagctctgctatcactgaattacatttatctgaagaaaatagtacaacttaatggattagcttttgggtttaactgaatatatgaagaaattgggtctgtctaaagagagggtatttcatatggcttttagttcacttgtttgtatttcatcttgatttttttctttggaaaataaagcattctatttggttcagatttctcagatttgaaaaaggctctatctcagatgtagtaaattatttcctttcagtttgtgaaagcaggatttgactctgaaagaagctttgccaattttacttattcgtgatcaatcaaggaaaatctaataaattttaggccaaataagaatatagcatatttagtatggttatagtcaacacagagatcacaacttagaagaaatataaagaaatggccactccccatcccccacagtcctggagtaaatcaaaatcaatatatgattcttttaaacattaagtttgaaataggaatggttttctcaagaatagatttggtgtgataccttgtgtttgcttacattggcccactatatatacatatatatttatgtagatatacttccatgaaagggctaatacgatgcatatactgaagggcaaggactttgaccatgtgaattttcagccgagaatggtcagaaagatcagtacaaccccatggattaggctgaaacatatgaaattgctgcatttgtagtttaaaaactgtcagcagtttcatatggttccacctaatattattgaagacaattattttcttagctatcaataggcttaatagttttagttattttagcttttgaaagtgttttaaaagatttcctttatcggacaggaccatctttatgacctgctttctgtttttcaatatcatacattggtgtatgtcaaagaataaattagtaaaattagtaaatgaaaaagactcttccgtacatcattatttccatgctaatgtgtgtctgtgatccagaataacttctcccactcatatcttcagttcacctaatgaaatgaatggatagcaagagccctttgttcccaggactttaaggcaaaatattaaaaattattgccaaaattaagaatataatgtttgtataaatgtccttgaatttgccatttaaattaactcattttcttttcactttgatttgaaagctgataagtatttctgcagcagatagaatattaaaatcaggttgtgtgtacacactgcactatgaggtaccttggtgtcctggtgtgaatagacaagaagctgtactatatgttgctctctcagtggcaacaatgaagtttttgcaattctagaacttggatttttttttaacaaaagtcccaaaacaccaaaaatgtaaacaagataagagattaatattgtagtgatgtaatttaattaaagttatattttgggttaattttaacaactgaagtcttattgttgaaacttattttcaacaaaactgtgcagttaaatttgtatacgtattcacatactgaaagatgaaccgttaaaatagcacttaattttgtgtttcttcaatatgtcttgatatactttgtgcaattaatattacacatgtaagttgtatggcagtttacagaactcaatgacttgtcatgaggttttcatatgagctacacattgtgtacattgattgttttttatttttacataaatccattctgtcattttcaactttatatataaatctccaatgttatgggaaacaatagattgacacataatttttaaaaattatatttgtaaaatttctctattgtgaataaagtcttttaatatatctcc

SEQ ID NO: 299242 - DNA, 4553 bp, Homo sapiens
ccaacttatttaaaacaaaacaattttgtaggtattattatacccatttcacagatgatgataaatgagaccaatagaagttaaataacttgccaaaggccacacagctggtgagtgatggagaacgaattaaaactcaagtgagcataattctaaaagccatcttctcgttagtgtttctcactatccaggtctgcctttgccttatttaactgaagttaagccatccttacctgtgatcacctagcctctcagtttggggggatcattacagcgggtttttaactcccaatgttctggtccagtttgctttacatgttcttatttatacattgtcaaggatgacctcaggacagtacagcaaggacacagtggcacttcacattttgttcccacgaaatgactggggcataatctcagatcatcttcctttagaatgtggaaacatcagcagaagaatattagtctttatacaagtcaaatccaaaatgacacatgtgaaaactaatagagctgactttcagccatgatagctttggcacacctcacatccctttgttcaacctctcttccctcaacggagagctgcattcctgggaatttctgttgtgcacttttcccacttgccctgctgtcatttaaaggtgaacattctagttttgctaagaaaaccctttccttcatttggaatgaacagcaattttattacttttgaccttaaaatgagtttgctgccttcaaatcttttcagcgccttcatcacgctctgcttcggggcgatcttcttcctgccagactcctccaagctgctcagcggggtcctgttccactccagccccgccttgcagccggccgccgaccacaagcccgggcccggggcgcgcgccgaggacgcggccgaggggcgagcccggcgccgcgaggagggggcacccggggacccggaggccgccctggaggacaacttggccaggatccgcgaaaaccacgagcgggctctcagggaagccaaggagaccctaatttggaaccctgcatttggagtttatgcacttgagccacttatcaggaaaccccatctttgctgaaaaggtaatgaatattcgaacagtactgaacaaactggaaaaaccacaaggcctttatcctaactatctgaatcccagtagtggacagtggggtcaacatcatgtatcagttggaggacttggagacagcttctatgagtatttgctgaaggcctggttaatgtctgacaagacagatctggaagctaagaagatgtattttgatgctgttcaggctatcgagactcatttgatccgcaagtctagcagcggactaacttatatcgcagagtggaaagggggcctcctggagcacaagatgggccacctgacctgcttcgctgggggcatgttcgcactcggggctgatgcagctcccgaaggcatggcccaacactaccttgaactcggggctgaaattgcccgtacttgtcatgaatcatataatcgaacatttatgaaactgggaccagaagctttcagatttgatggtggtgttgaagccatcgctacaagacaaaatgaaaaatactacatcttacggccagaagttatggagacttacatgtatatgtggagactgactcatgatccaaagtacaggaaatgggcctgggaagccgtagaggccttggaaaaccattgcagagtgaatggaggctattcaggcctaagggatgtttaccttcttcatgagagttatgatgatgtgcagcagagtttcttcctggcagagacattgaaatatttgtacctaatattttctgacgacgatcttcttccactggagcattggatcttcaatagcgaggcacatcttctccctatcctccctaaagataaaaaggaagttgaaatcagagaggaataaaaagacattttatattttattctgctccattcccttcactgtataccttaataattccttttctggtaatcaggcacatgatgaactttgattagtaggtctgtgattaagttcttaaattgttttgcagtcttttatgtttattatcataggtataggtggacctaaattccttatcatatcctttattaattcagccagtgtatccaccagttttttgtttatgtttttaagtaacctattatctctggatttcatgaaggtgtaatatcgtttttgttaaactgaatagaattgtatagcgatgacctcttaattataatttgatttgactgcaaaactttttcctcctctaagaggagatgatgtctgctttaagctgtaatgttttgccatgttgcaaaaagccataataataagtataaaaaagctttttcctttacaatttcatgttaatctggtttgtctgtccaccagagacagatcttctgtgacagcctccttatgcaggtctatcattatttgatagaatgtcttctaaaatacttcactcacattgtaattcaaattagaaagtcattccaaaaggatcatgtcatgttgacctcatttcatcggaactgcagtatatttttgttggttaattatattagtgttttctattttgtaaatgtgtcctttaattttactttaaatgccctgtgtcatttctggattatatactagttaatttcttccattccctactacacagagaggtgagctttcaaattttgcagagctctgctatcactgaattacatttatctgaagaaaatagtacaacttaatggattagcttttgggtttaactgaatatatgaagaaattgggtctgtctaaagagagggtatttcatatggcttttagttcacttgtttgtatttcatcttgatttttttctttggaaaataaagcattctatttggttcagatttctcagatttgaaaaaggctctatctcagatgtagtaaattatttcctttcagtttgtgaaagcaggatttgactctgaaagaagctttgccaattttacttattcgtgatcaatcaaggaaaatctaataaattttaggccaaataagaatatagcatatttagtatggttatagtcaacacagagatcacaacttagaagaaatataaagaaatggccactccccatcccccacagtcctggagtaaatcaaaatcaatatatgattcttttaaacattaagtttgaaataggaatggttttctcaagaatagatttggtgtgataccttgtgtttgcttacattggcccactatatatacatatatatttatgtagatatacttccatgaaagggctaatacgatgcatatactgaagggcaaggactttgaccatgtgaattttcagccgagaatggtcagaaagatcagtacaaccccatggattaggctgaaacatatgaaattgctgcatttgtagtttaaaaactgtcagcagtttcatatggttccacctaatattattgaagacaattattttcttagctatcaataggcttaatagttttagttattttagcttttgaaagtgttttaaaagatttcctttatcggacaggaccatctttatgacctgctttctgtttttcaatatcatacattggtgtatgtcaaagaataaattagtaaaattagtaaatgaaaaagactcttccgtacatcattatttccatgctaatgtgtgtctgtgatccagaataacttctcccactcatatcttcagttcacctaatgaaatgaatggatagcaagagccctttgttcccaggactttaaggcaaaatattaaaaattattgccaaaattaagaatataatgtttgtataaatgtccttgaatttgccatttaaattaactcattttcttttcactttgatttgaaagctgataagtatttctgcagcagatagaatattaaaatcaggttgtgtgtacacactgcactatgaggtaccttggtgtcctggtgtgaatagacaagaagctgtactatatgttgctctctcagtggcaacaatgaagtttttgcaattctagaacttggatttttttttaacaaaagtcccaaaacaccaaaaatgtaaacaagataagagattaatattgtagtgatgtaatttaattaaagttatattttgggttaattttaacaactgaagtcttattgttgaaacttattttcaacaaaactgtgcagttaaatttgtatacgtattcacatactgaaagatgaaccgttaaaatagcacttaattttgtgtttcttcaatatgtcttgatatactttgtgcaattaatattacacatgtaagttgtatggcagtttacagaactcaatgacttgtcatgaggttttcatatgagctacacattgtgtacattgattgttttttatttttacataaatccattctgtcattttcaactttatatataaatctccaatgttatgggaaacaatagattgacacataatttttaaaaattatatttgtaaaatttctctattgtgaataaagtcttttaatatatctcc

SEQ ID NO: 299243 - DNA, 3143 bp, Homo sapiens
tttttgagatggagtcttgctgtgtcaccaggctggagtgcaatggaacgaccttggctcactgtaacctccgcctccctggttcaggagaatcacctgagcccaagaggtagaagctgcagtgacccatgatggtgccactgtactccgcccaggcaacagagtgaggccctgtctcaaaaaaaaaaaaatgttttatctgaacttgacaatctaataataaaaattagtgacaatcagtttactgaaatgtgacttttttttttttcctcctctataatttaggccttggaaaaccattgcagagtgaatggaggctattcaggcctaagggatgtttaccttcttcatgagagttatgatgatgtgcagcagagtttcttcctggcagagacattgaaatatttgtacctaatattttctgacgacgatcttcttccactggagcattggatcttcaatagcgaggcacatcttctccctatcctccctaaagataaaaaggaagttgaaatcagagaggaataaaaagacattttatattttattctgctccattcccttcactgtataccttaataattccttttctggtaatcaggcacatgatgaactttgattagtaggtctgtgattaagttcttaaattgttttgcagtcttttatgtttattatcataggtataggtggacctaaattccttatcatatcctttattaattcagccagtgtatccaccagttttttgtttatgtttttaagtaacctattatctctggatttcatgaaggtgtaatatcgtttttgttaaactgaatagaattgtatagcgatgacctcttaattataatttgatttgactgcaaaactttttcctcctctaagaggagatgatgtctgctttaagctgtaatgttttgccatgttgcaaaaagccataataataagtataaaaaagctttttcctttacaatttcatgttaatctggtttgtctgtccaccagagacagatcttctgtgacagcctccttatgcaggtctatcattatttgatagaatgtcttctaaaatacttcactcacattgtaattcaaattagaaagtcattccaaaaggatcatgtcatgttgacctcatttcatcggaactgcagtatatttttgttggttaattatattagtgttttctattttgtaaatgtgtcctttaattttactttaaatgccctgtgtcatttctggattatatactagttaatttcttccattccctactacacagagaggtgagctttcaaattttgcagagctctgctatcactgaattacatttatctgaagaaaatagtacaacttaatggattagcttttgggtttaactgaatatatgaagaaattgggtctgtctaaagagagggtatttcatatggcttttagttcacttgtttgtatttcatcttgatttttttctttggaaaataaagcattctatttggttcagatttctcagatttgaaaaaggctctatctcagatgtagtaaattatttcctttcagtttgtgaaagcaggatttgactctgaaagaagctttgccaattttacttattcgtgatcaatcaaggaaaatctaataaattttaggccaaataagaatatagcatatttagtatggttatagtcaacacagagatcacaacttagaagaaatataaagaaatggccactccccatcccccacagtcctggagtaaatcaaaatcaatatatgattcttttaaacattaagtttgaaataggaatggttttctcaagaatagatttggtgtgataccttgtgtttgcttacattggcccactatatatacatatatatttatgtagatatacttccatgaaagggctaatacgatgcatatactgaagggcaaggactttgaccatgtgaattttcagccgagaatggtcagaaagatcagtacaaccccatggattaggctgaaacatatgaaattgctgcatttgtagtttaaaaactgtcagcagtttcatatggttccacctaatattattgaagacaattattttcttagctatcaataggcttaatagttttagttattttagcttttgaaagtgttttaaaagatttcctttatcggacaggaccatctttatgacctgctttctgtttttcaatatcatacattggtgtatgtcaaagaataaattagtaaaattagtaaatgaaaaagactcttccgtacatcattatttccatgctaatgtgtgtctgtgatccagaataacttctcccactcatatcttcagttcacctaatgaaatgaatggatagcaagagccctttgttcccaggactttaaggcaaaatattaaaaattattgccaaaattaagaatataatgtttgtataaatgtccttgaatttgccatttaaattaactcattttcttttcactttgatttgaaagctgataagtatttctgcagcagatagaatattaaaatcaggttgtgtgtacacactgcactatgaggtaccttggtgtcctggtgtgaatagacaagaagctgtactatatgttgctctctcagtggcaacaatgaagtttttgcaattctagaacttggatttttttttaacaaaagtcccaaaacaccaaaaatgtaaacaagataagagattaatattgtagtgatgtaatttaattaaagttatattttgggttaattttaacaactgaagtcttattgttgaaacttattttcaacaaaactgtgcagttaaatttgtatacgtattcacatactgaaagatgaaccgttaaaatagcacttaattttgtgtttcttcaatatgtcttgatatactttgtgcaattaatattacacatgtaagttgtatggcagtttacagaactcaatgacttgtcatgaggttttcatatgagctacacattgtgtacattgattgttttttatttttacataaatccattctgtcattttcaactttatatataaatctccaatgttatgggaaacaatagattgacacataatttttaaaaattatatttgtaaaatttctctattgtgaataaagtcttttaatatatctcc

SEQ ID NO: 299244 - DNA, 4022 bp, Homo sapiens
ccgaccggccgtgtttttcagggagaaacggcaagcctttgaaactctgaagactgcaacaatgcaatgtatggggagatggaggtttgccccttccaccagatgatgaaacatgcttggaataattataaaggttatgcctggggattaaatgaactcaaacctatatcaaaaggaggccattcaagcagtttgtttggtaacatcaaaggagcaactatagtagatgccctggatacactttttattatggaaatgaaacatgaatttgaagaagcaaaatcatgggttgaagaaaatttagattttaatgtgaatgctgaaatttctgtctttgaagtaaatatacgctttgttggtggactactctcagcctactatctgtctggagaagagatttttcgaaagaaagcagtggaacttggggtaaaattgctacctgcatttcatactccctctggaataccttgggcattgctgaatatgaaaagtggtattggaaggaactggccctgggcctctggaggcagcagtattctggcagaatttggaaccctgcatttggagtttatgcacttgagccacttatcaggaaaccccatctttgctgaaaaggtaatgaatattcgaacagtactgaacaaactggaaaaaccacaaggcctttatcctaactatctgaatcccagtagtggacagtggggtcaacatcatgtatcagttggaggacttggagacagcttctatgagtatttgctgaaggcctggttaatgtctgacaagacagatctggaagctaagaagatgtattttgatgctgttcaggctatcgagactcatttgatccgcaagtctagcagcggactaacttatatcgcagagtggaaagggggcctcctggagcacaagatgggccacctgacctgcttcgctgggggcatgttcgcactcggggctgatgcagctcccgaaggcatggcccaacactaccttgaactcggggctgaaattgcccgtacttgtcatgaatcatataatcgaacatttatgaaactgggaccagaagctttcagatttgatggtggtgttgaagccatcgctacaagacaaaatgaaaaatactacatcttacggccagaagttatggagacttacatgtatatgtggagactgactcatgatccaaagtacaggaaatgggcctgggaagccgtagaggccttggaaaaccattgcagagtgaatggaggctattcaggcctaagggatgtttaccttcttcatgagagttatgatgatgtgcagcagagtttcttcctggcagagacattgaaatatttgtacctaatattttctgacgacgatcttcttccactggagcattggatcttcaatagcgaggcacatcttctccctatcctccctaaagataaaaaggaagttgaaatcagagaggaataattccttttctggtaatcaggcacatgatgaactttgattagtaggtctgtgattaagttcttaaattgttttgcagtcttttatgtttattatcataggtataggtggacctaaattccttatcatatcctttattaattcagccagtgtatccaccagttttttgtttatgtttttaagtaacctattatctctggatttcatgaaggtgtaatatcgtttttgttaaactgaatagaattgtatagcgatgacctcttaattataatttgatttgactgcaaaactttttcctcctctaagaggagatgatgtctgctttaagctgtaatgttttgccatgttgcaaaaagccataataataagtataaaaaagctttttcctttacaatttcatgttaatctggtttgtctgtccaccagagacagatcttctgtgacagcctccttatgcaggtctatcattatttgatagaatgtcttctaaaatacttcactcacattgtaattcaaattagaaagtcattccaaaaggatcatgtcatgttgacctcatttcatcggaactgcagtatatttttgttggttaattatattagtgttttctattttgtaaatgtgtcctttaattttactttaaatgccctgtgtcatttctggattatatactagttaatttcttccattccctactacacagagaggtgagctttcaaattttgcagagctctgctatcactgaattacatttatctgaagaaaatagtacaacttaatggattagcttttgggtttaactgaatatatgaagaaattgggtctgtctaaagagagggtatttcatatggcttttagttcacttgtttgtatttcatcttgatttttttctttggaaaataaagcattctatttggttcagatttctcagatttgaaaaaggctctatctcagatgtagtaaattatttcctttcagtttgtgaaagcaggatttgactctgaaagaagctttgccaattttacttattcgtgatcaatcaaggaaaatctaataaattttaggccaaataagaatatagcatatttagtatggttatagtcaacacagagatcacaacttagaagaaatataaagaaatggccactccccatcccccacagtcctggagtaaatcaaaatcaatatatgattcttttaaacattaagtttgaaataggaatggttttctcaagaatagatttggtgtgataccttgtgtttgcttacattggcccactatatatacatatatatttatgtagatatacttccatgaaagggctaatacgatgcatatactgaagggcaaggactttgaccatgtgaattttcagccgagaatggtcagaaagatcagtacaaccccatggattaggctgaaacatatgaaattgctgcatttgtagtttaaaaactgtcagcagtttcatatggttccacctaatattattgaagacaattattttcttagctatcaataggcttaatagttttagttattttagcttttgaaagtgttttaaaagatttcctttatcggacaggaccatctttatgacctgctttctgtttttcaatatcatacattggtgtatgtcaaagaataaattagtaaaattagtaaatgaaaaagactcttccgtacatcattatttccatgctaatgtgtgtctgtgatccagaataacttctcccactcatatcttcagttcacctaatgaaatgaatggatagcaagagccctttgttcccaggactttaaggcaaaatattaaaaattattgccaaaattaagaatataatgtttgtataaatgtccttgaatttgccatttaaattaactcattttcttttcactttgatttgaaagctgataagtatttctgcagcagatagaatattaaaatcaggttgtgtgtacacactgcactatgaggtaccttggtgtcctggtgtgaatagacaagaagctgtactatatgttgctctctcagtggcaacaatgaagtttttgcaattctagaacttggatttttttttaacaaaagtcccaaaacaccaaaaatgtaaacaagataagagattaatattgtagtgatgtaatttaattaaagttatattttgggttaattttaacaactgaagtcttattgttgaaacttattttcaacaaaactgtgcagttaaatttgtatacgtattcacatactgaaagatgaaccgttaaaatagcacttaattttgtgtttcttcaatatgtcttgatatactttgtgcaattaatattacacatgtaagttgtatggcagtttacagaactcaatgacttgtcatgaggttttcatatgagctacacattgtgtacattgattgttttttatttttacataaatccattctgtcattttcaactttatatataaatctccaatgttatgggaaacaatagattgacacataatttttaaaaattatatttgtaaaatttctctattgtgaataaagtcttttaatatatctcc

SEQ ID NO: 299245 - DNA, 4211 bp, Homo sapiens
ttcctccaaaatcctttctagccagagaaggtttttctcaactgataaggcaaagtctatgctttccatcttcttggtagttggattaaatgggagaaaaatggggtacaattatatatgtaaaaaaaaaagagggacagaattatgatccacaggggaaaactgaaacgtaagtgaaaaatgacatgagaaactaagagtaagtatatcttgtttacattttctttatttcactataaaatatattagggttttagtcttaaactttattatttttgtctacagtcaataaatgagaaccagattgcagatggcaatttttgtacgatggaaatttttatttgaccatataattaataggattagtaggatgtgatggcagaaaataactttcctagagatgaatatgcctggtaactagcagagcaacaaatgtaatttcaaaatataaacagcacaaaaaaaaaaacaactcaaaatgaattaaagacttaaatgtaagacctgaaaccataaaactcctaggagaaaacaacaggggaaaagctccttgacattgagcttggcaatgattttttggattcgacccaaaaacacaggcaacaaaagcaaacataaacacatgaaactacatcaaactaaaaagtttccttacagcaaaggaaacaatcaactaaaaacacaacaaaaatgtgtgcaaaccatatatctgataaggggttaatatccaaaatatataaggaacttacaattcagtagcagaaaaacaacctgatttcaaaataggcaaaggacctgaagagacatttttccaaagaagacgtacagatggccagtagtgaaaagatgctcaacatcacaaatcatcagggaaatgcagattagaaccacagtgagatatcacctcatacctttttaaatggctattatcaaaaattcaagaggtaatcagtcttagtgaggatgcagaataaagggaacctttgtacactgttggtggcaatgaaaattgatatagccattatggaaaacagtatggaggtttctcaaaaaattaaaaatagagctaccatatgatccagcaatcctaattcttggtgtatatccacagaagatgatgtgtatccacatcagaagatgatgtatatccaccacagaagatggtgtatatccacagaagtagtgtatatcaaaacatcacactgtacaccttccagtatatactatttgtatttgtcatacatcggtaaagctggaaaaaggttaaagaaaaatagaaacaaacaaaagaaagaaagtgggctctgaaagggaaaaagaaaacacaaacagcagccatcttagtggtaaccaacaaagtggaaggcaggttggtttaggttgttacctaaatgttcatcctcacactgcccaacccatctgttttccaaatattcattaaattcagacaactacagaaatgtaggatcatttctctctagagagttgtcagtggagtcatcccatcttcttccatactagaatatttgtacctaatattttctgacgacgatcttcttccactggagcattggatcttcaatagcgaggcacatcttctccctatcctccctaaagataaaaaggaagttgaaatcagagaggaataaaaagacattttatattttattctgctccattcccttcactgtataccttaataattccttttctggtaatcaggcacatgatgaactttgattagtaggtctgtgattaagttcttaaattgttttgcagtcttttatgtttattatcataggtataggtggacctaaattccttatcatatcctttattaattcagccagtgtatccaccagttttttgtttatgtttttaagtaacctattatctctggatttcatgaaggtgtaatatcgtttttgttaaactgaatagaattgtatagcgatgacctcttaattataatttgatttgactgcaaaactttttcctcctctaagaggagatgatgtctgctttaagctgtaatgttttgccatgttgcaaaaagccataataataagtataaaaaagctttttcctttacaatttcatgttaatctggtttgtctgtccaccagagacagatcttctgtgacagcctccttatgcaggtctatcattatttgatagaatgtcttctaaaatacttcactcacattgtaattcaaattagaaagtcattccttggttaattatattagtgttttctattttgtaaatgtgtcctttaattttactttaaatgccctgtgtcatttctggattatatactagttaatttcttccattccctactacacagagaggtgagctttcaaattttgcagagctctgctatcactgaattacatttatctgaagaaaatagtacaacttaatggattagcttttgggtttaactgaatatatgaagaaattgggtctgtctaaagagagggtatttcatatggcttttagttcacttgtttgtatttcatcttgatttttttctttggaaaataaagcattctatttggttcagatttctcagatttgaaaaaggctctatctcagatgtagtaaattatttcctttcagtttgtgaaagcaggatttgactctgaaagaagctttgccaattttacttattcgtgatcaatcaaggaaaatctaataaattttaggccaaataagaatatagcatatttagtatggttatagtcaacacagagatcacaacttagaagaaatataaagaaatggccactccccatcccccacagtcctggagtaaatcaaaatcaatatatgattcttttaaacattaagtttgaaataggaatggttttctcaagaatagatttggtgtgataccttgtgtttgcttacattggcccactatatatacatatatatttatgtagatatacttccatgaaagggctaatacgatgcatatactgaagggcaaggactttgaccatgtgaattttcagccgagaatggtcagaaagatcagtacaaccccatggattaggctgaaacatatgaaattgctgcatttgtagtttaaaaactgtcagcagtttcatatggttccacctaatattattgaagacaattattttcttagctatcaataggcttaatagttttagttattttagcttttgaaagtgttttaaaagatttcctttatcggacaggaccatctttatgacctgctttctgtttttcaatatcatacattggtgtatgtcaaagaataaattagtaaaattagtaaatgaaaaagactcttccgtacatcattatttccatgctaatgtgtgtctgtgatccagaataacttctcccactcatatcttcagttcacctaatgaaatgaatggatagcaagagccctttgttcccaggactttaaggcaaaatattaaaaattattgccaaaattaagaatataatgtttgtataaatgtccttgaatttgccatttaaattaactcattttcttttcactttgatttgaaagctgataagtatttctgcagcagatagaatattaaaatcaggttgtgtgtacacactgcactatgaggtaccttggtgtcctggtgtgaatagacaagaagctgtactatatgttgctctctcagtggcaacaatgaagtttttgcaattctagaacttggatttttttttaacaaaagtcccaaaacaccaaaaatgtaaacaagataagagattaatattgtagtgatgtaatttaattaaagttatattttgggttaattttaacaactgaagtcttattgttgaaacttattttcaacaaaactgtgcagttaaatttgtatacgtattcacatactgaaagatgaaccgttaaaatagcacttaattttgtgtttcttcaatatgtcttgatatactttgtgcaattaatattacacatgtaagttgtatggcagtttacagaactcaatgacttgtcatgaggttttcatatgagctacacattgtgtacattgattgttttttatttttacataaatccattctgtcattttcaactttatatataaatctccaatgttatgggaaacaatagattgacacataatttttaaaaattatatttgtaaaatttctctattgtgaataaagtcttttaatatatctcc

SEQ ID NO: 299246 - DNA, 4282 bp, Homo sapiens
ccaacttatttaaaacaaaacaattttgtaggtattattatacccatttcacagatgatgataaatgagaccaatagaagttaaataacttgccaaaggccacacagctggtgagtgatggagaacgaattaaaactcaagtgagcataattctaaaagccatcttctcgttagtgtttctcactatccaggtctgcctttgccttatttaactgaagttaagccatccttacctgtgatcacctagcctctcagtttggggggatcattacagcgggtttttaactcccaatgttctggtccagtttgctttacatgttcttatttatacattgtcaaggatgacctcaggacagtacagcaaggacacagtggcacttcacattttgttcccacgaaatgactggggcataatctcagatcatcttcctttagaatgtggaaacatcagcagaagaatattagtctttatacaagtcaaatccaaaatgacacatgtgaaaactaatagagctgactttcagccatgatagctttggcacacctcacatccctttgttcaacctctcttccctcaacggagagctgcattcctgggaatttctgttgtgcacttttcccacttgccctgctgtcatttaaaggtgaacattctagttttgctaagaaaaccctttccttcatttggaatgaacagcaattttattacttttgaccttaaaatgagtttgctgccttcaaatcttttcagcgccttcatcacgctctgcttcggggcgatcttcttcctgccagactcctccaagctgctcagcggggtcctgttccactccagccccgccttgcagccggccgccgaccacaagcccgggcccggggcgcgcgccgaggacgcggccgaggggcgagcccggcgccgcgaggagggggcacccggggacccggaggccgccctggaggacaacttggccaggatccgcgaaaaccacgagcgggctctcagggaagccaaggagaccctgcagaagctgcccgaggagatccaaagagacatcctactggagaagaagaaggtggcccaggaccagctgcgtgacaaggcgccgttcagaggcctgcccccggtggacttcgtgcccccaatcggggtggagagccgggagcccgccgacgccgccatccgcgagaaaagggcaaagatcaaagagatgatgaaacatgcttggaataattataaaggttatgcctggggattaaatgaactcaaacctatatcaaaaggaggccattcaagcagtttgtttggtaacatcaaaggagcaactatagtagatgccctggatacactttttattatggaaatgaaacatgaatttgaagaagcaaaatcatgggttgaagaaaatttagattttaatgtgaatgctgaaatttctgtctttgaagtaaatatacgctttgttggtggactactctcagcctactatctgtctggagaagagatttttcgaaagaaagcagtggaacttggggtaaaattgctacctgcatttcatactccctctggaataccttgggcattgctgaatatgaaaagtggtattggaaggaactggccctgggcctctggaggcagcagtattctggcagaatttggaaccctgcatttggagtttatgcacttgagccacttatcaggaaaccccatctttgctgaaaaggtaatgaatattcgaacagtactgaacaaactggaaaaaccacaaggcctttatcctaactatctgaatcccagtagtggacagtggggtcaacatcatgtatcagttggaggacttggagacagcttctatgagtatttgctgaaggcctggttaatgtctgacaagacagatctggaagctaagaagatgtattttgatgctgttcaggctatcgagactcatttgatccgcaagtctagcagcggactaacttatatcgcagagtggaaagggggcctcctggagcacaagatgggccacctgacctgcttcgctgggggcatgttcgcactcggggctgatgcagctcccgaaggcatggcccaacactaccttgaactcggggctgaaattgcccgtacttgtcatgaatcatataatcgaacatttatgaaactgggaccagaagctttcagatttgatggtggtgttgaagccatcgctacaagacaaaatgaaaaatactacatcttacggccagaagttatggagacttacatgtatatgtggagactgactcatgatccaaagtacaggaaatgggcctgggaagccgtagaggccttggaaaaccattgcagagtgaatggaggctattcaggcctaagggatgtttaccttcttcatgagagttatgatgatgtgcagcagagtttcttcctggcagagacattgaaatatttgtacctaatattttctgacgacgatcttcttccactggagcattggatcttcaatagcgaggcacatcttctccctatcctccctaaagataaaaaggaagttgaaatcagagaggaataaaaagacattttatattttattctgctccattcccttcactgtataccttaataattccttttctggtaatcaggcacatgatgaactttgattagtaggtctgtgattaagttcttaaattgttttgcagtcttttatgtttattatcataggtataggtggacctaaattccttatcatatcctttattaattcagccagtgtatccaccagttttttgtttatgtttttaagtaacctattatctctggatttcatgaaggtgtaatatcgtttttgttaaactgaatagaattgtatagcgatgacctcttaattataatttgatttgactgcaaaactttttcctcctctaagaggagatgatgtctgctttaagctgtaatgttttgccatgttgcaaaaagccataataataagtataaaaaagctttttcctttacaatttcatgttaatctggtttgtctgtccaccagagacagatcttctgtgacagcctccttatgcaggtctatcattatttgatagaatgtcttctaaaatacttcactcacattgtaattcaaattagaaagtcattccaaaaggatcatgtcatgttgacctcatttcatcggaactgcagtatatttttgttggttaattatattagtgttttctattttgtaaatgtgtcctttaattttactttaaatgccctgtgtcatttctggattatatactagttaatttcttccattccctactacacagagaggtgagctttcaaattttgcagagctctgctatcactgaattacatttatctgaagaaaatagtacaacttaatggattagcttttgggtttaactgaatatatgaagaaattgggtctgtctaaagagagggtatttcatatggcttttagttcacttgtttgtatttcatcttgatttttttctttggaaaataaagcattctatttggttcagatttctcagatttgaaaaaggctctatctcagatgtagtaaattatttcctttcagtttgtgaaagcaggatttgactctgaaagaagctttgccaattttacttattcgtgatcaatcaaggaaaatctaataaattttaggccaaataagaatatagcatatttagtatggttatagtcaacacagagatcacaacttagaagaaatataaagaaatggccactccccatcccccacagtcctggagtaaatcaaaatcaatatatgattcttttaaacattaagtttgaaataggaatggttttctcaagaatagatttggtgtgataccttgtgtttgcttacattggcccactatatatacatatatatttatgtagatatacttccatgaaagggctaatacgatgcatatactgaagggcaaggactttgaccatgtgaattttcagccgagaatggtcagaaagatcagtacaaccccatggattaggctgaaacatatgaaattgctgcatttgtagtttaaaaactgtcagcagtttcatatggttccacctaatattattgaagacaattattttcttagctatcaataggcttaatagttttagttattttagcttttgaaagtgttttaaaagatttcctttatcggacaggaccatctttatgacctgctttctgtttttcaatatcatacattggtgtatgtcaaagaataaattagtaaaattagt

SEQ ID NO: 299247 - DNA, 3324 bp, Homo sapiens
ccaacttatttaaaacaaaacaattttgtaggtattattatacccatttcacagatgatgataaatgagaccaatagaagttaaataacttgccaaaggccacacagctggtgagtgatggagaacgaattaaaactcaagtgagcataattctaaaagccatcttctcgttagtgtttctcactatccaggtctgcctttgccttatttaactgaagttaagccatccttacctgtgatcacctagcctctcagtttggggggatcattacagcgggtttttaactcccaatgttctggtccagtttgctttacatgttcttatttatacattgtcaaggatgacctcaggacagtacagcaaggacacagtggcacttcacattttgttcccacgaaatgactggggcataatctcagatcatcttcctttagaatgtggaaacatcagcagaagaatattagtctttatacaagtcaaatccaaaatgacacatgtgaaaactaatagagctgactttcagccatgatagctttggcacacctcacatccctttgttcaacctctcttccctcaacggagagctgcattcctgggaatttctgttgtgcacttttcccacttgccctgctgtcatttaaaggtgaacattctagttttgctaagaaaaccctttccttcatttggaatgaacagcaattttattacttttgaccttaaaatgagtttgctgccttcaaatcttttcagcgccttcatcacgctctgcttcggggcgatcttcttcctgccagactcctccaagctgctcagcggggtcctgttccactccagccccgccttgcagccggccgccgaccacaagcccgggcccggggcgcgcgccgaggacgcggccgaggggcgagcccggcgccgcgaggagggggcacccggggacccggaggccgccctggaggacaacttggccaggatccgcgaaaaccacgagcgggctctcagggaagccaaggagaccctgcagaagctgcccgaggagatccaaagagacatcctactggagaagaagaaggtggcccaggaccagctgcgtgacaaggcgccgttcagaggcctgcccccggtggacttcgtgcccccaatcggggtggagagccgggagcccgccgacgccgccatccgcgagaaaagggcaaagatcaaagagatgatgaaacatgcttggaataattataaaggttatgcctggggattaaatgaactcaaacctatatcaaaaggaggccattcaagcagtttgtttggtaacatcaaaggagcaactatagtagatgccctggatacactttttattatggaaatgaaacatgaatttgaagaagcaaaatcatgggttgaagaaaatttagattttaatgtgaatgctgaaatttctgtctttgaagtaaatatacgctttgttggtggactactctcagcctactatctgtctggagaagagatttttcgaaagaaagcagtggaacttggggtaaaattgctacctgcatttcatactccctctggaataccttgggcattgctgaatatgaaaagtggtattggaaggaactggccctgggcctctggaggcagcagtattctggcagaatttggaaccctgcatttggagtttatgcacttgagccacttatcaggaaaccccatctttgctgaaaaggtaatgaatattcgaacagtactgaacaaactggaaaaaccacaaggcctttatcctaactatctgaatcccagtagtggacagtggggtcaacatcatgtatcagttggaggacttggagacagcttctatgagtatttgctgaaggcctggttaatgtctgacaagacagatctggaagctaagaagatgtattttgatgctgttcaggctatcgagactcatttgatccgcaagtctagcagcggactaacttatatcgcagagtggaaagggggcctcctggagcacaagatgggccacctgacctgcttcgctgggggcatgttcgcactcggggctgatgcagctcccgaaggcatggcccaacactaccttgaactcggggctgaaattgcccgtacttgtcatgaatcatataatcgaacatttatgaaactgggaccagaagctttcagatttgatggtggtgttgaagccatcgctacaagacaaaatgaaaaatactacatcttacggccagaagttatggagacttacatgtatatgtggagactgactcatgatccaaagtacaggaaatgggcctgggaagccgtagaggccttggaaaaccattgcagagtgaatggaggctattcaggcctaagggatgtttaccttcttcatgagagttatgatgatgtgcagcagagtttcttcctggcagagacattgaaatatttgtacctaatattttctgacgacgatcttcttccactggagcattggatcttcaatagcgaggcacatcttctccctatcctccctaaagataaaaaggaagttgaaatcagagaggaataaaaagacattttatattttattctgctccattcccttcactgtataccttaataattccttttctggtaatcaggcacatgatgaactttgattagtaggtctgtgattaagttcttaaattgttttgcagtcttttatgtttattatcataggtataggtggacctaaattccttatcatatcctttattaattcagccagtgtatccaccagttttttgtttatgtttttaagtaacctattatctctggatttcatgaaggtgtaatatcgtttttgttaaactgaatagaattgtatagcgatgacctcttaattataatttgatttgactgcaaaactttttcctcctctaagaggagatgatgtctgctttaagctgtaatgttttgccatgttgcaaaaagccataataataagtataaaaaagctttttcctttacaatttcatgttaatctggtttgtctgtccaccagagacagatcttctgtgacagcctccttatgcaggtctatcattatttgatagaatgtcttctaaaatacttcactcacattgtaattcaaattagaaagtcattccaaaaggatcatgtcatgttgacctcatttcatcggaactgcagtatatttttgttggttaattatattagtgttttctattttgtaaatgtgtcctttaattttactttaaatgccctgtgtagtagggaatggaagaaattaactagtatataatccagaaatgacacagggc

SEQ ID NO: 299248 - DNA, 1141 bp, Homo sapiens
atacataggtgtatgtcaaagaataaattagtaaaattagtaaatgaaaaagactcttcctaatattattgaagacaattattttcttagctatcaataggcttaatagttttagttattttagcttttgaaagtgttttaaaagatttcctttatcggacaggaccatctttatgacctgctttctgtttttcaatatcatacattggtgtatgtcaaagaataaattagtaaaattagtaaatgaaaaagactcttccgtacatcattatttccatgctaatgtgtgtctgtgatccagaataacttctcccactcatatcttcagttcacctaatgaaatgaatggatagcaagagccctttgttcccaggactttaaggcaaaatattaaaaattattgccaaaattaagaatataatgtttgtataaatgtccttgaatttgccatttaaattaactcattttcttttcactttgatttgaaagctgataagtatttctgcagcagatagaatattaaaatcaggttgtgtgtacacactgcactatgaggtaccttggtgtcctggtgtgaatagacaagaagctgtactatatgttgctctctcagtggcaacaatgaagtttttgcaattctagaacttggatttttttttaacaaaagtcccaaaacaccaaaaatgtaaacaagataagagattaatattgtagtgatgtaatttaattaaagttatattttgggttaattttaacaactgaagtcttattgttgaaacttattttcaacaaaactgtgcagttaaatttgtatacgtattcacatactgaaagatgaaccgttaaaatagcacttaattttgtgtttcttcaatatgtcttgatatactttgtgcaattaatattacacatgtaagttgtatggcagtttacagaactcaatgacttgtcatgaggttttcatatgagctacacattgtgtacattgattgttttttatttttacataaatccattctgtcattttcaactttatatataaatctccaatgttatgggaaacaatagattgacacataatttttaaaaattatatttgtaaaatttctctattgtgaataaagtcttttaatatatctcc

SEQ ID NO: 299249 - DNA, 511 bp, Homo sapiens
ccgaccggccgtgtttttcagggagaaacggcaagcctttgaaactctgaagactgcaacaatgcaatgtatggggagatggaggtttgccccttccaccagatgatgaaacatgcttggaataattataaaggttatgcctggggattaaatgaactcaaacctatatcaaaaggaggccattcaagcagtttgtttggtaacatcaaaggagcaactatagtagatgccctggatacactttttattatggaaatgaaacatgaatttgaagaagcaaaatcatgggttgaagaaaatttagattttaatgtgaatgctgaaatttctgtctttgaagtaaatatacgctttgttggtggactactctcagcctactatctgtctggagaagagatttttcgaaagaaagcagtggaacttggggtaaaattgctacctgcatttcatactccctctggaataccttgggcattgctgaatatgaaaaggtaaaactcttcattttcaa

SEQ ID NO: 299250 - DNA, 336 bp, Homo sapiens
gcctgtggtcccagctacttgggaggctgaggcaggagaatcacctgagcccaagaggtagaagctgcagtgacccatgatggtgccactgtactccgcccaggcaacagagtgaggccctgtctcaaaaaaaaaaaaatgttttatctgaacttgacaatctaataataaaaattagtgacaatcagtttactgaaatgtgacttttttttttttcctcctctataatttaggccttggaaaaccattgcagagtgaatggaggctattcaggcctaagggatgtttaccttcttcatgagagttatgatgatgtgcagcagagtttcttcctgg

SEQ ID NO: 299251 - DNA, 269 bp, Homo sapiens
ttttgccatgttgcaaaaagccataataataagtataaaaaagctttttcctttacaatttcatgttaatctggtttgtctgtccaccagagacagatcttctgtgacagcctccttatgcaggtctatcattatttgatagaatgtcttctaaaatacttcactcacattgtaattcaaattagaaagtcattccaaaaggatcatgtcatgttgacctcatttcatcggaactgcagtatatttttgttggttaattatattagtgt

SEQ ID NO: 299252 - DNA, 855 bp, Homo sapiens
ctgggattactggtgtgagccaccatgcccggccacccacaccttctgacgcatcttctatctgctttccggacaggttcatgacatcttctatcccttcccccaatcagagggagaggacgagctctgctttctccgcgccaatgaatgcaagaccggcttctgccatttgtacaaagtcaccgccgttttaaaatcccagggctacgattggagtgagcccttcagccccggggaaggtgagcagagcctgacgaatgctgtcgactcatcgcgttagtcacgtgtggttcaatatgctgtttgttcattggtcggcccccccactcagccagcacaccctgcgggagaaggaacagggatcggcaggaagccagccttccccagtgactgcatgatctggcagggcttagagcacccaactgttggcttattcaggcagcagatttactgagcacctcccctgtgccaggcccttagcacaaccaggggttggccacctacggcccacaggtcaaatccggcccaccacctgtgttcataaataaagttttattggcactgagccacagccacttgtttacagagactgtctgtggtcgcttttgtgctgcagcagcagaactgggtagtcccagcagaaactgttgtgcaaggccaagatttactgtctagccctttgtagaaacatttgccagctcctgctgtaggtagctgtgatggaattgttcactgtaaataaagaaaaaggaaaatccctgctcttgggaccttctagtggaggaggcagtattccagaaacagttagaggtgctgcctctggtgtgctgtgcgtggcagatgcagatcctagtc

SEQ ID NO: 299253 - DNA, 4302 bp, Homo sapiens
caggccgccgcctgggtcgctcaacttccgggtcaaaggtgcctgagccggcgggtcccctgtgtccgccgcggctgtcgtcccccgctcccgccacttccggggtcgcagtcccgggcatggagccgcgaccgtgaggcgccgctggacccgggacgacctgcccagtccggccgccgccccacgtcccggtctgtgtcccacgcctgcagctggaatggaggctctctggaccctttagaaggcacccctgccctcctgaggtcagctgagcggttaatgcggaaggttaagaaactgcgcctggacaaggagaacaccggaagttggagaagcttctcgctgaattccgagggggctgagaggatggccaccaccgggaccccaacggccgaccgaggcgacgcagccgccacagatgacccggccgcccgcttccaggtgcagaagcactcgtgggacgggctccggagcatcatccacggcagccgcaagtactcgggcctcattgtcaacaaggcgccccacgacttccagtttgtgcagaagacggatgagtctgggccccactcccaccgcctctactacctgggaatgccatatggcagccgagagaactccctcctctactctgagattcccaagaaggtccggaaagaggctctgctgctcctgtcctggaagcagatgctggatcatttccaggccacgccccaccatggggtctactctcgggaggaggagctgctgagggagcggaaacgcctgggggtcttcggcatcacctcctacgacttccacagcgagagtggcctcttcctcttccaggccagcaacagcctcttccactgccgcgacggcggcaagaacggcttcatggtgtcccctatgaaaccgctggaaatcaagacccagtgctcagggccccggatggaccccaaaatctgccctgccgaccctgccttcttctccttcatcaataacagcgacctgtgggtggccaacatcgagacaggcgaggagcggcggctgaccttctgccaccaaggtttatccaatgtcctggatgaccccaagtctgcgggtgtggccaccttcgtcatacaggaagagttcgaccgcttcactgggtactggtggtgccccacagcctcctgggaaggttcagagggcctcaagacgctgcgaatcctgtatgaggaagtcgatgagtccgaggtggaggtcattcacgtcccctctcctgcgctagaagaaaggaagacggactcgtatcggtaccccaggacaggcagcaagaatcccaagattgccttgaaactggctgagttccagactgacagccagggcaagatcgtctcgacccaggagaaggagctggtgcagcccttcagctcgctgttcccgaaggtggagtacatcgccagggccgggtggacccgggatggcaaatacgcctgggccatgttcctggaccggccccagcagtggctccagctcgtcctcctccccccggccctgttcatcccgagcacagagaatgaggagcagcggctagcctctgccagagctgtccccaggaatgtccagccgtatgtggtgtacgaggaggtcaccaacgtctggatcaatgttcatgacatcttctatcccttcccccaatcagagggagaggacgagctctgctttctccgcgccaatgaatgcaagaccggcttctgccatttgtacaaagtcaccgccgttttaaaatcccagggctacgattggagtgagcccttcagccccggggaagatgaatttaagtgccccattaaggaagagattgctctgaccagcggtgaatgggaggttttggcgaggcacggctccaagatctgggtcaatgaggagaccaagctggtgtacttccagggcaccaaggacacgccgctggagcaccacctctacgtggtcagctatgaggcggccggcgagatcgtacgcctcaccacgcccggcttctcccatagctgctccatgagccagaacttcgacatgttcgtcagccactacagcagcgtgagcacgccgccctgcgtgcacgtctacaagctgagcggccccgacgacgaccccctgcacaagcagccccgcttctgggctagcatgatggaggcagccagctgccccccggattatgttcctccagagatcttccatttccacacgcgctcggatgtgcggctctacggcatgatctacaagccccacgccttgcagccagggaagaagcaccccaccgtcctctttgtatatggaggcccccaggtgcagctggtgaataactccttcaaaggcatcaagtacttgcggctcaacacactggcctccctgggctacgccgtggttgtgattgacggcaggggctcctgtcagcgagggcttcggttcgaaggggccctgaaaaaccaaatgggccaggtggagatcgaggaccaggtggagggcctgcagttcgtggccgagaagtatggcttcatcgacctgagccgagttgccatccatggctggtcctacgggggcttcctctcgctcatggggctaatccacaagccccaggtgttcaaggtggccatcgcgggtgccccggtcaccgtctggatggcctacgacacagggtacactgagcgctacatggacgtccctgagaacaaccagcacggctatgaggcgggttccgtggccctgcacgtggagaagctgcccaatgagcccaaccgcttgcttatcctccacggcttcctggacgaaaacgtgcactttttccacacaaacttcctcgtctcccaactgatccgagcagggaaaccttaccagctccagatctaccccaacgagagacacagtattcgctgccccgagtcgggcgagcactatgaagtcacgttgctgcactttctacaggaatacctctgagcctgcccaccgggagccgccacatcacagcacaagtggctgcagcctccgcggggaaccaggcgggagggactgagtggcccgcgggccccagtgaggcactttgtcccgcccagcgctggccagccccgaggagccgctgccttcaccgccccgacgccttttatccttttttaaacgctcttgggttttatgtccgctgcttcttggttgccgagacagagagatggtggtctcgggccagcccctcctctccccgccttctgggaggaggaggtcacacgctgatgggcactggagaggccagaagagactcagaggagcgggctgccttccgcctggggctccctgtgacctctcagtcccctggcccggccagccaccgtccccagcacccaagcatgcaattgcctgtcccccccggccagcctccccaacttgatgtttgtgttttgtttggggggatatttttcataattatttaaaagacaggccgggcgcggtggctcacgtctgtaatcccagcactttgggaggctgaggcgggcggatcacctgaggttgggagttcaagaccagcctggccaacatggggaaaccccgtctctactaaaaatacaaaaaattagccgggtgtggtggcgcgtgcctataatcccagctactcgggaggctgaggcaggagaatcgcttgaacccgggaggtggaggttgcggtgagccaagatcgcaccattgcactccagcctgggcaacaagagcgaaactctgtctcaaaataaataaaaaataaaagacagaaagcaaggggtgcctaaatctagacttggggtccacaccgggcagcggggttgcaacccagcacctggtaggctccatttcttcccaagcccgagcagagggtcatgcgggccccacaggagaagcggccagggcccgcggggggcaccacctgtggacagccctcctgtccccaagctttcaggcaggcactgaaacgcaccgaacttccacgctctgctggtcagtggcggctgtcccctccccagcccagccgcccagccacatgtgtctgcctgacccgtacacaccaggggttccggggttgggagctgaaccatccccacctcagggttatatttccctctccccttccctccccgccaagagctctgccaggggcgggcaaaaaaaaaagtaaaaagaaaagaaaaaaaaaaaaaagaaacaaaccacctctacatattatggaaagaaaatatttttgtcgattcttattcttttataattatgcgtggaagaagtagacacattaaacgattccagttggaaacatgtcacctg

SEQ ID NO: 299254 - DNA, 3813 bp, Homo sapiens
caggccgccgcctgggtcgctcaacttccgggtcaaaggtgcctgagccggcgggtcccctgtgtccgccgcggctgtcgtcccccgctcccgccacttccggggtcgcagtcccgggcatggagccgcgaccgtgaggcgccgctggacccgggacgacctgcccagtccggccgccgccccacgtcccggtctgtgtcccacgcctgcagctggaatggaggctctctggaccctttagaaggcacccctgccctcctgaggtcagctgagcggttaatgcggaaggttaagaaactgcgcctggacaaggagaacaccggaagttggagaagcttctcgctgaattccgagggggctgagaggatggccaccaccgggaccccaacggccgaccgaggcgacgcagccgccacagatgacccggccgcccgcttccaggtgcagaagcactcgtgggacgggctccggagcatcatccacggcagccgcaagtactcgggcctcattgtcaacatcgagacaggcgaggagcggcggctgaccttctgccaccaaggtttatccaatgtcctggatgaccccaagtctgcgggtgtggccaccttcgtcatacaggaagagttcgaccgcttcactgggtactggtggtgccccacagcctcctgggaaggttcagagggcctcaagacgctgcgaatcctgtatgaggaagtcgatgagtccgaggtggaggtcattcacgtcccctctcctgcgctagaagaaaggaagacggactcgtatcggtaccccaggacaggcagcaagaatcccaagattgccttgaaactggctgagttccagactgacagccagggcaagatcgtctcgacccaggagaaggagctggtgcagcccttcagctcgctgttcccgaaggtggagtacatcgccagggccgggtggacccgggatggcaaatacgcctgggccatgttcctggaccggccccagcagtggctccagctcgtcctcctccccccggccctgttcatcccgagcacagagaatgaggagcagcggctagcctctgccagagctgtccccaggaatgtccagccgtatgtggtgtacgaggaggtcaccaacgtctggatcaatgttcatgacatcttctatcccttcccccaatcagagggagaggacgagctctgctttctccgcgccaatgaatgcaagaccggcttctgccatttgtacaaagtcaccgccgttttaaaatcccagggctacgattggagtgagcccttcagccccggggaagatgaatttaagtgccccattaaggaagagattgctctgaccagcggtgaatgggaggttttggcgaggcacggctccaagatctgggtcaatgaggagaccaagctggtgtacttccagggcaccaaggacacgccgctggagcaccacctctacgtggtcagctatgaggcggccggcgagatcgtacgcctcaccacgcccggcttctcccatagctgctccatgagccagaacttcgacatgttcgtcagccactacagcagcgtgagcacgccgccctgcgtgcacgtctacaagctgagcggccccgacgacgaccccctgcacaagcagccccgcttctgggctagcatgatggaggcagccagctgccccccggattatgttcctccagagatcttccatttccacacgcgctcggatgtgcggctctacggcatgatctacaagccccacgccttgcagccagggaagaagcaccccaccgtcctctttgtatatggaggcccccaggtgcagctggtgaataactccttcaaaggcatcaagtacttgcggctcaacacactggcctccctgggctacgccgtggttgtgattgacggcaggggctcctgtcagcgagggcttcggttcgaaggggccctgaaaaaccaaatgggccaggtggagatcgaggaccaggtggagggcctgcagttcgtggccgagaagtatggcttcatcgacctgagccgagttgccatccatggctggtcctacgggggcttcctctcgctcatggggctaatccacaagccccaggtgttcaaggtggccatcgcgggtgccccggtcaccgtctggatggcctacgacacagggtacactgagcgctacatggacgtccctgagaacaaccagcacggctatgaggcgggttccgtggccctgcacgtggagaagctgcccaatgagcccaaccgcttgcttatcctccacggcttcctggacgaaaacgtgcactttttccacacaaacttcctcgtctcccaactgatccgagcagggaaaccttaccagctccagatctaccccaacgagagacacagtattcgctgccccgagtcgggcgagcactatgaagtcacgttgctgcactttctacaggaatacctctgagcctgcccaccgggagccgccacatcacagcacaagtggctgcagcctccgcggggaaccaggcgggagggactgagtggcccgcgggccccagtgaggcactttgtcccgcccagcgctggccagccccgaggagccgctgccttcaccgccccgacgccttttatccttttttaaacgctcttgggttttatgtccgctgcttcttggttgccgagacagagagatggtggtctcgggccagcccctcctctccccgccttctgggaggaggaggtcacacgctgatgggcactggagaggccagaagagactcagaggagcgggctgccttccgcctggggctccctgtgacctctcagtcccctggcccggccagccaccgtccccagcacccaagcatgcaattgcctgtcccccccggccagcctccccaacttgatgtttgtgttttgtttggggggatatttttcataattatttaaaagacaggccgggcgcggtggctcacgtctgtaatcccagcactttgggaggctgaggcgggcggatcacctgaggttgggagttcaagaccagcctggccaacatggggaaaccccgtctctactaaaaatacaaaaaattagccgggtgtggtggcgcgtgcctataatcccagctactcgggaggctgaggcaggagaatcgcttgaacccgggaggtggaggttgcggtgagccaagatcgcaccattgcactccagcctgggcaacaagagcgaaactctgtctcaaaataaataaaaaataaaagacagaaagcaaggggtgcctaaatctagacttggggtccacaccgggcagcggggttgcaacccagcacctggtaggctccatttcttcccaagcccgagcagagggtcatgcgggccccacaggagaagcggccagggcccgcggggggcaccacctgtggacagccctcctgtccccaagctttcaggcaggcactgaaacgcaccgaacttccacgctctgctggtcagtggcggctgtcccctccccagcccagccgcccagccacatgtgtctgcctgacccgtacacaccaggggttccggggttgggagctgaaccatccccacctcagggttatatttccctctccccttccctccccgccaagagctctgccaggggcgggcaaaaaaaaaagtaaaaagaaaagaaaaaaaaaaaaaagaaacaaaccacctctacatattatggaaagaaaatatttttgtcgattcttattcttttataattatgcgtggaagaagtagacacattaaacgattccagttggaaacatgtcacctg

SEQ ID NO: 299255 - DNA, 3480 bp, Homo sapiens
gctcttacccgactttgctcttttggggtctttgctcttttggggtctttgctcatggtgtcccctatgaaaccgctggaaatcaagacccagtgctcagggccccggatggaccccaaaatctgccctgccgaccctgccttcttctccttcatcaataacagcgacctgtgggtggccaacatcgagacaggcgaggagcggcggctgaccttctgccaccaaggtttatccaatgtcctggatgaccccaagtctgcgggtgtggccaccttcgtcatacaggaagagttcgaccgcttcactgggtactggtggtgccccacagcctcctgggaaggttcagagggcctcaagacgctgcgaatcctgtatgaggaagtcgatgagtccgaggtggaggtcattcacgtcccctctcctgcgctagaagaaaggaagacggactcgtatcggtaccccaggacaggcagcaagaatcccaagattgccttgaaactggctgagttccagactgacagccagggcaagatcgtctcgacccaggagaaggagctggtgcagcccttcagctcgctgttcccgaaggtggagtacatcgccagggccgggtggacccgggatggcaaatacgcctgggccatgttcctggaccggccccagcagtggctccagctcgtcctcctccccccggccctgttcatcccgagcacagagaatgaggagcagcggctagcctctgccagagctgtccccaggaatgtccagccgtatgtggtgtacgaggaggtcaccaacgtctggatcaatgttcatgacatcttctatcccttcccccaatcagagggagaggacgagctctgctttctccgcgccaatgaatgcaagaccggcttctgccatttgtacaaagtcaccgccgttttaaaatcccagggctacgattggagtgagcccttcagccccggggaagatgaatttaagtgccccattaaggaagagattgctctgaccagcggtgaatgggaggttttggcgaggcacggctccaagatctgggtcaatgaggagaccaagctggtgtacttccagggcaccaaggacacgccgctggagcaccacctctacgtggtcagctatgaggcggccggcgagatcgtacgcctcaccacgcccggcttctcccatagctgctccatgagccagaacttcgacatgttcgtcagccactacagcagcgtgagcacgccgccctgcgtgcacgtctacaagctgagcggccccgacgacgaccccctgcacaagcagccccgcttctgggctagcatgatggaggcagccagctgccccccggattatgttcctccagagatcttccatttccacacgcgctcggatgtgcggctctacggcatgatctacaagccccacgccttgcagccagggaagaagcaccccaccgtcctctttgtatatggaggcccccaggtgcagctggtgaataactccttcaaaggcatcaagtacttgcggctcaacacactggcctccctgggctacgccgtggttgtgattgacggcaggggctcctgtcagcgagggcttcggttcgaaggggccctgaaaaaccaaatgggccaggtggagatcgaggaccaggtggagggcctgcagttcgtggccgagaagtatggcttcatcgacctgagccgagttgccatccatggctggtcctacgggggcttcctctcgctcatggggctaatccacaagccccaggtgttcaaggtggccatcgcgggtgccccggtcaccgtctggatggcctacgacacagggtacactgagcgctacatggacgtccctgagaacaaccagcacggctatgaggcgggttccgtggccctgcacgtggagaagctgcccaatgagcccaaccgcttgcttatcctccacggcttcctggacgaaaacgtgcactttttccacacaaacttcctcgtctcccaactgatccgagcagggaaaccttaccagctccagatctaccccaacgagagacacagtattcgctgccccgagtcgggcgagcactatgaagtcacgttgctgcactttctacaggaatacctctgagcctgcccaccgggagccgccacatcacagcacaagtggctgcagcctccgcggggaaccaggcgggagggactgagtggcccgcgggccccagtgaggcactttgtcccgcccagcgctggccagccccgaggagccgctgccttcaccgccccgacgccttttatccttttttaaacgctcttgggttttatgtccgctgcttcttggttgccgagacagagagatggtggtctcgggccagcccctcctctccccgccttctgggaggaggaggtcacacgctgatgggcactggagaggccagaagagactcagaggagcgggctgccttccgcctggggctccctgtgacctctcagtcccctggcccggccagccaccgtccccagcacccaagcatgcaattgcctgtcccccccggccagcctccccaacttgatgtttgtgttttgtttggggggatatttttcataattatttaaaagacaggccgggcgcggtggctcacgtctgtaatcccagcactttgggaggctgaggcgggcggatcacctgaggttgggagttcaagaccagcctggccaacatggggaaaccccgtctctactaaaaatacaaaaaattagccgggtgtggtggcgcgtgcctataatcccagctactcgggaggctgaggcaggagaatcgcttgaacccgggaggtggaggttgcggtgagccaagatcgcaccattgcactccagcctgggcaacaagagcgaaactctgtctcaaaataaataaaaaataaaagacagaaagcaaggggtgcctaaatctagacttggggtccacaccgggcagcggggttgcaacccagcacctggtaggctccatttcttcccaagcccgagcagagggtcatgcgggccccacaggagaagcggccagggcccgcggggggcaccacctgtggacagccctcctgtccccaagctttcaggcaggcactgaaacgcaccgaacttccacgctctgctggtcagtggcggctgtcccctccccagcccagccgcccagccacatgtgtctgcctgacccgtacacaccaggggttccggggttgggagctgaaccatccccacctcagggttatatttccctctccccttccctccccgccaagagctctgccaggggcgggcaaaaaaaaaagtaaaaagaaaagaaaaaaaaaaaaaagaaacaaaccacctctacatattatggaaagaaaatatttttgtcgattcttattcttttataattatgcgtggaagaagtagacacattaaacgattccagttggaaacatgtcacctg

SEQ ID NO: 299256 - DNA, 2913 bp, Homo sapiens
gtgacgcgtgggtcgacccacgcgtcgtacatcgccaggtccgggtggacccgggatggcaaatacgcctgggccatgttcctggaccggccccagcagtggctccagctcgtcctcctccccccggccctgttcatcccgagcacagagaatgaggagcagcggctagcctctgccagagctgtccccaggaatgtccagccgtatgtggtgtacgaggaggtcaccaacgtctggatcaatgttcatgacatcttctatcccttcccccaatcagagggagaggacgagctctgctttctccgcgccaatgaatgcaagaccggcttctgccatttgtacaaagtcaccgccgttttaaaatcccagggctacgattggagtgagcccttcagccccggggaagatgaatttaagtgccccattaaggaagagattgctctgaccagcggtgaatgggaggttttggcgaggcacggctccaagatctgggtcaatgaggagaccaagctggtgtacttccagggcaccaaggacacgccgctggagcaccacctctacgtggtcagctatgaggcggccggcgagatcgtacgcctcaccacgcccggcttctcccatagctgctccatgagccagaacttcgacatgttcgtcagccactacagcagcgtgagcacgccgccctgcgtgcacgtctacaagctgagcggccccgacgacgaccccctgcacaagcagccccgcttctgggctagcatgatggaggcagccagctgccccccggattatgttcctccagagatcttccatttccacacgcgctcggatgtgcggctctacggcatgatctacaagccccacgccttgcagccagggaagaagcaccccaccgtcctctttgtatatggaggcccccaggtgcagctggtgaataactccttcaaaggcatcaagtacttgcggctcaacacactggcctccctgggctacgccgtggttgtgattgacggcaggggctcctgtcagcgagggcttcggttcgaaggggccctgaaaaaccaaatgggccaggtggagatcgaggaccaggtggagggcctgcagttcgtggccgagaagtatggcttcatcgacctgagccgagttgccatccatggctggtcctacgggggcttcctctcgctcatggggctaatccacaagccccaggtgttcaaggtggccatcgcgggtgccccggtcaccgtctggatggcctacgacacagggtacactgagcgctacatggacgtccctgagaacaaccagcacggctatgaggcgggttccgtggccctgcacgtggagaagctgcccaatgagcccaaccgcttgcttatcctccacggcttcctggacgaaaacgtgcactttttccacacaaacttcctcgtctcccaactgatccgagcagggaaaccttaccagctccagatctaccccaacgagagacacagtattcgctgccccgagtcgggcgagcactatgaagtcacgttgctgcactttctacaggaatacctctgagcctgcccaccgggagccgccacatcacagcacaagtggctgcagcctccgcggggaaccaggcgggagggactgagtggcccgcgggccccagtgaggcactttgtcccgcccagcgctggccagccccgaggagccgctgccttcaccgccccgacgccttttatccttttttaaacgctcttgggttttatgtccgctgcttcttggttgccgagacagagagatggtggtctcgggccagcccctcctctccccgccttctgggaggaggaggtcacacgctgatgggcactggagaggccagaagagactcagaggagcgggctgccttccgcctggggctccctgtgacctctcagtcccctggcccggccagccaccgtccccagcacccaagcatgcaattgcctgtcccccccggccagcctccccaacttgatgtttgtgttttgtttggggggatatttttcataattatttaaaagacaggccgggcgcggtggctcacgtctgtaatcccagcactttgggaggctgaggcgggcggatcacctgaggttgggagttcaagaccagcctggccaacatggggaaaccccgtctctactaaaaatacaaaaaattagccgggtgtggtggcgcgtgcctataatcccagctactcgggaggctgaggcaggagaatcgcttgaacccgggaggtggaggttgcggtgagccaagatcgcaccattgcactccagcctgggcaacaagagcgaaactctgtctcaaaataaataaaaaataaaagacagaaagcaaggggtgcctaaatctagacttggggtccacaccgggcagcggggttgcaacccagcacctggtaggctccatttcttcccaagcccgagcagagggtcatgcgggccccacaggagaagcggccagggcccgcggggggcaccacctgtggacagccctcctgtccccaagctttcaggcaggcactgaaacgcaccgaacttccacgctctgctggtcagtggcggctgtcccctccccagcccagccgcccagccacatgtgtctgcctgacccgtacacaccaggggttccggggttgggagctgaaccatccccacctcagggttatatttccctctccccttccctccccgccaagagctctgccaggggcgggcaaaaaaaaaagtaaaaagaaaagaaaaaaaaaaaaaagaaacaaaccacctctacatattatggaaagaaaatatttttgtcgattcttattcttttataattatgcgtggaagaagtagacacattaaacgattccagttggaaacatgtcacctg

SEQ ID NO: 299257 - DNA, 2958 bp, Homo sapiens
cagcaatctattccttaatggggcacttaaattcatcttccccggtgctgaaaggggctcactccaatcgtagccctgggatttaaaacggcggtgactttgtacaaatggcagaagccggtcttgcatttcattggcgcggagaaagcagagctcgtcctcctccccccggccctgttcatcccgagcacagagaatgaggagcagcggctagcctctgccagagctgtccccaggaatgtccagccgtatgtggtgtacgaggaggtcaccaacgtctggatcaatgttcatgacatcttctatcccttcccccaatcagagggagaggacgagctctgctttctccgcgccaatgaatgcaagaccggcttctgccatttgtacaaagtcaccgccgttttaaaatcccagggctacgattggagtgagcccttcagccccggggaagatgaatttaagtgccccattaaggaagagattgctctgaccagcggtgaatgggaggttttggcgaggcacggctccaagatctgggtcaatgaggagaccaagctggtgtacttccagggcaccaaggacacgccgctggagcaccacctctacgtggtcagctatgaggcggccggcgagatcgtacgcctcaccacgcccggcttctcccatagctgctccatgagccagaacttcgacatgttcgtcagccactacagcagcgtgagcacgccgccctgcgtgcacgtctacaagctgagcggccccgacgacgaccccctgcacaagcagccccgcttctgggctagcatgatggaggcagccagctgccccccggattatgttcctccagagatcttccatttccacacgcgctcggatgtgcggctctacggcatgatctacaagccccacgccttgcagccagggaagaagcaccccaccgtcctctttgtatatggaggcccccaggtgcagctggtgaataactccttcaaaggcatcaagtacttgcggctcaacacactggcctccctgggctacgccgtggttgtgattgacggcaggggctcctgtcagcgagggcttcggttcgaaggggccctgaaaaaccaaatgggccaggtggagatcgaggaccaggtggagggcctgcagttcgtggccgagaagtatggcttcatcgacctgagccgagttgccatccatggctggtcctacgggggcttcctctcgctcatggggctaatccacaagccccaggtgttcaaggtggccatcgcgggtgccccggtcaccgtctggatggcctacgacacagggtacactgagcgctacatggacgtccctgagaacaaccagcacggctatgaggcgggttccgtggccctgcacgtggagaagctgcccaatgagcccaaccgcttgcttatcctccacggcttcctggacgaaaacgtgcactttttccacacaaacttcctcgtctcccaactgatccgagcagggaaaccttaccagctccagatctaccccaacgagagacacagtattcgctgccccgagtcgggcgagcactatgaagtcacgttgctgcactttctacaggaatacctctgagcctgcccaccgggagccgccacatcacagcacaagtggctgcagcctccgcggggaaccaggcgggagggactgagtggcccgcgggccccagtgaggcactttgtcccgcccagcgctggccagccccgaggagccgctgccttcaccgccccgacgccttttatccttttttaaacgctcttgggttttatgtccgctgcttcttggttgccgagacagagagatggtggtctcgggccagcccctcctctccccgccttctgggaggaggaggtcacacgctgatgggcactggagaggccagaagagactcagaggagcgggctgccttccgcctggggctccctgtgacctctcagtcccctggcccggccagccaccgtccccagcacccaagcatgcaattgcctgtcccccccggccagcctccccaacttgatgtttgtgttttgtttggggggatatttttcataattatttaaaagacaggccgggcgcggtggctcacgtctgtaatcccagcactttgggaggctgaggcgggcggatcacctgaggttgggagttcaagaccagcctggccaacatggggaaaccccgtctctactaaaaatacaaaaaattagccgggtgtggtggcgcgtgcctataatcccagctactcgggaggctgaggcaggagaatcgcttgaacccgggaggtggaggttgcggtgagccaagatcgcaccattgcactccagcctgggcaacaagagcgaaactctgtctcaaaataaataaaaaataaaagacagaaagcaaggggtgcctaaatctagacttggggtccacaccgggcagcggggttgcaacccagcacctggtaggctccatttcttcccaagcccgagcagagggtcatgcgggccccacaggagaagcggccagggcccgcggggggcaccacctgtggacagccctcctgtccccaagctttcaggcaggcactgaaacgcaccgaacttccacgctctgctggtcagtggcggctgtcccctccccagcccagccgcccagccacatgtgtctgcctgacccgtacacaccaggggttccggggttgggagctgaaccatccccacctcagggttatatttccctctccccttccctccccgccaagagctctgccaggggcgggcaaaaaaaaaagtaaaaagaaaagaaaaaaaaaaaaaagaaacaaaccacctctacatattatggaaagaaaatatttttgtcgattcttattcttttataattatgcgtggaagaagtagacacattaaacgattccagttggaaacatgtcacctg

SEQ ID NO: 299258 - DNA, 2746 bp, Homo sapiens
ctgggattactggtgtgagccaccatgcccggccacccacaccttctgacgcatcttctatctgctttccggacaggttcatgacatcttctatcccttcccccaatcagagggagaggacgagctctgctttctccgcgccaatgaatgcaagaccggcttctgccatttgtacaaagtcaccgccgttttaaaatcccagggctacgattggagtgagcccttcagccccggggaagatgaatttaagtgccccattaaggaagagattgctctgaccagcggtgaatgggaggttttggcgaggcacggctccaagatctgggtcaatgaggagaccaagctggtgtacttccagggcaccaaggacacgccgctggagcaccacctctacgtggtcagctatgaggcggccggcgagatcgtacgcctcaccacgcccggcttctcccatagctgctccatgagccagaacttcgacatgttcgtcagccactacagcagcgtgagcacgccgccctgcgtgcacgtctacaagctgagcggccccgacgacgaccccctgcacaagcagccccgcttctgggctagcatgatggaggcagccagctgccccccggattatgttcctccagagatcttccatttccacacgcgctcggatgtgcggctctacggcatgatctacaagccccacgccttgcagccagggaagaagcaccccaccgtcctctttgtatatggaggcccccaggtgcagctggtgaataactccttcaaaggcatcaagtacttgcggctcaacacactggcctccctgggctacgccgtggttgtgattgacggcaggggctcctgtcagcgagggcttcggttcgaaggggccctgaaaaaccaaatgggccaggtggagatcgaggaccaggtggagggcctgcagttcgtggccgagaagtatggcttcatcgacctgagccgagttgccatccatggctggtcctacgggggcttcctctcgctcatggggctaatccacaagccccaggtgttcaaggtggccatcgcgggtgccccggtcaccgtctggatggcctacgacacagggtacactgagcgctacatggacgtccctgagaacaaccagcacggctatgaggcgggttccgtggccctgcacgtggagaagctgcccaatgagcccaaccgcttgcttatcctccacggcttcctggacgaaaacgtgcactttttccacacaaacttcctcgtctcccaactgatccgagcagggaaaccttaccagctccagatctaccccaacgagagacacagtattcgctgccccgagtcgggcgagcactatgaagtcacgttgctgcactttctacaggaatacctctgagcctgcccaccgggagccgccacatcacagcacaagtggctgcagcctccgcggggaaccaggcgggagggactgagtggcccgcgggccccagtgaggcactttgtcccgcccagcgctggccagccccgaggagccgctgccttcaccgccccgacgccttttatccttttttaaacgctcttgggttttatgtccgctgcttcttggttgccgagacagagagatggtggtctcgggccagcccctcctctccccgccttctgggaggaggaggtcacacgctgatgggcactggagaggccagaagagactcagaggagcgggctgccttccgcctggggctccctgtgacctctcagtcccctggcccggccagccaccgtccccagcacccaagcatgcaattgcctgtcccccccggccagcctccccaacttgatgtttgtgttttgtttggggggatatttttcataattatttaaaagacaggccgggcgcggtggctcacgtctgtaatcccagcactttgggaggctgaggcgggcggatcacctgaggttgggagttcaagaccagcctggccaacatggggaaaccccgtctctactaaaaatacaaaaaattagccgggtgtggtggcgcgtgcctataatcccagctactcgggaggctgaggcaggagaatcgcttgaacccgggaggtggaggttgcggtgagccaagatcgcaccattgcactccagcctgggcaacaagagcgaaactctgtctcaaaataaataaaaaataaaagacagaaagcaaggggtgcctaaatctagacttggggtccacaccgggcagcggggttgcaacccagcacctggtaggctccatttcttcccaagcccgagcagagggtcatgcgggccccacaggagaagcggccagggcccgcggggggcaccacctgtggacagccctcctgtccccaagctttcaggcaggcactgaaacgcaccgaacttccacgctctgctggtcagtggcggctgtcccctccccagcccagccgcccagccacatgtgtctgcctgacccgtacacaccaggggttccggggttgggagctgaaccatccccacctcagggttatatttccctctccccttccctccccgccaagagctctgccaggggcgggcaaaaaaaaaagtaaaaagaaaagaaaaaaaaaaaaaagaaacaaaccacctctacatattatggaaagaaaatatttttgtcgattcttattcttttataattatgcgtggaagaagtagacacattaaacgattccagttggaaacatgtcacctg

SEQ ID NO: 299259 - DNA, 4159 bp, Homo sapiens
caggccgccgcctgggtcgctcaacttccgggtcaaaggtgcctgagccggcgggtcccctgtgtccgccgcggctgtcgtcccccgctcccgccacttccggggtcgcagtcccgggcatggagccgcgaccgtgaggcgccgctggacccgggacgacctgcccagtccggccgccgccccacgtcccggtctgtgtcccacgcctgcagctggaatggaggctctctggaccctttagaaggcacccctgccctcctgaggtcagctgagcggttaatgcggaaggttaagaaactgcgcctggacaaggagaacaccggaagttggagaagcttctcgctgaattccgagggggctgagaggatggccaccaccgggaccccaacggccgaccgaggcgacgcagccgccacagatgacccggccgcccgcttccaggtgcagaagcactcgtgggacgggctccggagcatcatccacggcagccgcaagtactcgggcctcattgtcaacaaggcgccccacgacttccagtttgtgcagaagacggatgagtctgggccccactcccaccgcctctactacctgggaatgccatatggcagccgagagaactccctcctctactctgagattcccaagaaggtccggaaagaggctctgctgctcctgtcctggaagcagatgctggatcatttccaggccacgccccaccatggggtctactctcgggaggaggagctgctgagggagcggaaacgcctgggggtcttcggcatcacctcctacgacttccacagcgagagtggcctcttcctcttccaggccagcaacagcctcttccactgccgcgacggcggcaagaacggcttcatggtgtcccctatgaaaccgctggaaatcaagacccagtgctcagggccccggatggaccccaaaatctgccctgccgaccctgccttcttctccttcatcaataacagcgacctgtgggtggccaacatcgagacaggcgaggagcggcggctgaccttctgccaccaaggtttatccaatgtcctggatgaccccaagtctgcgggtgtggccaccttcgtcatacaggaagagttcgaccgcttcactgggtactggtggtgccccacagcctcctgggaaggttcagagggcctcaagacgctgcgaatcctgtatgaggaagtcgatgagtccgaggtggaggtcattcacgtcccctctcctgcgctagaagaaaggaagacggactcgtatcggtaccccaggacaggcagcaagaatcccaagattgccttgaaactggctgagttccagactgacagccagggcaagatcgtctcgacccaggagaaggagctggtgcagcccttcagctcgctgttcccgaaggtggagtacatcgccagggccgggtggacccgggatggcaaatacgcctgggccatgttcctggaccggccccagcagtggctccagctcgtcctcctccccccggccctgttcatcccgagcacagagaatgaggagcagcggctagcctctgccagagctgtccccaggaatgtccagccgtatgtggtgtacgaggaggtcaccaacgtctggatcaatgttcatgacatcttctatcccttcccccaatcagagggagaggacgagctctgctttctccgcgccaatgaatgcaagaccggcttctgccatttgtacaaagtcaccgccgttttaaaatcccagggctacgattggagtgagcccttcagccccggggaagatgaatttaagtgccccattaaggaagagattgctctgaccagcggtgaatgggaggttttggcgaggcacggctccaagatctgggtcaatgaggagaccaagctggtgtacttccagggcaccaaggacacgccgctggagcaccacctctacgtggtcagctatgaggcggccggcgagatcgtacgcctcaccacgcccggcttctcccatagctgctccatgagccagaacttcgacatgttcgtcagccactacagcagcgtgagcacgccgccctgcgtgcacgtctacaagctgagcggccccgacgacgaccccctgcacaagcagccccgcttctgggctagcatgatggaggcagccagctgccccccggattatgttcctccagagatcttccatttccacacgcgctcggatgtgcggctctacggcatgatctacaagccccacgccttgcagccagggaagaagcaccccaccgtcctctttgtatatggaggcccccaggtgcagctggtgaataactccttcaaaggcatcaagtacttgcggctcaacacactggcctccctgggctacgccgtggttgtgattgacggcaggggctcctgtcagcgagggcttcggttcgaaggggccctgaaaaaccaaatgggccaggtggagatcgaggaccaggtggagggcctgcagttcgtggccgagaagtatggcttcatcgacctgagccgagttgccatccatggctggtcctacgggggcttcctctcgctcatggggctaatccacaagccccaggtgttcaaggcccaaccgcttgcttatcctccacggcttcctggacgaaaacgtgcactttttccacacaaacttcctcgtctcccaactgatccgagcagggaaaccttaccagctccagatctaccccaacgagagacacagtattcgctgccccgagtcgggcgagcactatgaagtcacgttgctgcactttctacaggaatacctctgagcctgcccaccgggagccgccacatcacagcacaagtggctgcagcctccgcggggaaccaggcgggagggactgagtggcccgcgggccccagtgaggcactttgtcccgcccagcgctggccagccccgaggagccgctgccttcaccgccccgacgccttttatccttttttaaacgctcttgggttttatgtccgctgcttcttggttgccgagacagagagatggtggtctcgggccagcccctcctctccccgccttctgggaggaggaggtcacacgctgatgggcactggagaggccagaagagactcagaggagcgggctgccttccgcctggggctccctgtgacctctcagtcccctggcccggccagccaccgtccccagcacccaagcatgcaattgcctgtcccccccggccagcctccccaacttgatgtttgtgttttgtttggggggatatttttcataattatttaaaagacaggccgggcgcggtggctcacgtctgtaatcccagcactttgggaggctgaggcgggcggatcacctgaggttgggagttcaagaccagcctggccaacatggggaaaccccgtctctactaaaaatacaaaaaattagccgggtgtggtggcgcgtgcctataatcccagctactcgggaggctgaggcaggagaatcgcttgaacccgggaggtggaggttgcggtgagccaagatcgcaccattgcactccagcctgggcaacaagagcgaaactctgtctcaaaataaataaaaaataaaagacagaaagcaaggggtgcctaaatctagacttggggtccacaccgggcagcggggttgcaacccagcacctggtaggctccatttcttcccaagcccgagcagagggtcatgcgggccccacaggagaagcggccagggcccgcggggggcaccacctgtggacagccctcctgtccccaagctttcaggcaggcactgaaacgcaccgaacttccacgctctgctggtcagtggcggctgtcccctccccagcccagccgcccagccacatgtgtctgcctgacccgtacacaccaggggttccggggttgggagctgaaccatccccacctcagggttatatttccctctccccttccctccccgccaagagctctgccaggggcgggcaaaaaaaaaagtaaaaagaaaagaaaaaaaaaaaaaagaaacaaaccacctctacatattatggaaagaaaatatttttgtcgattcttattcttttataattatgcgtggaagaagtagacacattaaacgattccagttggaaacatgtcacctg

SEQ ID NO: 299260 - DNA, 4427 bp, Homo sapiens
  misc_feature (2810)..(2810): n is a, c, g, or t
  misc_feature (2832)..(2832): n is a, c, g, or t
caggccgccgcctgggtcgctcaacttccgggtcaaaggtgcctgagccggcgggtcccctgtgtccgccgcggctgtcgtcccccgctcccgccacttccggggtcgcagtcccgggcatggagccgcgaccgtgaggcgccgctggacccgggacgacctgcccagtccggccgccgccccacgtcccggtctgtgtcccacgcctgcagctggaatggaggctctctggaccctttagaaggcacccctgccctcctgaggtcagctgagcggttaatgcggaaggttaagaaactgcgcctggacaaggagaacaccggaagttggagaagcttctcgctgaattccgagggggctgagaggatggccaccaccgggaccccaacggccgaccgaggcgacgcagccgccacagatgacccggccgcccgcttccaggtgcagaagcactcgtgggacgggctccggagcatcatccacggcagccgcaagtactcgggcctcattgtcaacaaggcgccccacgacttccagtttgtgcagaagacggatgagtctgggccccactcccaccgcctctactacctgggaatgccatatggcagccgagagaactccctcctctactctgagattcccaagaaggtccggaaagaggctctgctgctcctgtcctggaagcagatgctggatcatttccaggccacgccccaccatggggtctactctcgggaggaggagctgctgagggagcggaaacgcctgggggtcttcggcatcacctcctacgacttccacagcgagagtggcctcttcctcttccaggccagcaacagcctcttccactgccgcgacggcggcaagaacggcttcatggtgtcccctatgaaaccgctggaaatcaagacccagtgctcagggccccggatggaccccaaaatctgccctgccgaccctgccttcttctccttcatcaataacagcgacctgtgggtggccaacatcgagacaggcgaggagcggcggctgaccttctgccaccaaggtttatccaatgtcctggatgaccccaagtctgcgggtgtggccaccttcgtcatacaggaagagttcgaccgcttcactgggtactggtggtgccccacagcctcctgggaaggttcagagggcctcaagacgctgcgaatcctgtatgaggaagtcgatgagtccgaggtggaggtcattcacgtcccctctcctgcgctagaagaaaggaagacggactcgtatcggtaccccaggacaggcagcaagaatcccaagattgccttgaaactggctgagttccagactgacagccagggcaagatcgtctcgacccaggagaaggagctggtgcagcccttcagctcgctgttcccgaaggtggagtacatcgccagggccgggtggacccgggatggcaaatacgcctgggccatgttcctggaccggccccagcagtggctccagctcgtcctcctccccccggccctgttcatcccgagcacagagaatgaggagcagcggctagcctctgccagagctgtccccaggaatgtccagccgtatgtggtgtacgaggaggtcaccaacgtctggatcaatgttcatgacatcttctatcccttcccccaatcagagggagaggacgagctctgctttctccgcgccaatgaatgcaagaccggcttctgccatttgtacaaagtcaccgccgttttaaaatcccagggctacgattggagtgagcccttcagccccggggaagatgaatttaagtgccccattaaggaagagattgctctgaccagcggtgaatgggaggttttggcgaggcacggctccaagatctgggtcaatgaggagaccaagctggtgtacttccagggcaccaaggacacgccgctggagcaccacctctacgtggtcagctatgaggcggccggcgagatcgtacgcctcaccacgcccggcttctcccatagctgctccatgagccagaacttcgacatgttcgtcagccactacagcagcgtgagcacgccgccctgcgtgcacgtctacaagctgagcggccccgacgacgaccccctgcacaagcagccccgcttctgggctagcatgatggaggcagccagctgccccccggattatgttcctccagagatcttccatttccacacgcgctcggatgtgcggctctacggcatgatctacaagccccacgccttgcagccagggaagaagcaccccaccgtcctctttgtatatggaggcccccaggtgcagctggtgaataactccttcaaaggcatcaagtacttgcggctcaacacactggcctccctgggctacgccgtggttgtgattgacggcaggggctcctgtcagcgagggcttcggttcgaaggggccctgaaaaaccaaatgggccaggtggagatcgaggaccaggtggagggcctgcagttcgtggccgagaagtatggcttcatcgacctgagccgagttgccatccatggctggtcctacgggggcttcctctcgctcatggggctaatccacaagccccaggtgttcaaggtggccatcgcgggtgccccggtcaccgtctggatggcctacgacacagggtacactgagcgctacatggacgtccctgagaacaaccagcacggctatgaggcgggttccgtggccctgcacgtggagaagctgcccaatgatgtgagaatggcctgccccaaatgagcccccaaaccccgcctttgcctttaatcccntccccacgtggcgttttccctntgtgttaaccggaaaaaacgttgcaacacttatatttttcgccaagcgaaggccaaaaacaacggttttccccaattacggtgattcctttcccccccaagaaccttggaaaattccccggtaatgcccaggggggaaaaaccttaccaagctcccagatctaccccaacgagagacacagtattcgctgccccgagtcgggcgagcactatgaagtcacgttgctgcactttctacaggaatacctctgagcctgcccaccgggagccgccacatcacagcacaagtggctgcagcctccgcggggaaccaggcgggagggactgagtggcccgcgggccccagtgaggcactttgtcccgcccagcgctggccagccccgaggagccgctgccttcaccgccccgacgccttttatccttttttaaacgctcttgggttttatgtccgctgcttcttggttgccgagacagagagatggtggtctcgggccagcccctcctctccccgccttctgggaggaggaggtcacacgctgatgggcactggagaggccagaagagactcagaggagcgggctgccttccgcctggggctccctgtgacctctcagtcccctggcccggccagccaccgtccccagcacccaagcatgcaattgcctgtcccccccggccagcctccccaacttgatgtttgtgttttgtttggggggatatttttcataattatttaaaagacaggccgggcgcggtggctcacgtctgtaatcccagcactttgggaggctgaggcgggcggatcacctgaggttgggagttcaagaccagcctggccaacatggggaaaccccgtctctactaaaaatacaaaaaattagccgggtgtggtggcgcgtgcctataatcccagctactcgggaggctgaggcaggagaatcgcttgaacccgggaggtggaggttgcggtgagccaagatcgcaccattgcactccagcctgggcaacaagagcgaaactctgtctcaaaataaataaaaaataaaagacagaaagcaaggggtgcctaaatctagacttggggtccacaccgggcagcggggttgcaacccagcacctggtaggctccatttcttcccaagcccgagcagagggtcatgcgggccccacaggagaagcggccagggcccgcggggggcaccacctgtggacagccctcctgtccccaagctttcaggcaggcactgaaacgcaccgaacttccacgctctgctggtcagtggcggctgtcccctccccagcccagccgcccagccacatgtgtctgcctgacccgtacacaccaggggttccggggttgggagctgaaccatccccacctcagggttatatttccctctccccttccctccccgccaagagctctgccaggggcgggcaaaaaaaaaagtaaaaagaaaagaaaaaaaaaaaaaagaaacaaaccacctctacatattatggaaagaaaatatttttgtcgattcttattcttttataattatgcgtggaagaagtagacacattaaacgattccagttggaaacatgtcacctg

SEQ ID NO: 299261 - DNA, 2436 bp, Homo sapiens
tggcgaattcggcacgagggggaggttttggcgaggcacggctccaagggcaccaaggacacgccgctggagcaccacctctacgtggtcagctatgaggcggccggcgagatcgtacgcctcaccacgcccggcttctcccatagctgctccatgagccagaacttcgacatgttcgtcagccactacagcagcgtgagcacgccgccctgcgtgcacgtctacaagctgagcggccccgacgacgaccccctgcacaagcagccccgcttctgggctagcatgatggaggcagccagctgccccccggattatgttcctccagagatcttccatttccacacgcgctcggatgtgcggctctacggcatgatctacaagccccacgccttgcagccagggaagaagcaccccaccgtcctctttgtatatggaggcccccaggtgcagctggtgaataactccttcaaaggcatcaagtacttgcggctcaacacactggcctccctgggctacgccgtggttgtgattgacggcaggggctcctgtcagcgagggcttcggttcgaaggggccctgaaaaaccaaatgggccaggtggagatcgaggaccaggtggagggcctgcagttcgtggccgagaagtatggcttcatcgacctgagccgagttgccatccatggctggtcctacgggggcttcctctcgctcatggggctaatccacaagccccaggtgttcaaggtggccatcgcgggtgccccggtcaccgtctggatggcctacgacacagggtacactgagcgctacatggacgtccctgagaacaaccagcacggctatgaggcgggttccgtggccctgcacgtggagaagctgcccaatgagcccaaccgcttgcttatcctccacggcttcctggacgaaaacgtgcactttttccacacaaacttcctcgtctcccaactgatccgagcagggaaaccttaccagctccagatctaccccaacgagagacacagtattcgctgccccgagtcgggcgagcactatgaagtcacgttgctgcactttctacaggaatacctctgagcctgcccaccgggagccgccacatcacagcacaagtggctgcagcctccgcggggaaccaggcgggagggactgagtggcccgcgggccccagtgaggcactttgtcccgcccagcgctggccagccccgaggagccgctgccttcaccgccccgacgccttttatccttttttaaacgctcttgggttttatgtccgctgcttcttggttgccgagacagagagatggtggtctcgggccagcccctcctctccccgccttctgggaggaggaggtcacacgctgatgggcactggagaggccagaagagactcagaggagcgggctgccttccgcctggggctccctgtgacctctcagtcccctggcccggccagccaccgtccccagcacccaagcatgcaattgcctgtcccccccggccagcctccccaacttgatgtttgtgttttgtttggggggatatttttcataattatttaaaagacaggccgggcgcggtggctcacgtctgtaatcccagcactttgggaggctgaggcgggcggatcacctgaggttgggagttcaagaccagcctggccaacatggggaaaccccgtctctactaaaaatacaaaaaattagccgggtgtggtggcgcgtgcctataatcccagctactcgggaggctgaggcaggagaatcgcttgaacccgggaggtggaggttgcggtgagccaagatcgcaccattgcactccagcctgggcaacaagagcgaaactctgtctcaaaataaataaaaaataaaagacagaaagcaaggggtgcctaaatctagacttggggtccacaccgggcagcggggttgcaacccagcacctggtaggctccatttcttcccaagcccgagcagagggtcatgcgggccccacaggagaagcggccagggcccgcggggggcaccacctgtggacagccctcctgtccccaagctttcaggcaggcactgaaacgcaccgaacttccacgctctgctggtcagtggcggctgtcccctccccagcccagccgcccagccacatgtgtctgcctgacccgtacacaccaggggttccggggttgggagctgaaccatccccacctcagggttatatttccctctccccttccctccccgccaagagctctgccaggggcgggcaaaaaaaaaagtaaaaagaaaagaaaaaaaaaaaaaagaaacaaaccacctctacatattatggaaagaaaatatttttgtcgattcttattcttttataattatgcgtggaagaagtagacacattaaacgattccagttggaaacatgtcacctg

SEQ ID NO: 299262 - DNA, 4219 bp, Homo sapiens
caggccgccgcctgggtcgctcaacttccgggtcaaaggtgcctgagccggcgggtcccctgtgtccgccgcggctgtcgtcccccgctcccgccacttccggggtcgcagtcccgggcatggagccgcgaccgtgaggcgccgctggacccgggacgacctgcccagtccggccgccgccccacgtcccggtctgtgtcccacgcctgcagctggaatggaggctctctggaccctttagaaggcacccctgccctcctgaggtcagctgagcggttaatgcggaaggttaagaaactgcgcctggacaaggagaacaccggaagttggagaagcttctcgctgaattccgagggggctgagaggatggccaccaccgggaccccaacggccgaccgaggcgacgcagccgccacagatgacccggccgcccgcttccaggtgcagaagcactcgtgggacgggctccggagcatcatccacggcagccgcaagtactcgggcctcattgtcaacaaggcgccccacgacttccagtttgtgcagaagacggatgagtctgggccccactcccaccgcctctactacctgggaatgccatatggcagccgagagaactccctcctctactctgagattcccaagaaggtccggaaagaggctctgctgctcctgtcctggaagcagatgctggatcatttccaggccacgccccaccatggggtctactctcgggaggaggagctgctgagggagcggaaacgcctgggggtcttcggcatcacctcctacgacttccacagcgagagtggcctcttcctcttccaggccagcaacagcctcttccactgccgcgacggcggcaagaacggcttcatggtgtcccctatgaaaccgctggaaatcaagacccagtgctcagggccccggatggaccccaaaatctgccctgccgaccctgccttcttctccttcatcaataacagcgacctgtgggtggccaacatcgagacaggcgaggagcggcggctgaccttctgccaccaaggtttatccaatgtcctggatgaccccaagtctgcgggtgtggccaccttcgtcatacaggaagagttcgaccgcttcactgggtactggtggtgccccacagcctcctgggaaggttcagagggcctcaagacgctgcgaatcctgtatgaggaagtcgatgagtccgaggtggaggtcattcacgtcccctctcctgcgctagaagaaaggaagacggactcgtatcggtaccccaggacaggcagcaagaatcccaagattgccttgaaactggctgagttccagactgacagccagggcaagatcgtctcgacccaggagaaggagctggtgcagcccttcagctcgctgttcccgaaggtggagtacatcgccagggccgggtggacccgggatggcaaatacgcctgggccatgttcctggaccggccccagcagtggctccagctcgtcctcctccccccggccctgttcatcccgagcacagagaatgaggagcagcggctagcctctgccagagctgtccccaggaatgtccagccgtatgtggtgtacgaggaggtcaccaacgtctggatcaatgttcatgacatcttctatcccttcccccaatcagagggagaggacgagctctgctttctccgcgccaatgaatgcaagaccggcttctgccatttgtacaaagtcaccgccgttttaaaatcccagggctacgattggagtgagcccttcagccccggggaagatgaatttaagtgccccattaaggaagagattgctctgaccagcggtgaatgggaggttttggcgaggcacggctccaagatctgggtcaatgaggagaccaagctggtgtacttccagggcaccaaggacacgccgctggagcaccacctctacgtggtcagctatgaggcggccggcgagatcgtacgcctcaccacgcccggcttctcccatagctgctccatgagccagaacttcgacatgttcgtcagccactacagcagcgtgagcacgccgccctgcgtgcacgtctacaagctgagcggccccgacgacgaccccctgcacaagcagccccgcttctgggctagcatgatggaggcagccagctgccccccggattatgttcctccagagatcttccatttccacacgcgctcggatgtgcggctctacggcatgatctacaagccccacgccttgcagccagggaagaagcaccccaccgtcctctttgtatatggaggcccccaggtgcagctggtgaataactccttcaaaggcatcaagtacttgcggctcaacacactggcctccctgggctacgccgtggttgtgattgacggcaggggctcctgtcagcgagggcttcggttcgaaggggccctgaaaaaccaaatgggccaggtggagatcgaggaccaggtggagggcctgcagttcgtggccgagaagtatggcttcatcgacctgagccgagttgccatccatggctggtcctacgggggcttcctctcgctcatggggctaatccacaagccccaggtgttcaaggtggccatcgcgggtgccccggtcaccgtctggatggcctacgacacagggtacactgagcgctacatggacgtccctgagaacaaccagcacggctatgaggcgggttccgtggccctgcacgtggagaagctgcccaatgagcccaaccgcttgcttatcctccacggcttcctggacgaaaacgtgcactttttccacacaaacttcctcgtctcccaactgatccgagcagggaaaccttaccagctccagatctaccccaacgagagacacagtattcgctgccccgagtcgggcgagcactatgaagtcacgttgctgcactttctacaggaatacctctgagcctgcccaccgggagccgccacatcacagcacaagtggctgcagcctccgcggggaaccaggcgggagggactgagtggcccgcgggccccagtgaggcactttgtcccgcccagcgctggccagccccgaggagccgctgccttcaccgccccgacgccttttatccttttttaaacgctcttgggttttatgtccgctgcttcttggttgccgagacagagagatggtggtctcgggccagcccctcctctccccgccttctgggaggaggaggtcacacgctgatgggcactggagaggccagaagagactcagaggagcgggctgccttccgcctggggctccctgtgacctctcagtcccctggcccggccagccaccgtccccagcacccaagcatgcaattgcctgtcccccccggccagcctccccaacttgatgtttgtgttttgtttggggggatatttttcataattatttaaaagacaggccgggcgcggtggctcacgtctgtaatcccagcactttgggaggctgaggcgggcggatcacctgaggttgggagttcaagaccagcctggccaacatggggaaaccccgtctctactaaaaatacaaaaaattagccgggtgtggtggcgcgtgcctataatcccagctactcgggaggctgaggcaggagaatcgcttgaacccgggaggtggaggttgcggtgagccaagatcgcaccattgcactccagcctgggcaacaagagcgaaactctgtctcaaaataaataaaaaataaaagacagaaagcaaggggtgcctaaatctagacttggggtccacaccgggcagcggggttgcaacccagcacctggtaggctccatttcttcccaagcccgactttcaggcaggcactgaaacgcaccgaacttccacgctctgctggtcagtggcggctgtcccctccccagcccagccgcccagccacatgtgtctgcctgacccgtacacaccaggggttccggggttgggagctgaaccatccccacctcagggttatatttccctctccccttccctccccgccaagagctctgccaggggcgggcaaaaaaaaaagtaaaaagaaaagaaaaaaaaaaaaaagaaacaaaccacctctacatattatggaaagaaaatatttttgtcgattcttattcttttataattatgcgtggaagaagtagacacattaaacgattccagttggaaacatgtcacctg

SEQ ID NO: 299263 - DNA, 4161 bp, Homo sapiens
caggccgccgcctgggtcgctcaacttccgggtcaaaggtgcctgagccggcgggtcccctgtgtccgccgcggctgtcgtcccccgctcccgccacttccggggtcgcagtcccgggcatggagccgcgaccgtgaggcgccgctggacccgggacgacctgcccagtccggccgccgccccacgtcccggtctgtgtcccacgcctgcagctggaatggaggctctctggaccctttagaaggcacccctgccctcctgaggtcagctgagcggttaatgcggaaggttaagaaactgcgcctggacaaggagaacaccggaagttggagaagcttctcgctgaattccgagggggctgagaggatggccaccaccgggaccccaacggccgaccgaggcgacgcagccgccacagatgacccggccgcccgcttccaggtgcagaagcactcgtgggacgggctccggagcatcatccacggcagccgcaagtactcgggcctcattgtcaacaaggcgccccacgacttccagtttgtgcagaagacggatgagtctgggccccactcccaccgcctctactacctgggaatgccatatggcagccgagagaactccctcctctactctgagattcccaagaaggtccggaaagaggctctgctgctcctgtcctggaagcagatgctggatcatttccaggccacgccccaccatggggtctactctcgggaggaggagctgctgagggagcggaaacgcctgggggtcttcggcatcacctcctacgacttccacagcgagagtggcctcttcctcttccaggccagcaacagcctcttccactgccgcgacggcggcaagaacggcttcatggtgtcccctatgaaaccgctggaaatcaagacccagtgctcagggccccggatggaccccaaaatctgccctgccgaccctgccttcttctccttcatcaataacagcgacctgtgggtggccaacatcgagacaggcgaggagcggcggctgaccttctgccaccaaggtttatccaatgtcctggatgaccccaagtctgcgggtgtggccaccttcgtcatacaggaagagttcgaccgcttcactgggtactggtggtgccccacagcctcctgggaaggttcagagggcctcaagacgctgcgaatcctgtatgaggaagtcgatgagtccgaggtggaggtcattcacgtcccctctcctgcgctagaagaaaggaagacggactcgtatcggtaccccaggacaggcagcaagaatcccaagattgccttgaaactggctgagttccagactgacagccagggcaagatcgtctcgacccaggagaaggagctggtgcagcccttcagctcgctgttcccgaaggtggagtacatcgccagggccgggtggacccgggatggcaaatacgcctgggccatgttcctggaccggccccagcagtggctccagctcgtcctcctccccccggccctgttcatcccgagcacagagaatgaggagcagcggctagcctctgccagagctgtccccaggaatgtccagccgtatgtggtgtacgaggaggtcaccaacgtctggatcaatgttcatgacatcttctatcccttcccccaatcagagggagaggacgagctctgctttctccgcgccaatgaatgcaagaccggcttctgccatttgtacaaagtcaccgccgttttaaaatcccagggctacgattggagtgagcccttcagccccggggaagatgaatttaagtgccccattaaggaagagattgctctgaccagcggtgaatgggaggttttggcgaggcacggctccaagatctgggtcaatgaggagaccaagctggtgtacttccagggcaccaaggacacgccgctggagcaccacctctacgtggtcagctatgaggcggccggcgagatcgtacgcctcaccacgcccggcttctcccatagctgctccatgagccagaacttcgacatgttcgtcagccactacagcagcgtgagcacgccgccctgcgtgcacgtctacaagctgagcggccccgacgacgaccccctgcacaagcagccccgcttctgggctagcatgatggaggcagccagctgccccccggattatgttcctccagagatcttccatttccacacgcgctcggatgtgcggctctacggcatgatctacaagccccacgccttgcagccagggaagaagcaccccaccgtcctctttgtatatggaggcccccaggtgcagctggtgaataactccttcaaaggcatcaagtacttgcggctcaacacactggcctccctgggctacgccgtggttgtgattgacggcaggggctcctgtcagcgagggcttcggttcgaaggggccctgaaaaaccaaatgggccaggtggagatcgaggaccaggtggagggcctgcagttcgtggccgagaagtatggcttcatcgacctgagccgagttgccatccatggctggtcctacgggggcttcctctcgctcatggggctaatccacaagccccaggtgttcaaggtggccatcgcgggtgccccggtcaccgtctggatggcctacgacacagggtacactgagcgctacatggacgtccctgagaacaaccagcacggctatgaggcgggttccgtggccctgcacgtggagaagctgcccaatgagcccaaccgcttgcttatcctccacggcttcctggacgaaaacgtgcactttttccacacaaacttcctcgtctcccaactgatccgagcagggaaaccttaccagctccagatctaccccaacgagagacacagtattcgctgccccgagtcgggcgagcactatgaagtcacgttgctgcactttctacaggaatacctctgagcctgcccaccgggagccgccacatcacagcacaagtggctgcagcctccgcggggaaccaggcgggagggactgagtggcccgcgggccccagtgaggcactttgtcccgcccagcgctggccagccccgaggagccgctgccttcaccgccccgacgccttttatccttttttaaacgctcttgggttttatgtccgctgcttcttggttgccgagacagagagatggtggtctcgggccagcccctcctctccccgccttctgggaggaggaggtcacacgctgatgggcactggagaggccagaagagactcagaggagcgggctgccttccgcctggggctccctgtgacctctcagtcccctggcccggccagccaccgtccccagcacccaagcatgcaattgcctgtcccccccggccagcctccccaacttgatgtttgtgttttgtttggggggatatttttcataattatttaaaagacaggccgggcgcggtggctcacgtctgtaatcccagcactttgggaggctgaggcgggcggatcacctgaggttgggagttcaagaccagcctggccaacatggggaaaccccgtctctactaaaaatacaaaaaattagccgggtgtggtggcgcgtgcctataatcccagctactcgggaggctgaggcaggagaatcgcttgaacccgggaggtggaggttgcggtgagccaagatcgcaccattgcactccagcctgggcaacaagagcgaaactctgtctcaaacaacaaccaaacttctggaatagcattactgtcatgtattgtaaagtacagaagcttcactaaagtcactcattttgacttctacgtagttgttggagcaattacactagagtcaagaaccccagttaaaagtaaactcaatttaaaataacttggaaatatcctcctcttaaccctaccagggtgtctgcaagtaaacctgaaactacagtgcataggtattagaaatgagtatctttctagacgttcaaattgaaaaccaaccttcatgtacaatatactcaaattccagtgaaagagctaatggaagactaggggttttacccgcggggaaccaggcgggagggactgagtggcccgcgggccccagtgaggcactttgtcccgcccagcgctggccagccccgaggagccgctgccttcac

SEQ ID NO: 299264 - DNA, 2411 bp, Homo sapiens
caggccgccgcctgggtcgctcaacttccgggtcaaaggtgcctgagccggcgggtcccctgtgtccgccgcggctgtcgtcccccgctcccgccacttccggggtcgcagtcccgggcatggagccgcgaccgtgaggcgccgctggacccgggacgacctgcccagtccggccgccgccccacgtcccggtctgtgtcccacgcctgcagctggaatggaggctctctggaccctttagaaggcacccctgccctcctgaggtcagctgagcggttaatgcggaaggttaagaaactgcgcctggacaaggagaacaccggaagttggagaagcttctcgctgaattccgagggggctgagaggatggccaccaccgggaccccaacggccgaccgaggcgacgcagccgccacagatgacccggccgcccgcttccaggtgcagaagcactcgtgggacgggctccggagcatcatccacggcagccgcaagtactcgggcctcattgtcaacaaggcgccccacgacttccagtttgtgcagaagacggatgagtctgggccccactcccaccgcctctactacctgggaatgccatatggcagccgagagaactccctcctctactctgagattcccaagaaggtccggaaagaggctctgctgctcctgtcctggaagcagatgctggatcatttccaggccacgccccaccatggggtctactctcgggaggaggagctgctgagggagcggaaacgcctgggggtcttcggcatcacctcctacgacttccacagcgagagtggcctcttcctcttccaggccagcaacagcctcttccactgccgcgacggcggcaagaacggcttcatggtgtcccctatgaaaccgctggaaatcaagacccagtgctcagggccccggatggaccccaaaatctgccctgccgaccctgccttcttctccttcatcaataacagcgacctgtgggtggccaacatcgagacaggcgaggagcggcggctgaccttctgccaccaaggtttatccaatgtcctggatgaccccaagtctgcgggtgtggccaccttcgtcatacaggaagagttcgaccgcttcactgggtactggtggtgccccacagcctcctgggaaggttcagagggcctcaagacgctgcgaatcctgtatgaggaagtcgatgagtccgaggtggaggtcattcacgtcccctctcctgcgctagaagaaaggaagacggactcgtatcggtaccccaggacaggcagcaagaatcccaagattgccttgaaactggctgagttccagactgacagccagggcaagatcgtctcgacccaggagaaggagctggtgcagcccttcagctcgctgttcccgaaggtggagtacatcgccagggccgggtggacccgggatggcaaatacgcctgggccatgttcctggaccggccccagcagtggctccagctcgtcctcctccccccggccctgttcatcccgagcacagagaatgaggagcagcggctagcctctgccagagctgtccccaggaatgtccagccgtatgtggtgtacgaggaggtcaccaacgtctggatcaatgttcatgacatcttctatcccttcccccaatcagagggagaggacgagctctgctttctccgcgccaatgaatgcaagaccggcttctgccatttgtacaaagtcaccgccgttttaaaatcccagggctacgattggagtgagcccttcagccccggggaaggtgagcagagcctgacgaatgctgtcgactcatcgcgttagtcacgtgtggttcaatatgctgtttgttcattggtcggcccccccactcagccagcacaccctgcgggagaaggaacagggatcggcaggaagccagccttccccagtgactgcatgatctggcagggcttagagcacccaactgttggcttattcaggcagcagatttactgagcacctcccctgtgccaggcccttagcacaaccaggggttggccacctacggcccacaggtcaaatccggcccaccacctgtgttcataaataaagttttattggcactgagccacagccacttgtttacagagactgtctgtggtcgcttttgtgctgcagcagcagaactgggtagtcccagcagaaactgttgtgcaaggccaagatttactgtctagccctttgtagaaacatttgccagctcctgctgtaggtagctgtgatggaattgttcactgtaaataaagaaaaaggaaaatccctgctcttgggaccttctagtggaggaggcagtattccagaaacagttagaggtgctgcctctggtgtgctgtgcgtggcagatgcagatcctagtc

SEQ ID NO: 299265 - DNA, 916 bp, Homo sapiens
caggccgccgcctgggtcgctcaacttccgggtcaaaggtgcctgagccggcgggtcccctgtgtccgccgcggctgtcgtcccccgctcccgccacttccggggtcgcagtcccgggcatggagccgcgaccgtgaggcgccgctggacccgggacgacctgcccagtccggccgccgccccacgtcccggtctgtgtcccacgcctgcagctggaatggaggctctctggaccctttagaaggctgaggcaggagaatcgcttgaacccgggaggtggaggttgcggtgagccaagatcgcaccattgcactccagcctgggcaacaagagcgaaactctgtctcaaaataaataaaaaataaaagacagaaagcaaggggtgcctaaatctagacttggggtccacaccgggcagcggggttgcaacccagcacctggtaggctccatttcttcccaagcccgagcagagggtcatgcgggccccacaggagaagcggccagggcccgcggggggcaccacctgtggacagccctcctgtccccaagctttcaggcaggcactgaaacgcaccgaacttccacgctctgctggtcagtggcggctgtcccctccccagcccagccgcccagccacatgtgtctgcctgacccgtacacaccaggggttccggggttgggagctgaaccatccccacctcagggttatatttccctctccccttccctccccgccaagagctctgccaggggcgggcaaaaaaaaaagtaaaaagaaaagaaaaaaaaaaaaaagaaacaaaccacctctacatattatggaaagaaaatatttttgtcgattcttattcttttataattatgcgtggaagaagtagacacattaaacgattccagttggaaacatgtcacctg

SEQ ID NO: 299266 - DNA, 2796 bp, Homo sapiens
caggccgccgcctgggtcgctcaacttccgggtcaaaggtgcctgagccggcgggtcccctgtgtccgccgcggctgtcgtcccccgctcccgccacttccggggtcgcagtcccgggcatggagccgcgaccgtgaggcgccgctggacccgggacgacctgcccagtccggccgccgccccacgtcccggtctgtgtcccacgcctgcagctggaatggaggctctctggaccctttagaaggcacccctgccctcctgaggtcagctgagcggttaatgcggaaggttaagaaactgcgcctggacaaggagaacaccggaagttggagaagcttctcgctgaattccgagggggctgagaggatggccaccaccgggaccccaacggccgaccgaggcgacgcagccgccacagatgacccggccgcccgcttccaggtgcagaagcactcgtgggacgggctccggagcatcatccacggcagccgcaagtactcgggcctcattgtcaacaaggcgccccacgacttccagtttgtgcagaagacggatgagtctgggccccactcccaccgcctctactacctgggaatgccatatggcagccgagagaactccctcctctactctgagattcccaagaaggtccggaaagaggctctgctgctcctgtcctggaagcagatgctggatcatttccaggccacgccccaccatggggtctactctcgggaggaggagctgctgagggagcggaaacgcctgggggtcttcggcatcacctcctacgacttccacagcgagagtggcctcttcctcttccaggccagcaacagcctcttccactgccgcgacggcggcaagaacggcttcatggtgtcccctatgaaaccgctggaaatcaagacccagtgctcagggccccggatggaccccaaaatctgccctgccgaccctgccttcttctccttcatcaataacagcgacctgtgggtggccaacatcgagacaggcgaggagcggcggctgaccttctgccaccaaggtttatccaatgtcctggatgaccccaagtctgcgggtgtggccaccttcgtcatacaggaagagttcgaccgcttcactgggtactggtggtgccccacagcctcctgggaaggttcagagggcctcaagacgctgcgaatcctgtatgaggaagtcgatgagtccgaggtggaggtcattcacgtcccctctcctgcgctagaagaaaggaagacggactcgtatcggtaccccaggacaggcagcaagaatcccaagattgccttgaaactggctgagttccagactgacagccagggcaagatcgtctcgacccaggagaaggagctggtgcagcccttcagctcgctgttcccgaaggtggagtacatcgccagggccgggtggacccgggatggcaaatacgcctgggccatgttcctggaccggccccagcagtggctccagctcgtcctcctccccccggccctgttcatcccgagcacagagaatgaggagcagcggctagcctctgccagagctgtccccaggaatgtccagccgtatgtggtgtacgaggaggtcaccaacgtctggatcaatgttcatgacatcttctatcccttcccccaatcagagggagaggacgagctctgctttctccgcgccaatgaatgcaagaccggcttctgccatttgtacaaagtcaccgccgttttaaaatcccagggctacgattggagtgagcccttcagccccggggaagatgaatttaagtgccccattaaggaagagattgctctgaccagcggtgaatgggaggttttggcgaggcacggctccaagatctgggtcaatgaggagaccaagctggtgtacttccagggcaccaaggacacgccgctggagcaccacctctacgtggtcagctatgaggcggccggcgagatcgtacgcctcaccacgcccggcttctcccatagctgctccatgagccagaacttcgacatgttcgtcagccactacagcagcgtgagcacgccgccctgcgtgcacgtctacaagctgagcggccccgacgacgaccccctgcacaagcagccccgcttctgggctagcatgatggaggcagccagctgccccccggattatgttcctccagagatcttccatttccacacgcgctcggatgtgcggctctacggcatgatctacaagccccacgccttgcagccagggaagaagcaccccaccgtcctctttgtatatggaggcccccaggtgcagctggtgaataactccttcaaaggcatcaagtacttgcggctcaacacactggcctccctgggctacgccgtggttgtgattgacggcaggggctcctgtcagcgagggcttcggttcgaaggggccctgaaaaaccaaatgggccaggtggagatcgaggaccaggtggagggcctgcagttcgtggccgagaagtatggcttcatcgacctgagccgagttgccatccatggctggtcctacgggggcttcctctcgctcatggggctaatccacaagccccaggtgttcaaggtggccatcgcgggtgccccggtcaccgtctggatggcctacgacacagggtacactgagcgctacatggacgtccctgagaacaaccagcacggctatgaggcgggttccgtggccctgcacgtggagaagctgcccaatgaccacgagccacccaaagtccacaccatgccacgcacgaccaga

SEQ ID NO: 299267 - DNA, 1980 bp, Homo sapiens
caggccgccgcctgggtcgctcaacttccgggtcaaaggtgcctgagccggcgggtcccctgtgtccgccgcggctgtcgtcccccgctcccgccacttccggggtcgcagtcccgggcatggagccgcgaccgtgaggcgccgctggacccgggacgacctgcccagtccggccgccgccccacgtcccggtctgtgtcccacgcctgcagctggaatggaggctctctggaccctttagaaggcacccctgccctcctgaggtcagctgagcggttaatgcggaaggttaagaaactgcgcctggacaaggagaacaccggaagttggagaagcttctcgctgaattccgagggggctgagaggatggccaccaccgggaccccaacggccgaccgaggcgacgcagccgccacagatgacccggccgcccgcttccaggtgcagaagcactcgtgggacgggctccggagcatcatccacggcagccgcaagtactcgggcctcattgtcaacaaggcgccccacgacttccagtttgtgcagaagacggatgagtctgggccccactcccaccgcctctactacctgggaatgccatatggcagccgagagaactccctcctctactctgagattcccaagaaggtccggaaagaggctctgctgctcctgtcctggaagcagatgctggatcatttccaggccacgccccaccatggggtctactctcgggaggaggagctgctgagggagcggaaacgcctgggggtcttcggcatcacctcctacgacttccacagcgagagtggcctcttcctcttccaggccagcaacagcctcttccactgccgcgacggcggcaagaacggcttcatggtgtcccctatgaaaccgctggaaatcaagacccagtgctcagggccccggatggaccccaaaatctgccctgccgaccctgccttcttctccttcatcaataacagcgacctgtgggtggccaacatcgagacaggcgaggagcggcggctgaccttctgccaccaaggtttatccaatgtcctggatgaccccaagtctgcgggtgtggccaccttcgtcatacaggaagagttcgaccgcttcactgggtactggtggtgccccacagcctcctgggaaggttcagagggcctcaagacgctgcgaatcctgtatgaggaagtcgatgagtccgaggtggaggtcattcacgtcccctctcctgcgctagaagaaaggaagacggactcgtatcggtaccccaggacaggcagcaagaatcccaagattgccttgaaactggctgagttccagactgacagccagggcaagatcgtctcgacccaggagaaggagctggtgcagcccttcagctcgctgttcccgaaggtggagtacatcgccagggccgggtggacccgggatggcaaatacgcctgggccatgttcctggaccggccccagcagtggctccagctcgtcctcctccccccggccctgttcatcccgagcacagagaatgaggagcagcggctagcctctgccagagctgtccccaggaatgtccagccgtatgtggtgtacgaggaggtcaccaacgtctggatcaatgttcatgacatcttctatcccttcccccaatcagagggagaggacgagctctgctttctccgcgccaatgaatgcaagaccggcttctgccatttgtacaaagtcaccgccgttttaaaatcccagggctacgattggagtgagcccttcagccccggggaagatgaatttaagtgccccattaaggaagagattgctctgaccagcggtgaatgggaggttttggcgaggcacggctccaagatctgcgtcaatgaggagaccagcggggtccttcacggcccaggacacccgttgagccactctagtggtcgtatgaggggcggaaatagcctacaccggttccta

SEQ ID NO: 299268 - DNA, 874 bp, Homo sapiens
ctgtcctggtcagggcgtttggaggagttttctgtggctgccattgtgaaaattattcacacttctggagggcagaaatccaagatcaaggtttcctcagggccacgctccctctggaggctccagaggagaaccagtcctggcctcttgcagcttctggtggcggccagcatcccttggcttgtggccacaacgttggaacttctggcctgatggtcacacagcttcctcctcctcctcttcttctcttctgtctgaaattcccctctgctccagcctgggcaacaagagcgaaactctgtctcaaaataaataaaaaataaaagacagaaagcaaggggtgcctaaatctagacttggggtccacaccgggcagcggggttgcaacccagcacctggtaggctccatttcttcccaagcccgagcagagggtcatgcgggccccacaggagaagcggccagggcccgcggggggcaccacctgtggacagccctcctgtccccaagctttcaggcaggcactgaaacgcaccgaacttccacgctctgctggtcagtggcggctgtcccctccccagcccagccgcccagccacatgtgtctgcctgacccgtacacaccaggggttccggggttgggagctgaaccatccccacctcagggttatatttccctctccccttccctccccgccaagagctctgccaggggcgggcaaaaaaaaaagtaaaaagaaaagaaaaaaaaaaaaaagaaacaaaccacctctacatattatggaaagaaaatatttttgtcgattcttattcttttataattatgcgtggaagaagtagacacattaaacgattccagttggaaacatgtcacctg

SEQ ID NO: 299269 - DNA, 346 bp, Homo sapiens
cccatctctaaaaaaagaaaaatacataaataaacaaatcaatatcccagttcctttttcccttagcgtgaaaactctgcggtacatgtttttcacaggctcccagggttccccagaaggatgaagctttggttacccacagtcacaccctgcttgctaaggagaactttattaacttttctaccctctctcacttccctattgcctttccgagtatctcctggatcacttctcaagtaaactgctagcacccaaatcctcttctcaagaatctgcttctgggaaacctaaaccaggatgctattccccttgcagaaaacattccctgccatgaacagcccaactg

SEQ ID NO: 299270 - DNA, 3941 bp, Homo sapiens
  misc_feature (1788)..(1788): n is a, c, g, or t
  misc_feature (1809)..(1809): n is a, c, g, or t
gtgcattgagcgcgctccagctgccgggacggagggggcggcccccgcgctcggggcgctcggctacagctgcggggcccgaggtctccgcgcactcgctcccggcccatgctggaggcggcggaaccgcggggacctaggacggaggcggcgggcgctgggcggcccccggcacgctgagctcgggatgcggacgctgctgcctcccgcgctgctgacctgctggctgctcgcccccgtgaacagcattcacccagaatgccgatttcatctggaaatacaggaggaagaaacaaaatgtgcagagcttctgaggtctcaaacagaaaaacacaaagcctgcagtggcgtctgggacaacatcacgtgctggcggcctgccaatgtgggagagaccgtcacggtgccctgcccaaaagtcttcagcaatttttacagcaaagcaggaaacataagcaaaaactgtacgagtgacggatggtcagagacgttcccagatttcgtcgatgcctgtggctacagcgacccggaggatgagagcaagatcacgttttatattctggtgaaggccatttataccctgggctacagtgtctctctgatgtctcttgcaacaggaagcataattctgtgcctcttcaggaagctgcactgcaccaggaattacatccacctgaacctgttcctgtccttcatcctgagagccatctcagtgctggtcaaggacgacgttctctactccagctctggcacgttgcactgccctgaccagccatcctcctgggtgggctgcaagctgagcctggtcttcctgcagtactgcatcatggccaacttcttctggctgctggtggaggggctctacctccacaccctcctggtggccatgctcccccctagaaggtgcttcctggcctacctcctgatcggatggggcctccccaccgtctgcatcggtgcatggactgcggccaggctctacttagaagacaccggttgctgggatacaaacgaccacagtgtgccctggtgggtcatacgaataccgattttaatttccatcatcgtcaattttgtccttttcattagtattatacgaattttgctgcagaagttaacatccccagatgtcggcggcaacgaccagtctcagtacaagaggctggccaagtccacgctcctgcttatcccgctgttcggcgtccactacatggtgtttgccgtgtttcccatcagcatctcctccaaataccagatactgtttgagctgtgcctcgggtcgttccagggcctggtggtggccgtcctctactgtttcctgaacagtgaggtgcagtgcgagctgaagcgaaaatggcgaagccggtgcccgaccccgtccgcgagccgggattacagggtctgcggttcctccttctcccgcaacggctcggagggcgccctgcagttccaccgcggctcccgcgcccagtccttcctgcaaacggagacctcggtcatctagccccacccctgcctgtcggacgcggcgggaggcccacggttcggggcttctgcggggctgagacgccggcttcctccttccagatgcccgagcaccgtgtcgggcaggtcagcgcggtcctgactccgtcaagctggttgtccactaaaccccatacctggaattggagtcgtgttgtcattgactcgatttaaactccagcatttagataatcttgtgcaaaatgtgtttcagccgtatagtggatccacttttttttttttttttttttgagacggagtctngctctgtcgcccaggctggantgcagtggcctgatctctgctccctgcaagctccgcctcccgggttcacgccattctcctgcctcagcctcccatagctgggactacaggcgcccgccaacacgcctggctaattttttgtatttttagtagagacagggtttcaccatgttagccaggatggtctcgatctcctgacctcgtgatgggcccgcctcggcctcccaaagtgctgggattaaggcgtgagccactgcgcccggcccaagagaataggggagccaaggaggaaatgtggaaacgcagttgtgtggcccagcacgagcctgggcgaccaccgggtgacatccgtcccacatcagggcggcctcccaggtcccataagggtagccccctcatctgcaggacagagggaagccagtcagggcccccctgacgttaggaccaggagaaatcaacaggagggcagcccgtcctctctcttggggcgcccacccggcccggctgagccctgccccacccaactccacagggctgttttgcctccccacggaaggcgggctgaggagacaaccagatcaggagagcaaggtcatgaaggaggggacctctccacacaggtgttccgtgggaccctcagcagctctggctctgcctcaggaggtcacctgccgccctgtgggagccgcagagcctgacgctcagccccaggccagctgcggccaggcctgcgggcccctggtgatggggttacgtggggtgcgggatacagctgagtgggaaccggaaacctattctctttttaacaaaaataatcttaggataagaattattttaacaacatataaaactgtttcaagccctcctccccagagctggcgctcagcagccctagcggctgctccttcaggcgaagggtggtttgcagatgtggggagggtgtctggggacgttgctgagctggctgcagaagggtggggatatcagggcacagtctccatgtgtgtgccaagccctggcccccacagcgctcgatggacctcagcaagctgcccagccctggcccaggtgccccgactgtgggactcagttgttctgagcacatttgactccacttttcccttaaaaatgaatgtcttgttcctgtgcattggtggcatcacagaccccagctggggcgcgatgtcaaaggtcgggacagctgtgccgggaggcagccacagggaagctcacacatcctgtcagtgtcaccttggtttgcaaaacccatatccccggtaaaatgaggccggacagaggggctgttaggacagcaaagcagcagtgtccagagacccctcaatccccaaaggtccgcaccctgtcctgcacaccctgggccacgccggccacacccctctgctgcaacaagctcatccctggacttctgggagaatgaacccgaggttggtttggggagacaggtgaggcggttggatctacagaacaacccaccatttctgggggccgcagaggatccatcacagacggatactggggagtaaacggcccaggccaggtgcccaggaaaggacggctgagcatgtggagcgagagggaggcaggtggacgctgcagaccccaggttcagtgcggcccctcggctgttcctcccctgtagggtttggacagacccacccccagccttgcccagctttcaaaggacaaaagggagcatcccccacctactctcaggtttttgaggaaacaaagatttgtggtaactgaaggtgttgggtcagtggccaggtgccgacactgagctgtgacccagaggggacgctgaggaagtgggcgtgagtggacatgtcaggtggttaccaggcactggttgttgatggtcggtggttgggtgtgggcagtcatcagtcatcaggtgtgctcaggggacaatctcccctcaaccgcacatgtgccactgttcagcggagctgactggtttctcctggtagaggggccggctgtttcctgacagatgcctggtgagcaggggaagcaggacccagtggtcaacaggtgtctttaactgtcattgtgtgtggaatgtcgcagactcctccacgtggcgggaatgagctgtgtaaatacttcaataaagcctgacttcacatctg

SEQ ID NO: 299271 - DNA, 1665 bp, Homo sapiens
gtgcattgagcgcgctccagctgccgggacggagggggcggcccccgcgctcggggcgctcggctacagctgcggggcccgaggtctccgcgcactcgctcccggcccatgctggaggcggcggaaccgcggggacctaggacggaggcggcgggcgctgggcggcccccggcacgctgagctcgggatgcggacgctgctgcctcccgcgctgctgacctgctggctgctcgcccccgtgaacagcattcacccagaatgccgatttcatctggaaatacaggaggaagaaacaaaatgtgcagagcttctgaggtctcaaacagaaaaacacaaagcctgcagtggcgtctgggacaacatcacgtgctggcggcctgccaatgtgggagagaccgtcacggtgccctgcccaaaagtcttcagcaatttttacagcaaagcaggaaacataagcaaaaactgtacgagtgacggatggtcagagacgttcccagatttcgtcgatgcctgtggctacagcgacccggaggatgagagcaagatcacgttttatattctggtgaaggccatttataccctgggctacagtgtctctctgatgtctcttgcaacaggaagcataattctgtgcctcttcaggaagctgcactgcaccaggaattacatccacctgaacctgttcctgtccttcatcctgagagccatctcagtgctggtcaaggacgacgttctctactccagctctggcacgttgcactgccctgaccagccatcctcctgggtgggctgcaagctgagcctggtcttcctgcagtactgcatcatggccaacttcttctggctgctggtggaggggctctacctccacaccctcctggtggccatgctcccccctagaaggtgcttcctggcctacctcctgatcggatggggcctccccaccgtctgcatcggtgcatggactgcggccaggctctacttagaagacaccggttgctgggatacaaacgaccacagtgtgccctggtgggtcatacgaataccgattttaatttccatcatcgtcaattttgtccttttcattagtattatacgaattttgctgcagaagttaacatccccagatgtcggcggcaacgaccagtctcagtacaagaggctggccaagtccacgctcctgcttatcccgctgttcggcgtccactacatggtgtttgccgtgtttcccatcagcatctcctccaaataccagatactgtttgagctgtgcctcgggtcgttccagggcctggtggtggccgtcctctactgtttcctgaacagtgaggtgcagtgcgagctgaagcgaaaatggcgaagccggtgcccgaccccgtccgcgagccgggattacagggtctgcggttcctccttctcccgcaacggctcggagggcgccctgcagttccaccgcggctcccgcgcccagtccttcctgcaaacggagacctcggtcatctagccccacccctgcctgtcggacgcggcgggaggcccacggttcggggcttctgcggggctgagacgccggcttcctccttccagatgcccgagcaccgtgtcgggcaggtcagcgcggtcctgactccgtcaagctggttgtccactaaaccccatacctgg

SEQ ID NO: 299272 - DNA, 1837 bp, Homo sapiens
gtgcattgagcgcgctccagctgccgggacggagggggcggcccccgcgctcggggcgctcggctacagctgcggggcccgaggtctccgcgcactcgctcccggcccatgctggaggcggcggaaccgcggggacctaggacggaggcggcgggcgctgggcggcccccggcacgctgagctcgggatgcggacgctgctgcctcccgcgctgctgacctgctggctgctcgcccccgtgaacagcattcacccagaatgccgatttcatctggaaatacaggaggaagaaacaaaatgtgcagagcttctgaggtctcaaacagaaaaacacaaagcctgcagtggcgtctgggacaacatcacgtgctggcggcctgccaatgtgggagagaccgtcacggtgccctgcccaaaagtcttcagcaatttttacagcaaagcaggaaacataagcaaaaactgtacgagtgacggatggtcagagacgttcccagatttcgtcgatgcctgtggctacagcgacccggaggatgagagcaagatcacgttttatattctggtgaaggccatttataccctgggctacagtgtctctctgatgtctcttgcaacaggaagcataattctgtgcctcttcaggaagctgcactgcaccaggaattacatccacctgaacctgttcctgtccttcatcctgagagccatctcagtgctggtcaaggacgacgttctctactccagctctggcacgttgcactgccctgaccagccatcctcctgggtgggctgcaagctgagcctggtcttcctgcagtactgcatcatggccaacttcttctggctgctggtggaggggctctacctccacaccctcctggtggccatgctcccccctagaaggtgcttcctggcctacctcctgatcggatggggcctccccaccgtctgcatcggtgcatggactgcggccaggctctacttagaagacaccggttgctgggatacaaacgaccacagtgtgccctggtgggtcatacgaataccgattttaatttccatcatcgtcaattttgtccttttcattagtattatacgaattttgctgcagaagttaacatccccagatgtcggcggcaacgaccagtctcagtacaagaggctggccaagtccacgctcctgcttatcccgctgttcggcgtccactacatggtgtttgccgtgtttcccatcagcatctcctccaaataccagatactgtttgagctgtgcctcgggtcgttccagggcctggtggtggccgtcctctactgtttcctgaacagtgaggtgcagtgcgagctgaagcgaaaatggcgaagccggtgcccgaccccgtccgcgagccgggattacagggtctgcggttcctccttctcccgcaacggctcggagggcgccctgcagttccaccgcggctcccgcgcccagtccttcctgcaaacggagacctcggtcatctagccccacccctgcctgtcggacgcggcgggaggcccacggttcggggcttctgcggggctgagacgccggcttcctccttccagatgcccgagcaccgtgtcgggcaggtcagcgcggtcctgactccgtcaagctggttgtccactaaaccccatacctggaattggagtcgtgttgtcattgactcgatttaaactccagcaccacgaccctgctgctatctcgcacctgaaacaagctaacatgactaacacccttaattccatccaccctcctctccctaggaggcctgcgcccgctaaccggctttttcgcaaatgggccattatcgaa

SEQ ID NO: 299273 - DNA, 633 bp, Homo sapiens
gtgcattgagcgcgctccagctgccgggacggagggggcggcccccgcgctcggggcgctcggctacagctgcggggcccgaggtctccgcgcactcgctcccggcccatgctggaggcggcggaaccgcggggacctaggacggaggcggcgggcgctgggcggcccccggcacgctgagctcgggatgcggacgctgctgcctcccgcgctgctgacctgctggctgctcgcccccgtgaacagcattcacccagaatgccgatttcatctggaaatacaggaggaagaaacaaaatgtgcagagcttctgaggtctcaaacagaaaaacacaaaggccatacaaagggattcatcctcattcacgccggaggtttaaagaggatcctggacccacatacctacccattggctccatgaccagtgcttttataattacaaaatcattgagaaattaagtcacaggaagcctcgtgtgtggtatacactggtgataaagcaagtcccatgcagtctgagatggcaagggaccttctagggaaagggcagtgacccagaagcccgactgctcggctggctcccgcactccgtcctgtggtcagagtgtgtttcctcccctctgtgaacctggt

SEQ ID NO: 299274 - DNA, 4725 bp, Homo sapiens
  misc_feature (1788)..(1788): n is a, c, g, or t
  misc_feature (1809)..(1809): n is a, c, g, or t
gtgcattgagcgcgctccagctgccgggacggagggggcggcccccgcgctcggggcgctcggctacagctgcggggcccgaggtctccgcgcactcgctcccggcccatgctggaggcggcggaaccgcggggacctaggacggaggcggcgggcgctgggcggcccccggcacgctgagctcgggatgcggacgctgctgcctcccgcgctgctgacctgctggctgctcgcccccgtgaacagcattcacccagaatgccgatttcatctggaaatacaggaggaagaaacaaaatgtgcagagcttctgaggtctcaaacagaaaaacacaaagcctgcagtggcgtctgggacaacatcacgtgctggcggcctgccaatgtgggagagaccgtcacggtgccctgcccaaaagtcttcagcaatttttacagcaaagcaggaaacataagcaaaaactgtacgagtgacggatggtcagagacgttcccagatttcgtcgatgcctgtggctacagcgacccggaggatgagagcaagatcacgttttatattctggtgaaggccatttataccctgggctacagtgtctctctgatgtctcttgcaacaggaagcataattctgtgcctcttcaggaagctgcactgcaccaggaattacatccacctgaacctgttcctgtccttcatcctgagagccatctcagtgctggtcaaggacgacgttctctactccagctctggcacgttgcactgccctgaccagccatcctcctgggtgggctgcaagctgagcctggtcttcctgcagtactgcatcatggccaacttcttctggctgctggtggaggggctctacctccacaccctcctggtggccatgctcccccctagaaggtgcttcctggcctacctcctgatcggatggggcctccccaccgtctgcatcggtgcatggactgcggccaggctctacttagaagacaccggttgctgggatacaaacgaccacagtgtgccctggtgggtcatacgaataccgattttaatttccatcatcgtcaattttgtccttttcattagtattatacgaattttgctgcagaagttaacatccccagatgtcggcggcaacgaccagtctcagtacaagaggctggccaagtccacgctcctgcttatcccgctgttcggcgtccactacatggtgtttgccgtgtttcccatcagcatctcctccaaataccagatactgtttgagctgtgcctcgggtcgttccagggcctggtggtggccgtcctctactgtttcctgaacagtgaggtgcagtgcgagctgaagcgaaaatggcgaagccggtgcccgaccccgtccgcgagccgggattacagggtctgcggttcctccttctcccgcaacggctcggagggcgccctgcagttccaccgcggctcccgcgcccagtccttcctgcaaacggagacctcggtcatctagccccacccctgcctgtcggacgcggcgggaggcccacggttcggggcttctgcggggctgagacgccggcttcctccttccagatgcccgagcaccgtgtcgggcaggtcagcgcggtcctgactccgtcaagctggttgtccactaaaccccatacctggaattggagtcgtgttgtcattgactcgatttaaactccagcatttagataatcttgtgcaaaatgtgtttcagccgtatagtggatccacttttttttttttttttttttgagacggagtctngctctgtcgcccaggctggantgcagtggcctgatctctgctccctgcaagctccgcctcccgggttcacgccattctcctgcctcagcctcccatagctgggactacaggcgcccgccaacacgcctggctaattttttgtatttttagtagagacagggtttcaccatgttagccaggatggtctcgatctcctgacctcgtgatgggcccgcctcggcctcccaaagtgctgggattaaggcgtgagccactgcgcccggcccaagagaataggggagccaaggaggaaatgtggaaacgcagttgtgtggcccagcacgagcctgggcgaccaccgggtgacatccgtcccacatcagggcggcctcccaggtcccataagggtagccccctcatctgcaggacagagggaagccagtcagggcccccctgacgttaggaccaggagaaatcaacaggagggcagcccgtcctctctcttggggcgcccacccggcccggctgagccctgccccacccaactccacagggctgttttgcctccccacggaaggcgggctgaggagacaaccagatcaggagagcaaggtcatgaaggaggggacctctccacacaggtgttccgtgggaccctcagcagctctggctctgcctcaggaggtcacctgccgccctgtgggagccgcagagcctgacgctcagccccaggccagctgcggccaggcctgcgggcccctggtgatggggttacgtggggtgcgggatacagctgagtgggaaccggaaacctattctctttttaacaaaaataatcttaggataagaattattttaacaacatataaaactgtttcaagccctcctccccagagctggcgctcagcagccctagcggctgctccttcaggcgaagggtggtttgcagatgtggggagggtgtctggggacgttgctgagctggctgcagaagggtggggatatcagggcacagtctccatgtgtgtgccaagccctggcccccacagcgctcgatggacctcagcaagctgcccagccctggcccaggtgccccgactgtgggactcagttgttctgagcacatttgactccacttttcccttaaaaatgaatgtcttgttcctgtgcattggtggcatcacagaccccagctggggcgcgatgtcaaaggtcgggacagctgtgccgggaggcagccacagggaagctcacacatcctgtcagtgtcaccttggtttgcaaaacccatatccccggtaaaatgaggccggacagaggggctgttaggacagcaaagcagcagtgtccagagacccctcaatccccaaaggtccgcaccctgtcctgcacaccctgggccacgccggccacacccctctgctgcaacaagctcatccctggacttctgggagaatgaacccgaggttggtttggggagacaggtgaggcggttggatctacagaacaacccaccatttctgggggccgcagaggatccatcacagacggatactggggagtaaacggcccaggccaggtgcccaggaaaggacggctgagcatgtggagcgagagggaggcaggtggacgctgcagaccccaggttcagtgcggcccctcggctgttcctcccctgtagggtttggacagacccacccccagccttgcccagctttcaaaggacaaaagggagcatcccccacctactctcaggtttttgaggaaacaaagatttgtggtaactgaaggtgttgggtcagtggccaggtgccgacactgagctgtgacccagaggggacgctgaggaagtgggcgtgagtggacatgtcaggtggttaccaggcactggttgttgatggtcggtggttgggtgtgggcagtcatcagtcatcaggtgtgctcaggggacaatctcccctcaaccgcacatgtgccactgttcagcggagctgactggtttctcctggtagaggggccggctgtttcctgacagatgcctggtgagcaggggaagcaggacccagtggtcaacaggtgtctttaactgtcattgtgtgtggaatgtcgcagactcctccacgtggcgggaatgagctgtgtaaatacttcaataaagcctgacttcacatctgcatgctgagtaagaacttgctctgaccagatctgaggctctggagcatggaggacacacttggcgtgttagtcgtggctgctgcattcagatgaaaacagagcttggacggggagggagagggtgggcagggtcctgccagccacagggcaccagggaggacattggaaacagccacctctccctgaggagagtcacggacccctgtcagagcgtcgccattggggagcctccgtctggcagctgtgacgcatgagcagtgccctgtggaggaggcgcctgcacgcccagccttgtcctgccgcacccaacacggcctctgtcagctctgcagagcccaagaacctgttaatagagcaggactgagtgcaggagtgtgtgtgtgcacgcgcgttcatgtgatgcacacgcgtgtgtgggtgtgtgcgtgggggtgtgcacacatatgcgaatctccgtgtgtgctgagccttagccacatgtatgctacaagcaaataaaatgcatttccaatgaactccacgctccaccagatggctgtgttgtcaggagggatacagcacgctggtaaaagccacattcctaaggagtcaaacctagaatgagccacaccaaccagcctttggtgactttcctaagagcaaagcaggtgggaagggggagaaggggctgggcacacagccctccagggagtcactgttttgtctgactcaggagcttagtgtccatttgcctgaggtgggaaatattcagccgcctgaggagactcagccctgatgggaggc

SEQ ID NO: 299275 - DNA, 4370 bp, Homo sapiens
  misc_feature (1788)..(1788): n is a, c, g, or t
  misc_feature (1809)..(1809): n is a, c, g, or t
gtgcattgagcgcgctccagctgccgggacggagggggcggcccccgcgctcggggcgctcggctacagctgcggggcccgaggtctccgcgcactcgctcccggcccatgctggaggcggcggaaccgcggggacctaggacggaggcggcgggcgctgggcggcccccggcacgctgagctcgggatgcggacgctgctgcctcccgcgctgctgacctgctggctgctcgcccccgtgaacagcattcacccagaatgccgatttcatctggaaatacaggaggaagaaacaaaatgtgcagagcttctgaggtctcaaacagaaaaacacaaagcctgcagtggcgtctgggacaacatcacgtgctggcggcctgccaatgtgggagagaccgtcacggtgccctgcccaaaagtcttcagcaatttttacagcaaagcaggaaacataagcaaaaactgtacgagtgacggatggtcagagacgttcccagatttcgtcgatgcctgtggctacagcgacccggaggatgagagcaagatcacgttttatattctggtgaaggccatttataccctgggctacagtgtctctctgatgtctcttgcaacaggaagcataattctgtgcctcttcaggaagctgcactgcaccaggaattacatccacctgaacctgttcctgtccttcatcctgagagccatctcagtgctggtcaaggacgacgttctctactccagctctggcacgttgcactgccctgaccagccatcctcctgggtgggctgcaagctgagcctggtcttcctgcagtactgcatcatggccaacttcttctggctgctggtggaggggctctacctccacaccctcctggtggccatgctcccccctagaaggtgcttcctggcctacctcctgatcggatggggcctccccaccgtctgcatcggtgcatggactgcggccaggctctacttagaagacaccggttgctgggatacaaacgaccacagtgtgccctggtgggtcatacgaataccgattttaatttccatcatcgtcaattttgtccttttcattagtattatacgaattttgctgcagaagttaacatccccagatgtcggcggcaacgaccagtctcagtacaagaggctggccaagtccacgctcctgcttatcccgctgttcggcgtccactacatggtgtttgccgtgtttcccatcagcatctcctccaaataccagatactgtttgagctgtgcctcgggtcgttccagggcctggtggtggccgtcctctactgtttcctgaacagtgaggtgcagtgcgagctgaagcgaaaatggcgaagccggtgcccgaccccgtccgcgagccgggattacagggtctgcggttcctccttctcccgcaacggctcggagggcgccctgcagttccaccgcggctcccgcgcccagtccttcctgcaaacggagacctcggtcatctagccccacccctgcctgtcggacgcggcgggaggcccacggttcggggcttctgcggggctgagacgccggcttcctccttccagatgcccgagcaccgtgtcgggcaggtcagcgcggtcctgactccgtcaagctggttgtccactaaaccccatacctggaattggagtcgtgttgtcattgactcgatttaaactccagcatttagataatcttgtgcaaaatgtgtttcagccgtatagtggatccacttttttttttttttttttttgagacggagtctngctctgtcgcccaggctggantgcagtggcctgatctctgctccctgcaagctccgcctcccgggttcacgccattctcctgcctcagcctcccatagctgggactacaggcgcccgccaacacgcctggctaattttttgtatttttagtagagacagggtttcaccatgttagccaggatggtctcgatctcctgacctcgtgatgggcccgcctcggcctcccaaagtgctgggattaaggcgtgagccactgcgcccggcccaagagaataggggagccaaggaggaaatgtggaaacgcagttgtgtggcccagcacgagcctgggcgaccaccgggtgacatccgtcccacatcagggcggcctcccaggtcccataagggtagccccctcatctgcaggacagagggaagccagtcagggcccccctgacgttaggaccaggagaaatcaacaggagggcagcccgtcctctctcttggggcgcccacccggcccggctgagccctgccccacccaactccacagggctgttttgcctccccacggaaggcgggctgaggagacaaccagatcaggagagcaaggtcatgaaggaggggacctctccacacaggtgttccgtgggaccctcagcagctctggctctgcctcaggaggtcacctgccgccctgtgggagccgcagagcctgacgctcagccccaggccagctgcggccaggcctgcgggcccctggtgatggggttacgtggggtgcgggatacagctgagtgggaaccggaaacctattctctttttaacaaaaataatcttaggataagaattattttaacaacatataaaactgtttcaagccctcctccccagagctggcgctcagcagccctagcggctgctccttcaggcgaagggtggtttgcagatgtggggagggtgtctggggacgttgctgagctggctgcagaagggtggggatatcagggcacagtctccatgtgtgtgccaagccctggcccccacagcgctcgatggacctcagcaagctgcccagccctggcccaggtgccccgactgtgggactcagttgttctgagcacatttgactccacttttcccttaaaaatgaatgtcttgttcctgtgcattggtggcatcacagaccccagctggggcgcgatgtcaaaggtcgggacagctgtgccgggaggcagccacagggaagctcacacatcctgtcagtgtcaccttggtttgcaaaacccatatccccggtaaaatgaggccggacagaggggctgttaggacagcaaagcagcagtgtccagagacccctcaatccccaaaggtccgcaccctgtcctgcacaccctgggccacgccggccacacccctctgctgcaacaagctcatccctggacttctgggagaatgaacccgaggttggtttggggagacaggtgaggcggttggatctacagaacaacccaccatttctgggggccgcagaggatccatcacagacggatactggggagtaaacggcccaggccaggtgcccaggaaaggacggctgagcatgtggagcgagagggaggcaggtggacgctgcagaccccaggttcagtgcggcccctcggctgttcctcccctgtagggtttggacagacccacccccagccttgcccagctttcaaaggacaaaagggagcatcccccacctactctcaggtttttgaggaaacaaagatttgtggtaactgaaggtgttgggtcagtggccaggtgccgacactgagctgtgacccagaggggacgctgaggaagtgggcgtgagtggacatgtcaggtggttaccaggcactggttgttgatggtcggtggttgggtgtgggcagtcatcagtcatcaggtgtgctcaggggacaatctcccctcaaccgcacatgtgccactgttcagcggagctgactggtttctcctggtagaggggccggctgtttcctgacagatgcctggtgagcaggggaagcaggacccagtggtcaacaggtgtctttaactgtcattgtgtgtggaatgtcgcagactcctccacgtggcgggaatgagctgtgtaaatacttcaataaagcctgacttcacatctgcatgctgagtaagaacttgctctgaccagatctgaggctctggagcatggaggacacacttggcgtgttagtcgtggctgctgcattcagatgaaaacagagcttggacggggagggagagggtgggcagggtcctgccagccacagggcaccagggaggacattggaaacagccacctctccctgaggagagtcacggacccctgtcagagcgtcgccattggggagcctccgtctggcagctgtgacgcatgagcagtgccctgtggaggaggcgcctgcacgcccagccttgtcctgccgcacccaacacggcctctgtcagctctgcagagcccaagaacctgttaatagagcaggactgagtgcaggagtgtggagttcattggaaatgcattttatttgcttgtagcatacatgtggctaagg

SEQ ID NO: 299276 - DNA, 4395 bp, Homo sapiens
  misc_feature (1458)..(1458): n is a, c, g, or t
  misc_feature (1479)..(1479): n is a, c, g, or t
cccgaataagatcgttcttggttgcctttcaggttgaacttggatttcctgtgaatcttgtttagtttctatgctgacctttgcattggttctttgggagtgtttgttaaattgaacttggagatggatgcttttatttggaaacaaaatctgttccctttccaggacaacagaaaaggccgagacacccttgaggccacacgaggtcctttctgtgtaactctggtcacagaagtagcaaaacctccctggataggggccaagagctcagccgcagataggcctcttttccagcaaacttcagatgcgttaatagagggaatcaggcaggtcctctgccgctgactgagggacctggctcccacggagcccagctgttacgagctgcaggtccgggagcaggatcggttctcatcatttaaacctgcgtgtggcagcggtggaggccagccttcttgtcccatgcctgcctcaggatgggccgggctcccaggcggggcctgtgtaggtttggggtcactcacagggaatcttgcccctgccagccatgaaccccaggacacagcgtgtgtccttgtgagggaatttgggagaaacggacacttccggaatgcacgttcccaggccctgagtgctagatatgcacaggggcctcagacataaacgtaaagaaacagtggtttttcttgttgggcggggactccagcagtggagaggaggtgtggagcccctcccacacccagctgccccctcctgagaaggacccagccaggcttgcagagggtccgagggtccagcagctgagctggctcatctccttctgtgcaggaggctggccaagtccacgctcctgcttatcccgctgttcggcgtccactacatggtgtttgccgtgtttcccatcagcatctcctccaaataccagatactgtttgagctgtgcctcgggtcgttccagggcctggtggtggccgtcctctactgtttcctgaacagtgaggtgcagtgcgagctgaagcgaaaatggcgaagccggtgcccgaccccgtccgcgagccgggattacagggtctgcggttcctccttctcccgcaacggctcggagggcgccctgcagttccaccgcggctcccgcgcccagtccttcctgcaaacggagacctcggtcatctagccccacccctgcctgtcggacgcggcgggaggcccacggttcggggcttctgcggggctgagacgccggcttcctccttccagatgcccgagcaccgtgtcgggcaggtcagcgcggtcctgactccgtcaagctggttgtccactaaaccccatacctggaattggagtcgtgttgtcattgactcgatttaaactccagcatttagataatcttgtgcaaaatgtgtttcagccgtatagtggatccacttttttttttttttttttttgagacggagtctngctctgtcgcccaggctggantgcagtggcctgatctctgctccctgcaagctccgcctcccgggttcacgccattctcctgcctcagcctcccatagctgggactacaggcgcccgccaacacgcctggctaattttttgtatttttagtagagacagggtttcaccatgttagccaggatggtctcgatctcctgacctcgtgatgggcccgcctcggcctcccaaagtgctgggattaaggcgtgagccactgcgcccggcccaagagaataggggagccaaggaggaaatgtggaaacgcagttgtgtggcccagcacgagcctgggcgaccaccgggtgacatccgtcccacatcagggcggcctcccaggtcccataagggtagccccctcatctgcaggacagagggaagccagtcagggcccccctgacgttaggaccaggagaaatcaacaggagggcagcccgtcctctctcttggggcgcccacccggcccggctgagccctgccccacccaactccacagggctgttttgcctccccacggaaggcgggctgaggagacaaccagatcaggagagcaaggtcatgaaggaggggacctctccacacaggtgttccgtgggaccctcagcagctctggctctgcctcaggaggtcacctgccgccctgtgggagccgcagagcctgacgctcagccccaggccagctgcggccaggcctgcgggcccctggtgatggggttacgtggggtgcgggatacagctgagtgggaaccggaaacctattctctttttaacaaaaataatcttaggataagaattattttaacaacatataaaactgtttcaagccctcctccccagagctggcgctcagcagccctagcggctgctccttcaggcgaagggtggtttgcagatgtggggagggtgtctggggacgttgctgagctggctgcagaagggtggggatatcagggcacagtctccatgtgtgtgccaagccctggcccccacagcgctcgatggacctcagcaagctgcccagccctggcccaggtgccccgactgtgggactcagttgttctgagcacatttgactccacttttcccttaaaaatgaatgtcttgttcctgtgcattggtggcatcacagaccccagctggggcgcgatgtcaaaggtcgggacagctgtgccgggaggcagccacagggaagctcacacatcctgtcagtgtcaccttggtttgcaaaacccatatccccggtaaaatgaggccggacagaggggctgttaggacagcaaagcagcagtgtccagagacccctcaatccccaaaggtccgcaccctgtcctgcacaccctgggccacgccggccacacccctctgctgcaacaagctcatccctggacttctgggagaatgaacccgaggttggtttggggagacaggtgaggcggttggatctacagaacaacccaccatttctgggggccgcagaggatccatcacagacggatactggggagtaaacggcccaggccaggtgcccaggaaaggacggctgagcatgtggagcgagagggaggcaggtggacgctgcagaccccaggttcagtgcggcccctcggctgttcctcccctgtagggtttggacagacccacccccagccttgcccagctttcaaaggacaaaagggagcatcccccacctactctcaggtttttgaggaaacaaagatttgtggtaactgaaggtgttgggtcagtggccaggtgccgacactgagctgtgacccagaggggacgctgaggaagtgggcgtgagtggacatgtcaggtggttaccaggcactggttgttgatggtcggtggttgggtgtgggcagtcatcagtcatcaggtgtgctcaggggacaatctcccctcaaccgcacatgtgccactgttcagcggagctgactggtttctcctggtagaggggccggctgtttcctgacagatgcctggtgagcaggggaagcaggacccagtggtcaacaggtgtctttaactgtcattgtgtgtggaatgtcgcagactcctccacgtggcgggaatgagctgtgtaaatacttcaataaagcctgacttcacatctgcatgctgagtaagaacttgctctgaccagatctgaggctctggagcatggaggacacacttggcgtgttagtcgtggctgctgcattcagatgaaaacagagcttggacggggagggagagggtgggcagggtcctgccagccacagggcaccagggaggacattggaaacagccacctctccctgaggagagtcacggacccctgtcagagcgtcgccattggggagcctccgtctggcagctgtgacgcatgagcagtgccctgtggaggaggcgcctgcacgcccagccttgtcctgccgcacccaacacggcctctgtcagctctgcagagcccaagaacctgttaatagagcaggactgagtgcaggagtgtgtgtgtgcacgcgcgttcatgtgatgcacacgcgtgtgtgggtgtgtgcgtgggggtgtgcacacatatgcgaatctccgtgtgtgctgagccttagccacatgtatgctacaagcaaataaaatgcatttccaatgaactccacgctccaccagatggctgtgttgtcaggagggatacagcacgctggtaaaagccacattcctaaggagtcaaacctagaatgagccacaccaaccagcctttggtgactttcctaagagcaaagcaggtgggaagggggagaaggggctgggcacacagccctccagggagtcactgttttgtctgactcaggagcttagtgtccatttgcctgaggtgggaaatattcagccgcctgaggagactcagccctgatgggaggc

SEQ ID NO: 299277 - DNA, 4797 bp, Homo sapiens
  misc_feature (1860)..(1860): n is a, c, g, or t
  misc_feature (1881)..(1881): n is a, c, g, or t
cccgaataagatcgttcttggttgcctttcaggttgaacttggatttcctgtgaatcttgtttagtttctatgctgacctttgcattggttctttgggagtgtttgttaaattgaacttggagatggatgcttttatttggaaacaaaatctgttccctttccaggacaacagaaaaggccgagacacccttgaggccacacgaggtcctttctgtgtaactctggtcacagaagtagcaaaacctccctggataggggccaagagctcagccgcagataggcctcttttccagcaaacttcagatgcgttaatagagggaatcaggcaggtcctctgccgctgactgagggacctggctcccacggagcccagctgttacgagctgcaggtccgggagcaggatcggttctcatcatttaaacctgcgtgtggcagcggtggaggccagccttcttgtcccatgcctgcctcaggatgggccgggctcccaggcggggcctgtgtaggtttggggtcactcacagggaatcttgcccctgccagccatgaaccccaggacacagcgtgtgtccttgtgagggaatttgggagaaacggacacttccggaatgcacgttcccaggccctgagtgctagatatgcacaggggcctcagacataaacgtaaagaaacagtggtttttcttgttgggcggggactccagcagtggagaggaggtgtggagcccctcccacacccagctgccccctcctgagaaggacccagccaggcttgcagagggtccgagggtccagcagctgagctggctcatctccttctgtgcaggaggctggccaagtccacgctcctgcttatcccgctgttcggcgtccactacatggtgtttgccgtgtttcccatcagcatctcctccaaataccagatactgtttgagctgtgcctcgggtcgttccaggtaggtgtgcggaggcggccgccctcccccgagcgcgggtcctgcctgaccatctcttctcattgcagggcctggtggtggccgtcctctactgtttcctgaacagtgaggtaagttcatggccgccttggaaccaagcacaggtactcacttgcttcctgagatgctgcccagcctggtgccgcagcccccacacatgcctgtcttccgcgggctcgagttactgcccgggaccccacagttctgtgtccccatcagagaacccacaacgacacaggcaaacccactcttctgggcccagcttccaaaccccgccgtccttccgtccaccctaagtagcatcgactgccgtccgtctcggagccctctcgggaaagctcccggccgggtctagacagaatctgtttttccccatggtcggcgtctcgctcctgaccatagcttgtgcagtgcgagctgaagcgaaaatggcgaagccggtgcccgaccccgtccgcgagccgggattacagggtctgcggttcctccttctcccgcaacggctcggagggcgccctgcagttccaccgcggctcccgcgcccagtccttcctgcaaacggagacctcggtcatctagccccacccctgcctgtcggacgcggcgggaggcccacggttcggggcttctgcggggctgagacgccggcttcctccttccagatgcccgagcaccgtgtcgggcaggtcagcgcggtcctgactccgtcaagctggttgtccactaaaccccatacctggaattggagtcgtgttgtcattgactcgatttaaactccagcatttagataatcttgtgcaaaatgtgtttcagccgtatagtggatccacttttttttttttttttttttgagacggagtctngctctgtcgcccaggctggantgcagtggcctgatctctgctccctgcaagctccgcctcccgggttcacgccattctcctgcctcagcctcccatagctgggactacaggcgcccgccaacacgcctggctaattttttgtatttttagtagagacagggtttcaccatgttagccaggatggtctcgatctcctgacctcgtgatgggcccgcctcggcctcccaaagtgctgggattaaggcgtgagccactgcgcccggcccaagagaataggggagccaaggaggaaatgtggaaacgcagttgtgtggcccagcacgagcctgggcgaccaccgggtgacatccgtcccacatcagggcggcctcccaggtcccataagggtagccccctcatctgcaggacagagggaagccagtcagggcccccctgacgttaggaccaggagaaatcaacaggagggcagcccgtcctctctcttggggcgcccacccggcccggctgagccctgccccacccaactccacagggctgttttgcctccccacggaaggcgggctgaggagacaaccagatcaggagagcaaggtcatgaaggaggggacctctccacacaggtgttccgtgggaccctcagcagctctggctctgcctcaggaggtcacctgccgccctgtgggagccgcagagcctgacgctcagccccaggccagctgcggccaggcctgcgggcccctggtgatggggttacgtggggtgcgggatacagctgagtgggaaccggaaacctattctctttttaacaaaaataatcttaggataagaattattttaacaacatataaaactgtttcaagccctcctccccagagctggcgctcagcagccctagcggctgctccttcaggcgaagggtggtttgcagatgtggggagggtgtctggggacgttgctgagctggctgcagaagggtggggatatcagggcacagtctccatgtgtgtgccaagccctggcccccacagcgctcgatggacctcagcaagctgcccagccctggcccaggtgccccgactgtgggactcagttgttctgagcacatttgactccacttttcccttaaaaatgaatgtcttgttcctgtgcattggtggcatcacagaccccagctggggcgcgatgtcaaaggtcgggacagctgtgccgggaggcagccacagggaagctcacacatcctgtcagtgtcaccttggtttgcaaaacccatatccccggtaaaatgaggccggacagaggggctgttaggacagcaaagcagcagtgtccagagacccctcaatccccaaaggtccgcaccctgtcctgcacaccctgggccacgccggccacacccctctgctgcaacaagctcatccctggacttctgggagaatgaacccgaggttggtttggggagacaggtgaggcggttggatctacagaacaacccaccatttctgggggccgcagaggatccatcacagacggatactggggagtaaacggcccaggccaggtgcccaggaaaggacggctgagcatgtggagcgagagggaggcaggtggacgctgcagaccccaggttcagtgcggcccctcggctgttcctcccctgtagggtttggacagacccacccccagccttgcccagctttcaaaggacaaaagggagcatcccccacctactctcaggtttttgaggaaacaaagatttgtggtaactgaaggtgttgggtcagtggccaggtgccgacactgagctgtgacccagaggggacgctgaggaagtgggcgtgagtggacatgtcaggtggttaccaggcactggttgttgatggtcggtggttgggtgtgggcagtcatcagtcatcaggtgtgctcaggggacaatctcccctcaaccgcacatgtgccactgttcagcggagctgactggtttctcctggtagaggggccggctgtttcctgacagatgcctggtgagcaggggaagcaggacccagtggtcaacaggtgtctttaactgtcattgtgtgtggaatgtcgcagactcctccacgtggcgggaatgagctgtgtaaatacttcaataaagcctgacttcacatctgcatgctgagtaagaacttgctctgaccagatctgaggctctggagcatggaggacacacttggcgtgttagtcgtggctgctgcattcagatgaaaacagagcttggacggggagggagagggtgggcagggtcctgccagccacagggcaccagggaggacattggaaacagccacctctccctgaggagagtcacggacccctgtcagagcgtcgccattggggagcctccgtctggcagctgtgacgcatgagcagtgccctgtggaggaggcgcctgcacgcccagccttgtcctgccgcacccaacacggcctctgtcagctctgcagagcccaagaacctgttaatagagcaggactgagtgcaggagtgtgtgtgtgcacgcgcgttcatgtgatgcacacgcgtgtgtgggtgtgtgcgtgggggtgtgcacacatatgcgaatctccgtgtgtgctgagccttagccacatgtatgctacaagcaaataaaatgcatttccaatgaactccacgctccaccagatggctgtgttgtcaggagggatacagcacgctggtaaaagccacattcctaaggagtcaaacctagaatgagccacaccaaccagcctttggtgactttcctaagagcaaagcaggtgggaagggggagaaggggctgggcacacagccctccagggagtcactgttttgtctgactcaggagcttagtgtccatttgcctgaggtgggaaatattcagccgcctgaggagactcagccctgatgggaggc

SEQ ID NO: 299278 - DNA, 5148 bp, Homo sapiens
  misc_feature (2211)..(2211): n is a, c, g, or t
  misc_feature (2232)..(2232): n is a, c, g, or t
gtgcattgagcgcgctccagctgccgggacggagggggcggcccccgcgctcggggcgctcggctacagctgcggggcccgaggtctccgcgcactcgctcccggcccatgctggaggcggcggaaccgcggggacctaggacggaggcggcgggcgctgggcggcccccggcacgctgagctcgggatgcggacgctgctgcctcccgcgctgctgacctgctggctgctcgcccccgtgagtgcgcccgcgacccccgccccacggcgcctcggacccggttctccccttccgagaagagcgctcctcccgccggtcttcgccttcctcccgggtgctggagcgcgggcggggtccgggagagggagcggggtcgcccggggtccggagcttcctcccggagagcgtgaagcgctgagctccggtcccgccgggttgcgggactcgggttgggaggctgcctgcgcccttccccgcgccccaccgtccggggtttgctggaaacgggatcgtttcttcctggacgcgtcaacgatgagctcgttcggggccgtcccgggagctgggagctgcgggcgcctgcgcgggctgcgcgtttcacggggagatcggggttggcgttggccgcagatgcctctcggtccctccctgtacttactggtgaacagcattcacccagaatgccgatttcatctggaaatacaggaggaagaaacaaaatgtgcagagcttctgaggtctcaaacagaaaaacacaaagcctgcagtggcgtctgggacaacatcacgtgctggcggcctgccaatgtgggagagaccgtcacggtgccctgcccaaaagtcttcagcaatttttacagcaaagcaggaaacataagcaaaaactgtacgagtgacggatggtcagagacgttcccagatttcgtcgatgcctgtggctacagcgacccggaggatgagagcaagatcacgttttatattctggtgaaggccatttataccctgggctacagtgtctctctgatgtctcttgcaacaggaagcataattctgtgcctcttcaggaagctgcactgcaccaggaattacatccacctgaacctgttcctgtccttcatcctgagagccatctcagtgctggtcaaggacgacgttctctactccagctctggcacgttgcactgccctgaccagccatcctcctgggtgggctgcaagctgagcctggtcttcctgcagtactgcatcatggccaacttcttctggctgctggtggaggggctctacctccacaccctcctggtggccatgctcccccctagaaggtgcttcctggcctacctcctgatcggatggggcctccccaccgtctgcatcggtgcatggactgcggccaggctctacttagaagacaccggttgctgggatacaaacgaccacagtgtgccctggtgggtcatacgaataccgattttaatttccatcatcgtcaattttgtccttttcattagtattatacgaattttgctgcagaagttaacatccccagatgtcggcggcaacgaccagtctcagtacaagaggctggccaagtccacgctcctgcttatcccgctgttcggcgtccactacatggtgtttgccgtgtttcccatcagcatctcctccaaataccagatactgtttgagctgtgcctcgggtcgttccagggcctggtggtggccgtcctctactgtttcctgaacagtgaggtgcagtgcgagctgaagcgaaaatggcgaagccggtgcccgaccccgtccgcgagccgggattacagggtctgcggttcctccttctcccgcaacggctcggagggcgccctgcagttccaccgcggctcccgcgcccagtccttcctgcaaacggagacctcggtcatctagccccacccctgcctgtcggacgcggcgggaggcccacggttcggggcttctgcggggctgagacgccggcttcctccttccagatgcccgagcaccgtgtcgggcaggtcagcgcggtcctgactccgtcaagctggttgtccactaaaccccatacctggaattggagtcgtgttgtcattgactcgatttaaactccagcatttagataatcttgtgcaaaatgtgtttcagccgtatagtggatccacttttttttttttttttttttgagacggagtctngctctgtcgcccaggctggantgcagtggcctgatctctgctccctgcaagctccgcctcccgggttcacgccattctcctgcctcagcctcccatagctgggactacaggcgcccgccaacacgcctggctaattttttgtatttttagtagagacagggtttcaccatgttagccaggatggtctcgatctcctgacctcgtgatgggcccgcctcggcctcccaaagtgctgggattaaggcgtgagccactgcgcccggcccaagagaataggggagccaaggaggaaatgtggaaacgcagttgtgtggcccagcacgagcctgggcgaccaccgggtgacatccgtcccacatcagggcggcctcccaggtcccataagggtagccccctcatctgcaggacagagggaagccagtcagggcccccctgacgttaggaccaggagaaatcaacaggagggcagcccgtcctctctcttggggcgcccacccggcccggctgagccctgccccacccaactccacagggctgttttgcctccccacggaaggcgggctgaggagacaaccagatcaggagagcaaggtcatgaaggaggggacctctccacacaggtgttccgtgggaccctcagcagctctggctctgcctcaggaggtcacctgccgccctgtgggagccgcagagcctgacgctcagccccaggccagctgcggccaggcctgcgggcccctggtgatggggttacgtggggtgcgggatacagctgagtgggaaccggaaacctattctctttttaacaaaaataatcttaggataagaattattttaacaacatataaaactgtttcaagccctcctccccagagctggcgctcagcagccctagcggctgctccttcaggcgaagggtggtttgcagatgtggggagggtgtctggggacgttgctgagctggctgcagaagggtggggatatcagggcacagtctccatgtgtgtgccaagccctggcccccacagcgctcgatggacctcagcaagctgcccagccctggcccaggtgccccgactgtgggactcagttgttctgagcacatttgactccacttttcccttaaaaatgaatgtcttgttcctgtgcattggtggcatcacagaccccagctggggcgcgatgtcaaaggtcgggacagctgtgccgggaggcagccacagggaagctcacacatcctgtcagtgtcaccttggtttgcaaaacccatatccccggtaaaatgaggccggacagaggggctgttaggacagcaaagcagcagtgtccagagacccctcaatccccaaaggtccgcaccctgtcctgcacaccctgggccacgccggccacacccctctgctgcaacaagctcatccctggacttctgggagaatgaacccgaggttggtttggggagacaggtgaggcggttggatctacagaacaacccaccatttctgggggccgcagaggatccatcacagacggatactggggagtaaacggcccaggccaggtgcccaggaaaggacggctgagcatgtggagcgagagggaggcaggtggacgctgcagaccccaggttcagtgcggcccctcggctgttcctcccctgtagggtttggacagacccacccccagccttgcccagctttcaaaggacaaaagggagcatcccccacctactctcaggtttttgaggaaacaaagatttgtggtaactgaaggtgttgggtcagtggccaggtgccgacactgagctgtgacccagaggggacgctgaggaagtgggcgtgagtggacatgtcaggtggttaccaggcactggttgttgatggtcggtggttgggtgtgggcagtcatcagtcatcaggtgtgctcaggggacaatctcccctcaaccgcacatgtgccactgttcagcggagctgactggtttctcctggtagaggggccggctgtttcctgacagatgcctggtgagcaggggaagcaggacccagtggtcaacaggtgtctttaactgtcattgtgtgtggaatgtcgcagactcctccacgtggcgggaatgagctgtgtaaatacttcaataaagcctgacttcacatctgcatgctgagtaagaacttgctctgaccagatctgaggctctggagcatggaggacacacttggcgtgttagtcgtggctgctgcattcagatgaaaacagagcttggacggggagggagagggtgggcagggtcctgccagccacagggcaccagggaggacattggaaacagccacctctccctgaggagagtcacggacccctgtcagagcgtcgccattggggagcctccgtctggcagctgtgacgcatgagcagtgccctgtggaggaggcgcctgcacgcccagccttgtcctgccgcacccaacacggcctctgtcagctctgcagagcccaagaacctgttaatagagcaggactgagtgcaggagtgtgtgtgtgcacgcgcgttcatgtgatgcacacgcgtgtgtgggtgtgtgcgtgggggtgtgcacacatatgcgaatctccgtgtgtgctgagccttagccacatgtatgctacaagcaaataaaatgcatttccaatgaactccacgctccaccagatggctgtgttgtcaggagggatacagcacgctggtaaaagccacattcctaaggagtcaaacctagaatgagccacaccaaccagcctttggtgactttcctaagagcaaagcaggtgggaagggggagaaggggctgggcacacagccctccagggagtcactgttttgtctgactcaggagcttagtgtccatttgcctgaggtgggaaatattcagccgcctgaggagactcagccctgatgggaggc

SEQ ID NO: 299279 - DNA, 4729 bp, Homo sapiens
  misc_feature (1792)..(1792): n is a, c, g, or t
  misc_feature (1813)..(1813): n is a, c, g, or t
cccgaataagatcgttcttggttgcctttcaggttgaacttggatttcctgtgaatcttgtttagtttctatgctgacctttgcattggttctttgggagtgtttgttaaattgaacttggagatggatgcttttatttggaaacaaaatctgttccctttccaggacaacagaaaaggccgagacacccttgaggccacacgaggtcctttctgtgtaactctggtcacagaagtagcaaaacctccctggataggggccaagagctcagccgcagataggcctcttttccagcaaacttcagatgcgttaatagagggaatcaggcaggtcctctgccgctgactgagggacctggctcccacggagcccagctgttacgagctgcaggtccgggagcaggatcggttctcatcatttaaacctgcgtgtggcagcggtggaggccagccttcttgtcccatgcctgcctcaggatgggccgggctcccaggcggggcctgtgtaggtttggggtcactcacagggaatcttgcccctgccagccatgaaccccaggacacagcgtgtgtccttgtgagggaatttgggagaaacggacacttccggaatgcacgttcccaggccctgagtgctagatatgcacaggggcctcagacataaacgtaaagaaacagtggtttttcttgttgggcggggactccagcagtggagaggaggtgtggagcccctcccacacccagctgccccctcctgagaaggacccagccaggcttgcagagggtccgagggtccagcagctgagctggctcatctccttctgtgcaggaggctggccaagtccacgctcctgcttatcccgctgttcggcgtccactacatggtgtttgccgtgtttcccatcagcatctcctccaaataccagatactgtttgagctgtgcctcgggtcgttccagggcctggtggtggccgtcctctactgtttcctgaacagtgaggtaagttcatggccgccttggaaccaagcacaggtactcacttgcttcctgagatgctgcccagcctggtgccgcagcccccacacatgcctgtcttccgcgggctcgagttactgcccgggaccccacagttctgtgtccccatcagagaacccacaacgacacaggcaaacccactcttctgggcccagcttccaaaccccgccgtccttccgtccaccctaagtagcatcgactgccgtccgtctcggagccctctcgggaaagctcccggccgggtctagacagaatctgtttttccccatggtcggcgtctcgctcctgaccatagcttgtgcagtgcgagctgaagcgaaaatggcgaagccggtgcccgaccccgtccgcgagccgggattacagggtctgcggttcctccttctcccgcaacggctcggagggcgccctgcagttccaccgcggctcccgcgcccagtccttcctgcaaacggagacctcggtcatctagccccacccctgcctgtcggacgcggcgggaggcccacggttcggggcttctgcggggctgagacgccggcttcctccttccagatgcccgagcaccgtgtcgggcaggtcagcgcggtcctgactccgtcaagctggttgtccactaaaccccatacctggaattggagtcgtgttgtcattgactcgatttaaactccagcatttagataatcttgtgcaaaatgtgtttcagccgtatagtggatccacttttttttttttttttttttgagacggagtctngctctgtcgcccaggctggantgcagtggcctgatctctgctccctgcaagctccgcctcccgggttcacgccattctcctgcctcagcctcccatagctgggactacaggcgcccgccaacacgcctggctaattttttgtatttttagtagagacagggtttcaccatgttagccaggatggtctcgatctcctgacctcgtgatgggcccgcctcggcctcccaaagtgctgggattaaggcgtgagccactgcgcccggcccaagagaataggggagccaaggaggaaatgtggaaacgcagttgtgtggcccagcacgagcctgggcgaccaccgggtgacatccgtcccacatcagggcggcctcccaggtcccataagggtagccccctcatctgcaggacagagggaagccagtcagggcccccctgacgttaggaccaggagaaatcaacaggagggcagcccgtcctctctcttggggcgcccacccggcccggctgagccctgccccacccaactccacagggctgttttgcctccccacggaaggcgggctgaggagacaaccagatcaggagagcaaggtcatgaaggaggggacctctccacacaggtgttccgtgggaccctcagcagctctggctctgcctcaggaggtcacctgccgccctgtgggagccgcagagcctgacgctcagccccaggccagctgcggccaggcctgcgggcccctggtgatggggttacgtggggtgcgggatacagctgagtgggaaccggaaacctattctctttttaacaaaaataatcttaggataagaattattttaacaacatataaaactgtttcaagccctcctccccagagctggcgctcagcagccctagcggctgctccttcaggcgaagggtggtttgcagatgtggggagggtgtctggggacgttgctgagctggctgcagaagggtggggatatcagggcacagtctccatgtgtgtgccaagccctggcccccacagcgctcgatggacctcagcaagctgcccagccctggcccaggtgccccgactgtgggactcagttgttctgagcacatttgactccacttttcccttaaaaatgaatgtcttgttcctgtgcattggtggcatcacagaccccagctggggcgcgatgtcaaaggtcgggacagctgtgccgggaggcagccacagggaagctcacacatcctgtcagtgtcaccttggtttgcaaaacccatatccccggtaaaatgaggccggacagaggggctgttaggacagcaaagcagcagtgtccagagacccctcaatccccaaaggtccgcaccctgtcctgcacaccctgggccacgccggccacacccctctgctgcaacaagctcatccctggacttctgggagaatgaacccgaggttggtttggggagacaggtgaggcggttggatctacagaacaacccaccatttctgggggccgcagaggatccatcacagacggatactggggagtaaacggcccaggccaggtgcccaggaaaggacggctgagcatgtggagcgagagggaggcaggtggacgctgcagaccccaggttcagtgcggcccctcggctgttcctcccctgtagggtttggacagacccacccccagccttgcccagctttcaaaggacaaaagggagcatcccccacctactctcaggtttttgaggaaacaaagatttgtggtaactgaaggtgttgggtcagtggccaggtgccgacactgagctgtgacccagaggggacgctgaggaagtgggcgtgagtggacatgtcaggtggttaccaggcactggttgttgatggtcggtggttgggtgtgggcagtcatcagtcatcaggtgtgctcaggggacaatctcccctcaaccgcacatgtgccactgttcagcggagctgactggtttctcctggtagaggggccggctgtttcctgacagatgcctggtgagcaggggaagcaggacccagtggtcaacaggtgtctttaactgtcattgtgtgtggaatgtcgcagactcctccacgtggcgggaatgagctgtgtaaatacttcaataaagcctgacttcacatctgcatgctgagtaagaacttgctctgaccagatctgaggctctggagcatggaggacacacttggcgtgttagtcgtggctgctgcattcagatgaaaacagagcttggacggggagggagagggtgggcagggtcctgccagccacagggcaccagggaggacattggaaacagccacctctccctgaggagagtcacggacccctgtcagagcgtcgccattggggagcctccgtctggcagctgtgacgcatgagcagtgccctgtggaggaggcgcctgcacgcccagccttgtcctgccgcacccaacacggcctctgtcagctctgcagagcccaagaacctgttaatagagcaggactgagtgcaggagtgtgtgtgtgcacgcgcgttcatgtgatgcacacgcgtgtgtgggtgtgtgcgtgggggtgtgcacacatatgcgaatctccgtgtgtgctgagccttagccacatgtatgctacaagcaaataaaatgcatttccaatgaactccacgctccaccagatggctgtgttgtcaggagggatacagcacgctggtaaaagccacattcctaaggagtcaaacctagaatgagccacaccaaccagcctttggtgactttcctaagagcaaagcaggtgggaagggggagaaggggctgggcacacagccctccagggagtcactgttttgtctgactcaggagcttagtgtccatttgcctgaggtgggaaatattcagccgcctgaggagactcagccctgatgggaggc

SEQ ID NO: 299280 - DNA, 1692 bp, Homo sapiens
cccgaataagatcgttcttggttgcctttcaggttgaacttggatttcctgtgaatcttgtttagtttctatgctgacctttgcattggttctttgggagtgtttgttaaattgaacttggagatggatgcttttatttggaaacaaaatctgttccctttccaggacaacagaaaaggccgagacacccttgaggccacacgaggtcctttctgtgtaactctggtcacagaagtagcaaaacctccctggataggggccaagagctcagccgcagataggcctcttttccagcaaacttcagatgcgttaatagagggaatcaggcaggtcctctgccgctgactgagggacctggctcccacggagcccagctgttacgagctgcaggtccgggagcaggatcggttctcatcatttaaacctgcgtgtggcagcggtggaggccagccttcttgtcccatgcctgcctcaggatgggccgggctcccaggcggggcctgtgtaggtttggggtcactcacagggaatcttgcccctgccagccatgaaccccaggacacagcgtgtgtccttgtgagggaatttgggagaaacggacacttccggaatgcacgttcccaggccctgagtgctagatatgcacaggggcctcagacataaacgtaaagaaacagtggtttttcttgttgggcggggactccagcagtggagaggaggtgtggagcccctcccacacccagctgccccctcctgagaaggacccagccaggcttgcagagggtccgagggtccagcagctgagctggctcatctccttctgtgcaggaggctggccaagtccacgctcctgcttatcccgctgttcggcgtccactacatggtgtttgccgtgtttcccatcagcatctcctccaaataccagatactgtttgagctgtgcctcgggtcgttccaggtaggtgtgcggaggcggccgccctcccccgagcgcgggtcctgcctgaccatctcttctcattgcagggcctggtggtggccgtcctctactgtttcctgaacagtgaggtaagttcatggccgccttggaaccaagcacaggtactcacttgcttcctgagatgctgcccagcctggtgccgcagcccccacacatgcctgtcttccgcgggctcgagttactgcccgggaccccacagttctgtgtccccatcagagaacccacaacgacacaggcaaacccactcttctgggcccagcttccaaaccccgccgtccttccgtccaccctaagtagcatcgactgccgtccgtctcggagccctctcgggaaagctcccggccgggtctagacagaatctgtttttccccatggtcggcgtctcgctcctgaccatagcttgtgagtcccagaaagccgggcctgggttggggggtggggctgcacagcgtcctgtgagtccctggggaggaagcccggagccgagctctgccctgcgttcattcccagccagggaggctgtctccgggctgctccaacggcctggccccgtcccctgacccctgaccctcccgccccacgctgcggttgctggcgctttctttgcttgacatgcagctttcaccagcacggcttctgcaaagctgagcccgagtagtgccacttgtcctcctccctcctctgccgtccgg

SEQ ID NO: 299281 - DNA, 3969 bp, Homo sapiens
  misc_feature (10)..(10): n is a, c, g, or t
  misc_feature (66)..(66): n is a, c, g, or t
  misc_feature (73)..(73): n is a, c, g, or t
  misc_feature (87)..(87): n is a, c, g, or t
  misc_feature (103)..(103): n is a, c, g, or t
  misc_feature (127)..(127): n is a, c, g, or t
  misc_feature (134)..(134): n is a, c, g, or t
  misc_feature (174)..(174): n is a, c, g, or t
  misc_feature (178)..(178): n is a, c, g, or t
  misc_feature (195)..(195): n is a, c, g, or t
  misc_feature (245)..(245): n is a, c, g, or t
  misc_feature (251)..(251): n is a, c, g, or t
  misc_feature (257)..(257): n is a, c, g, or t
  misc_feature (260)..(261): n is a, c, g, or t
  misc_feature (263)..(263): n is a, c, g, or t
  misc_feature (270)..(272): n is a, c, g, or t
  misc_feature (274)..(274): n is a, c, g, or t
  misc_feature (280)..(280): n is a, c, g, or t
  misc_feature (284)..(284): n is a, c, g, or t
  misc_feature (290)..(291): n is a, c, g, or t
  misc_feature (297)..(297): n is a, c, g, or t
  misc_feature (302)..(304): n is a, c, g, or t
  misc_feature (307)..(307): n is a, c, g, or t
  misc_feature (310)..(311): n is a, c, g, or t
  misc_feature (320)..(320): n is a, c, g, or t
  misc_feature (322)..(323): n is a, c, g, or t
  misc_feature (333)..(333): n is a, c, g, or t
  misc_feature (341)..(341): n is a, c, g, or t
  misc_feature (349)..(350): n is a, c, g, or t
  misc_feature (353)..(353): n is a, c, g, or t
  misc_feature (363)..(363): n is a, c, g, or t
  misc_feature (366)..(369): n is a, c, g, or t
  misc_feature (376)..(376): n is a, c, g, or t
  misc_feature (379)..(379): n is a, c, g, or t
  misc_feature (382)..(382): n is a, c, g, or t
  misc_feature (385)..(386): n is a, c, g, or t
  misc_feature (388)..(389): n is a, c, g, or t
  misc_feature (395)..(395): n is a, c, g, or t
  misc_feature (400)..(400): n is a, c, g, or t
  misc_feature (405)..(405): n is a, c, g, or t
  misc_feature (407)..(407): n is a, c, g, or t
  misc_feature (411)..(412): n is a, c, g, or t
  misc_feature (417)..(418): n is a, c, g, or t
  misc_feature (420)..(420): n is a, c, g, or t
  misc_feature (424)..(424): n is a, c, g, or t
  misc_feature (434)..(435): n is a, c, g, or t
  misc_feature (444)..(444): n is a, c, g, or t
  misc_feature (454)..(454): n is a, c, g, or t
  misc_feature (458)..(458): n is a, c, g, or t
  misc_feature (460)..(460): n is a, c, g, or t
  misc_feature (465)..(465): n is a, c, g, or t
  misc_feature (467)..(467): n is a, c, g, or t
  misc_feature (499)..(499): n is a, c, g, or t
  misc_feature (522)..(522): n is a, c, g, or t
  misc_feature (542)..(542): n is a, c, g, or t
  misc_feature (544)..(544): n is a, c, g, or t
  misc_feature (565)..(565): n is a, c, g, or t
  misc_feature (570)..(570): n is a, c, g, or t
  misc_feature (1032)..(1032): n is a, c, g, or t
  misc_feature (1053)..(1053): n is a, c, g, or t
tttcactccncttaccatccatcctcctatttttcatcaatctcaacctcttcttcctcactactncatcatntccaacttcttctntcttctcttttatttnctctacctccacaccctcctattntccattntccccccctataatctactacctatcctacctccttatcntatntttcctccccaccatcntcatctattcatacactccacccactctctacttataatacacctttttnttaaanacaaanaannanatttttnnntnttattnaaanaaatanntatttnaattnnnatnatnntcaattttntnnttttaattantattatancaattttnntcnaaaaattaanatnnnnatatttnttnttnaannannattatnattanaatantntttnnaattnnantctncttcttatcnntcttttctncttccaatanattntntttgncntttttaccatcagcatctcctccaaataccanatacttttttagcttttcctctnttctttccatttcctttttntngccttcctctactttttcctnaacantgaggtgcagtgcgagctgaagcgaaaatggcgaagccggtgcccgaccccgtccgcgagccgggattacagggtctgcggttcctccttctcccgcaacggctcggagggcgccctgcagttccaccgcggctcccgcgcccagtccttcctgcaaacggagacctcggtcatctagccccacccctgcctgtcggacgcggcgggaggcccacggttcggggcttctgcggggctgagacgccggcttcctccttccagatgcccgagcaccgtgtcgggcaggtcagcgcggtcctgactccgtcaagctggttgtccactaaaccccatacctggaattggagtcgtgttgtcattgactcgatttaaactccagcatttagataatcttgtgcaaaatgtgtttcagccgtatagtggatccacttttttttttttttttttttgagacggagtctngctctgtcgcccaggctggantgcagtggcctgatctctgctccctgcaagctccgcctcccgggttcacgccattctcctgcctcagcctcccatagctgggactacaggcgcccgccaacacgcctggctaattttttgtatttttagtagagacagggtttcaccatgttagccaggatggtctcgatctcctgacctcgtgatgggcccgcctcggcctcccaaagtgctgggattaaggcgtgagccactgcgcccggcccaagagaataggggagccaaggaggaaatgtggaaacgcagttgtgtggcccagcacgagcctgggcgaccaccgggtgacatccgtcccacatcagggcggcctcccaggtcccataagggtagccccctcatctgcaggacagagggaagccagtcagggcccccctgacgttaggaccaggagaaatcaacaggagggcagcccgtcctctctcttggggcgcccacccggcccggctgagccctgccccacccaactccacagggctgttttgcctccccacggaaggcgggctgaggagacaaccagatcaggagagcaaggtcatgaaggaggggacctctccacacaggtgttccgtgggaccctcagcagctctggctctgcctcaggaggtcacctgccgccctgtgggagccgcagagcctgacgctcagccccaggccagctgcggccaggcctgcgggcccctggtgatggggttacgtggggtgcgggatacagctgagtgggaaccggaaacctattctctttttaacaaaaataatcttaggataagaattattttaacaacatataaaactgtttcaagccctcctccccagagctggcgctcagcagccctagcggctgctccttcaggcgaagggtggtttgcagatgtggggagggtgtctggggacgttgctgagctggctgcagaagggtggggatatcagggcacagtctccatgtgtgtgccaagccctggcccccacagcgctcgatggacctcagcaagctgcccagccctggcccaggtgccccgactgtgggactcagttgttctgagcacatttgactccacttttcccttaaaaatgaatgtcttgttcctgtgcattggtggcatcacagaccccagctggggcgcgatgtcaaaggtcgggacagctgtgccgggaggcagccacagggaagctcacacatcctgtcagtgtcaccttggtttgcaaaacccatatccccggtaaaatgaggccggacagaggggctgttaggacagcaaagcagcagtgtccagagacccctcaatccccaaaggtccgcaccctgtcctgcacaccctgggccacgccggccacacccctctgctgcaacaagctcatccctggacttctgggagaatgaacccgaggttggtttggggagacaggtgaggcggttggatctacagaacaacccaccatttctgggggccgcagaggatccatcacagacggatactggggagtaaacggcccaggccaggtgcccaggaaaggacggctgagcatgtggagcgagagggaggcaggtggacgctgcagaccccaggttcagtgcggcccctcggctgttcctcccctgtagggtttggacagacccacccccagccttgcccagctttcaaaggacaaaagggagcatcccccacctactctcaggtttttgaggaaacaaagatttgtggtaactgaaggtgttgggtcagtggccaggtgccgacactgagctgtgacccagaggggacgctgaggaagtgggcgtgagtggacatgtcaggtggttaccaggcactggttgttgatggtcggtggttgggtgtgggcagtcatcagtcatcaggtgtgctcaggggacaatctcccctcaaccgcacatgtgccactgttcagcggagctgactggtttctcctggtagaggggccggctgtttcctgacagatgcctggtgagcaggggaagcaggacccagtggtcaacaggtgtctttaactgtcattgtgtgtggaatgtcgcagactcctccacgtggcgggaatgagctgtgtaaatacttcaataaagcctgacttcacatctgcatgctgagtaagaacttgctctgaccagatctgaggctctggagcatggaggacacacttggcgtgttagtcgtggctgctgcattcagatgaaaacagagcttggacggggagggagagggtgggcagggtcctgccagccacagggcaccagggaggacattggaaacagccacctctccctgaggagagtcacggacccctgtcagagcgtcgccattggggagcctccgtctggcagctgtgacgcatgagcagtgccctgtggaggaggcgcctgcacgcccagccttgtcctgccgcacccaacacggcctctgtcagctctgcagagcccaagaacctgttaatagagcaggactgagtgcaggagtgtgtgtgtgcacgcgcgttcatgtgatgcacacgcgtgtgtgggtgtgtgcgtgggggtgtgcacacatatgcgaatctccgtgtgtgctgagccttagccacatgtatgctacaagcaaataaaatgcatttccaatgaactccacgctccaccagatggctgtgttgtcaggagggatacagcacgctggtaaaagccacattcctaaggagtcaaacctagaatgagccacaccaaccagcctttggtgactttcctaagagcaaagcaggtgggaagggggagaaggggctgggcacacagccctccagggagtcactgttttgtctgactcaggagcttagtgtccatttgcctgaggtgggaaatattcagccgcctgaggagactcagccctgatgggaggc

SEQ ID NO: 299282 - DNA, 3622 bp, Homo sapiens
  misc_feature (685)..(685): n is a, c, g, or t
  misc_feature (706)..(706): n is a, c, g, or t
cgcacagtcttagagtctggcagcgtcccccgccctcctgtggccgtccagttcccgctccctccagcctctgcccccaaggccgtttctgtttctgtccatctgctggcaacacagatacgggagcaggcgggagggagagctggaggctcgcgggccgcgcttcccatagcagccgcccgcacctgcccaggctcacgggcgttcccgctgccctcacctcccaggtgcagtgcgagctgaagcgaaaatggcgaagccggtgcccgaccccgtccgcgagccgggattacagggtctgcggttcctccttctcccgcaacggctcggagggcgccctgcagttccaccgcggctcccgcgcccagtccttcctgcaaacggagacctcggtcatctagccccacccctgcctgtcggacgcggcgggaggcccacggttcggggcttctgcggggctgagacgccggcttcctccttccagatgcccgagcaccgtgtcgggcaggtcagcgcggtcctgactccgtcaagctggttgtccactaaaccccatacctggaattggagtcgtgttgtcattgactcgatttaaactccagcatttagataatcttgtgcaaaatgtgtttcagccgtatagtggatccacttttttttttttttttttttgagacggagtctngctctgtcgcccaggctggantgcagtggcctgatctctgctccctgcaagctccgcctcccgggttcacgccattctcctgcctcagcctcccatagctgggactacaggcgcccgccaacacgcctggctaattttttgtatttttagtagagacagggtttcaccatgttagccaggatggtctcgatctcctgacctcgtgatgggcccgcctcggcctcccaaagtgctgggattaaggcgtgagccactgcgcccggcccaagagaataggggagccaaggaggaaatgtggaaacgcagttgtgtggcccagcacgagcctgggcgaccaccgggtgacatccgtcccacatcagggcggcctcccaggtcccataagggtagccccctcatctgcaggacagagggaagccagtcagggcccccctgacgttaggaccaggagaaatcaacaggagggcagcccgtcctctctcttggggcgcccacccggcccggctgagccctgccccacccaactccacagggctgttttgcctccccacggaaggcgggctgaggagacaaccagatcaggagagcaaggtcatgaaggaggggacctctccacacaggtgttccgtgggaccctcagcagctctggctctgcctcaggaggtcacctgccgccctgtgggagccgcagagcctgacgctcagccccaggccagctgcggccaggcctgcgggcccctggtgatggggttacgtggggtgcgggatacagctgagtgggaaccggaaacctattctctttttaacaaaaataatcttaggataagaattattttaacaacatataaaactgtttcaagccctcctccccagagctggcgctcagcagccctagcggctgctccttcaggcgaagggtggtttgcagatgtggggagggtgtctggggacgttgctgagctggctgcagaagggtggggatatcagggcacagtctccatgtgtgtgccaagccctggcccccacagcgctcgatggacctcagcaagctgcccagccctggcccaggtgccccgactgtgggactcagttgttctgagcacatttgactccacttttcccttaaaaatgaatgtcttgttcctgtgcattggtggcatcacagaccccagctggggcgcgatgtcaaaggtcgggacagctgtgccgggaggcagccacagggaagctcacacatcctgtcagtgtcaccttggtttgcaaaacccatatccccggtaaaatgaggccggacagaggggctgttaggacagcaaagcagcagtgtccagagacccctcaatccccaaaggtccgcaccctgtcctgcacaccctgggccacgccggccacacccctctgctgcaacaagctcatccctggacttctgggagaatgaacccgaggttggtttggggagacaggtgaggcggttggatctacagaacaacccaccatttctgggggccgcagaggatccatcacagacggatactggggagtaaacggcccaggccaggtgcccaggaaaggacggctgagcatgtggagcgagagggaggcaggtggacgctgcagaccccaggttcagtgcggcccctcggctgttcctcccctgtagggtttggacagacccacccccagccttgcccagctttcaaaggacaaaagggagcatcccccacctactctcaggtttttgaggaaacaaagatttgtggtaactgaaggtgttgggtcagtggccaggtgccgacactgagctgtgacccagaggggacgctgaggaagtgggcgtgagtggacatgtcaggtggttaccaggcactggttgttgatggtcggtggttgggtgtgggcagtcatcagtcatcaggtgtgctcaggggacaatctcccctcaaccgcacatgtgccactgttcagcggagctgactggtttctcctggtagaggggccggctgtttcctgacagatgcctggtgagcaggggaagcaggacccagtggtcaacaggtgtctttaactgtcattgtgtgtggaatgtcgcagactcctccacgtggcgggaatgagctgtgtaaatacttcaataaagcctgacttcacatctgcatgctgagtaagaacttgctctgaccagatctgaggctctggagcatggaggacacacttggcgtgttagtcgtggctgctgcattcagatgaaaacagagcttggacggggagggagagggtgggcagggtcctgccagccacagggcaccagggaggacattggaaacagccacctctccctgaggagagtcacggacccctgtcagagcgtcgccattggggagcctccgtctggcagctgtgacgcatgagcagtgccctgtggaggaggcgcctgcacgcccagccttgtcctgccgcacccaacacggcctctgtcagctctgcagagcccaagaacctgttaatagagcaggactgagtgcaggagtgtgtgtgtgcacgcgcgttcatgtgatgcacacgcgtgtgtgggtgtgtgcgtgggggtgtgcacacatatgcgaatctccgtgtgtgctgagccttagccacatgtatgctacaagcaaataaaatgcatttccaatgaactccacgctccaccagatggctgtgttgtcaggagggatacagcacgctggtaaaagccacattcctaaggagtcaaacctagaatgagccacaccaaccagcctttggtgactttcctaagagcaaagcaggtgggaagggggagaaggggctgggcacacagccctccagggagtcactgttttgtctgactcaggagcttagtgtccatttgcctgaggtgggaaatattcagccgcctgaggagactcagccctgatgggaggc

SEQ ID NO: 299283 - DNA, 3605 bp, Homo sapiens
  misc_feature (1788)..(1788): n is a, c, g, or t
  misc_feature (1809)..(1809): n is a, c, g, or t
gtgcattgagcgcgctccagctgccgggacggagggggcggcccccgcgctcggggcgctcggctacagctgcggggcccgaggtctccgcgcactcgctcccggcccatgctggaggcggcggaaccgcggggacctaggacggaggcggcgggcgctgggcggcccccggcacgctgagctcgggatgcggacgctgctgcctcccgcgctgctgacctgctggctgctcgcccccgtgaacagcattcacccagaatgccgatttcatctggaaatacaggaggaagaaacaaaatgtgcagagcttctgaggtctcaaacagaaaaacacaaagcctgcagtggcgtctgggacaacatcacgtgctggcggcctgccaatgtgggagagaccgtcacggtgccctgcccaaaagtcttcagcaatttttacagcaaagcaggaaacataagcaaaaactgtacgagtgacggatggtcagagacgttcccagatttcgtcgatgcctgtggctacagcgacccggaggatgagagcaagatcacgttttatattctggtgaaggccatttataccctgggctacagtgtctctctgatgtctcttgcaacaggaagcataattctgtgcctcttcaggaagctgcactgcaccaggaattacatccacctgaacctgttcctgtccttcatcctgagagccatctcagtgctggtcaaggacgacgttctctactccagctctggcacgttgcactgccctgaccagccatcctcctgggtgggctgcaagctgagcctggtcttcctgcagtactgcatcatggccaacttcttctggctgctggtggaggggctctacctccacaccctcctggtggccatgctcccccctagaaggtgcttcctggcctacctcctgatcggatggggcctccccaccgtctgcatcggtgcatggactgcggccaggctctacttagaagacaccggttgctgggatacaaacgaccacagtgtgccctggtgggtcatacgaataccgattttaatttccatcatcgtcaattttgtccttttcattagtattatacgaattttgctgcagaagttaacatccccagatgtcggcggcaacgaccagtctcagtacaagaggctggccaagtccacgctcctgcttatcccgctgttcggcgtccactacatggtgtttgccgtgtttcccatcagcatctcctccaaataccagatactgtttgagctgtgcctcgggtcgttccagggcctggtggtggccgtcctctactgtttcctgaacagtgaggtgcagtgcgagctgaagcgaaaatggcgaagccggtgcccgaccccgtccgcgagccgggattacagggtctgcggttcctccttctcccgcaacggctcggagggcgccctgcagttccaccgcggctcccgcgcccagtccttcctgcaaacggagacctcggtcatctagccccacccctgcctgtcggacgcggcgggaggcccacggttcggggcttctgcggggctgagacgccggcttcctccttccagatgcccgagcaccgtgtcgggcaggtcagcgcggtcctgactccgtcaagctggttgtccactaaaccccatacctggaattggagtcgtgttgtcattgactcgatttaaactccagcatttagataatcttgtgcaaaatgtgtttcagccgtatagtggatccacttttttttttttttttttttgagacggagtctngctctgtcgcccaggctggantgcagtggcctgatctctgctccctgcaagctccgcctcccgggttcacgccattctcctgcctcagcctcccatagctgggactacaggcgcccgccaacacgcctggctaattttttgtatttttagtagagacagggtttcaccatgttagccaggatggtctcgatctcctgacctcgtgatgggcccgcctcggcctcccaaagtgctgggattaaggcgtgagccactgcgcccggcccaagagaataggggagccaaggaggaaatgtggaaacgcagttgtgtggcccagcacgagcctgggcgaccaccgggtgacatccgtcccacatcagggcggcctcccaggtcccataagggtagccccctcatctgcaggacagagggaagccagtcagggcccccctgacgttaggaccaggagaaatcaacaggagggcagcccgtcctctctcttggggcgcccacccggcccggctgagccctgccccacccaactccacagggctgttttgcctccccacggaaggcgggctgaggagacaaccagatcaggagagcaaggtcatgaaggaggggacctctccacacaggtgttccgtgggaccctcagcagctctggctctgcctcaggaggtcacgtgccgacactgagctgtgacccagaggggacgctgaggaagtgggcgtgagtggacatgtcaggtggttaccaggcactggttgttgatggtcggtggttgggtgtgggcagtcatcagtcatcaggtgtgctcaggggacaatctcccctcaaccgcacatgtgccactgttcagcggagctgactggtttctcctggtagaggggccggctgtttcctgacagatgcctggtgagcaggggaagcaggacccagtggtcaacaggtgtctttaactgtcattgtgtgtggaatgtcgcagactcctccacgtggcgggaatgagctgtgtaaatacttcaataaagcctgacttcacatctgcatgctgagtaagaacttgctctgaccagatctgaggctctggagcatggaggacacacttggcgtgttagtcgtggctgctgcattcagatgaaaacagagcttggacggggagggagagggtgggcagggtcctgccagccacagggcaccagggaggacattggaaacagccacctctccctgaggagagtcacggacccctgtcagagcgtcgccattggggagcctccgtctggcagctgtgacgcatgagcagtgccctgtggaggaggcgcctgcacgcccagccttgtcctgccgcacccaacacggcctctgtcagctctgcagagcccaagaacctgttaatagagcaggactgagtgcaggagtgtgtgtgtgcacgcgcgttcatgtgatgcacacgcgtgtgtgggtgtgtgcgtgggggtgtgcacacatatgcgaatctccgtgtgtgctgagccttagccacatgtatgctacaagcaaataaaatgcatttccaatgaactccacgctccaccagatggctgtgttgtcaggagggatacagcacgctggtaaaagccacattcctaaggagtcaaacctagaatgagccacaccaaccagcctttggtgactttcctaagagcaaagcaggtgggaagggggagaaggggctgggcacacagccctccagggagtcactgttttgtctgactcaggagcttagtgtccatttgcctgaggtgggaaatattcagccgcctgaggagactcagccctgatgggaggc

SEQ ID NO: 299284 - DNA, 1445 bp, Homo sapiens
cccgaataagatcgttcttggttgcctttcaggttgaacttggatttcctgtgaatcttgtttagtttctatgctgacctttgcattggttctttgggagtgtttgttaaattgaacttggagatggatgcttttatttggaaacaaaatctgttccctttccaggacaacagaaaaggccgagacacccttgaggccacacgaggtcctttctgtgtaactctggtcacagaagtagcaaaacctccctggataggggccaagagctcagccgcagataggcctcttttccagcaaacttcagatgcgttaatagagggaatcaggcaggtcctctgccgctgactgagggacctggctcccacggagcccagctgttacgagctgcaggtccgggagcaggatcggttctcatcatttaaacctgcgtgtggcagcggtggaggccagccttcttgtcccatgcctgcctcaggatgggccgggctcccaggcggggcctgtgtaggtttggggtcactcacagggaatcttgcccctgccagccatgaaccccaggacacagcgtgtgtccttgtgagggaatttgggagaaacggacacttccggaatgcacgttcccaggccctgagtgctagatatgcacaggggcctcagacataaacgtaaagaaacagtggtttttcttgttgggcggggactccagcagtggagaggaggtgtggagcccctcccacacccagctgccccctcctgagaaggacccagccaggcttgcagagggtccgagggtccagcagctgagctggctcatctccttctgtgcaggaggctggccaagtccacgctcctgcttatcccgctgttcggcgtccactacatggtgtttgccgtgtttcccatcagcatctcctccaaataccagatactgtttgagctgtgcctcgggtcgttccagggcctggtggtggccgtcctctactgtttcctgaacagtgaggtaagttcatggccgccttggaaccaagcacaggtactcacttgcttcctgagatgctgcccagcctggtgccgcagcccccacacatgcctgtcttccgcgggctcgagttactgcccgggaccccacagttctgtgtccccatcagagaacccacaacgacacaggcaaacccactcttctggggggtggggctgcacagcgtcctgtgagtccctggggaggaagcccggagccgagctctgccctgcgttcattcccagccagggaggctgtctccgggctgctccaacggcctggccccgtcccctgacccctgaccctcccgccccacgctgcggttgctggcgctttctttgcttgacatgcagctttcaccagcacggcttctgcaaagctgagcccgagtagtgccacttgtcctcctccctcctctgccgtccgg

SEQ ID NO: 299285 - DNA, 862 bp, Homo sapiens
tcactgagggtggggatcagagaggagaggcacaccaggtagcggaagccttgccttgcccagggttggaaaggggtgcaaatttgggacatcctcatggacaggatgaggcaaacgtagccgatagctccgtgggtggtcgcaaaaatcagtgaacacatctccttctccgcacgttcaactccatggcctccagtaataacccttctcatgaggaatggcaagtctcagattctcagctctcaagcgtgtgtttaattatcttcactgcttactaaggcatgagcataaacttgtaaatatttacaaagactttaaacaagagattgcacttaatattcccgtgagaaagcgtgtccttgagggttttgctggtgaaggcacccacctgtgtgcgtgcacaccgctccgctccacctgtgtaaccaggcgtctctctgcaggcctccccaccgtctgcatcggtgcatggactgcggccaggctctacttagaagacaccgggtgagtccatgaccagactgcaacctcgaaaacgggcccggcaacatctggcaacatgaagtcctttggaagccagaaggttacctggttggaaggacagggagcgtttgcggccaaccgacagccacgcaggaagcatctgggcgattcatggggagaaatcctgtgaggttggagtgttggaggaagccccgtgcaggagacaggaagtgagccaggttttgcagcatagttgagattgggataagccaggcagagactggggcagcccctgcggtgggcacagcgatgtccacagaagaaagccaagtgccctgcatgttgtttacccggagcaaagtggaaggtcaggtgatgg

SEQ ID NO: 299286 - DNA, 530 bp, Homo sapiens
atggagtcttgctctgtcacccaggctggagtgcggtggccagtctcagctcactgcaacctccacctcccgggttcaagtgattctcctgcctcagcctcccaagtagctgagattacagagatgcaccaccatgctcagctaattttgtattgttagtagagacagggtttctccatgttggtcaggctggccttgaactcccgacctcagatgatccgcccgcctcggcctcccatagtgctgggattacaggcgtgacgaacgcgcccggcctactactgcttttctttttaaaaattttcctccaactttttattttgaacatcttttaatcccacagaaaaggtaaaagaatagacacctgcatctttcaccgagatttaccaattattcatgttttgtcatatttactttcatcactacaaaaaaaatacttttttttttctgaattacttggaagtaaaatgcagacatcatggcacttaaataccctttaatacccaagtatccattgtctgagattaagg

SEQ ID NO: 299287 - DNA, 2270 bp, Homo sapiens
cctactggagatcgcggcggcctcgcgggcggtctggtcggtgaggtcttggccgcgcgcggcaatgctgaggctgctggcgtccgggtgcgcccggggcccggggcccggcgtgggcgcgcgtcctgccgcagggctctttcatccggggcgccgccagagccgccaggcttccgatgcgccccggaaccagccccccagccccgagttcgtggcccggccggtgggcgtctgctccatgatgcgcctgccggtgcagacctcccccgaggggctggacgctgccttcatcggggtgcccctggatactgggacctccaaccggcctggggcgagattcggacctcgccgcatccgggaagaatcagtgatgcttcggacagtcaatcctagcacgggggccctccccttccagtccctcatggttgcagacctaggcgatgtgaatgtcaatctttacaaccttcaggacagctgccggcgaattcaagaggcctgtgagaaaattgtagcagctggctgtattcctctgaccttgggtggagatcacacaatcacatatcccatattgcaagcgatggcaaaaaagcatggcccagtggggctgctgcacgtggatgcgcacacggacacgaccgacaaggccctaggagagaagctctaccacggggcgcccttccgccggtgtgtggatgagggtctcctggactgtaagcgtgtggtgcagattggcatccggggctcttccacgaccttggatccctacagatacaaccggagccagggcttccgggtagtcctggctgaagactgctggatgaagtcgctggttcctctgatgggggaagtcaggcagcagatgggaggcaaacccatttatatcagctttgatattgacgctctggatcctgcctatgcgccagggacagggacacctgaaattgctggtctcactcctagtcaggctctggagatcatcaggggttgtcaaggcctgaacgtgatgggctgtgatcttgtcgaagtttcaccaccgtatgatctttctgggaacacagccctgctggcggctaacctgctgtttgagatgctatgtgctctccccaaagtgacaaccgtctgagtcttgtgctcttcaagacaaaacagattgcgtcgctgacaagttctcaagaagaacttatgagtaagcagtctgagaactaaagagtttatgccaagaaaactttctgctgaaagtgtcattgctggctgtgaagtcgggataatcagtagaattctcacccaaacagcaacatttctaaggaacttggattaattgggggaaaaaaaaaggagtacttgtactgctttgattttttttcctttgatgaaagatggaggataaaggggaagtgaggagaatttctttcaagattatctaaacattagaaacatgacatttaaaaaaactatgaaataatactgtataagcattccatatttctatatcttccttttaaacattttttttttttgagatagagttttgcttgtcacccaggctggagtgcagtggcccgatcttagctcacgcctgtaatcccaggcctaggcgggaagatcacttgagatcaggagttcaagatcagcctgcccaacatggtgaaacctcgtctctactaaaaatacaaaaaagattagccagacgtggtgtggtgcacacccattgtcccaactacttgggaggctgaggcaggagaatcgcttaagcccaggaagcggaggctgcagtgagccgagatcgtgtcactgcactccaccctgggcaacacagtaagattccctctcaagaaaaaaaaaaaaaaaaattagttgagaaagaaaacccaactgttgtgcgtttgttggattttctctggaaacgccatccagtctgtaataaaatttcagttgtcattaccctggatggaattcatcttggctggagtgagtggcttcatgcagggcaaccccactgcaaagaatgtgagcatcagctaggctgacacaggggtccgcagacccaggcccctcattccatcagtttctttcagcatgtttccatgttttcatattttgaaaaaagtcaaaatccaaattgattttcaatgtgtttccctttggttattccccactcccatgcctgtcctctcttaaaatctctgttgttggtactgtttgtttttggctgttggaactgttgtgatcccccaccacaagcagattaaaaggtataccacattaagaag

SEQ ID NO: 299288 - DNA, 5448 bp, Homo sapiens
ggcgctcggagcgggctccgcggcttgcaaggcgcctgcgactcggtcccaggtcggcgggcggcgcgcggcgggctcgcgcgggggccccggcgcgccgggcggcgcagtacgcagcgcgcggacccacgccacggccaggagcccagagcagcgcggccacactgcccaggggtcggccctcggccccggcgctcggagcgcggcggctgcctgggctttaatggctgctccgcggagcagcgcctagggctggaaggcggctgcggctcaggaagtcacccgagcaagcctccttcggggccggccgcacccgccgcggcgcgctccatgggggcgcgctccccccgggcggcccgctgacccgggacgccggggcccgctcgctcgccggccgcgcgtcccggccatgaactgagcccgcgggccagccccgcgcctgctccgcccgcgcctttcttctcgcgcctcctccgcccgccgccggcgggcccggctccccgggggctgcggcgccccgggctcggcggcccgcgggccccggggcgcggggcggcggcggcggggggcgcgcggctccgggcgcggcgcctgcaccatgaactaccagcagcagctggccaactcggctgccatccgggccgagatccagcgcttcgagtcggtccaccccaacatctactccatctacgagctgctggagcgcgtggaggagccggtgctgcagaaccagatccgggagcacgtcatcgccatcgaagatgccttcgtgaacagccaggaatggacgctgagtcgatctgtcccggagctcaaagtgggaattgtgggtaacttggccagcggcaagtctgccctggtgcaccggtacctgacgggcacatatgtccaggaggagtctccggaaggtggcaggttcaagaaagagattgtcgttgatggacagagctatctgctgctgatcagagatgaagggggccccccggaggcgcagtttgccatgtgggtggacgctgttatatttgtcttcagcttggaggatgaaataagtttccagaccgtttaccactactacagtcgaatggccaactatcggaacacgagcgagattcctctggttctggtgggaacccaggatgccataagttctgctaacccgagggtcatcgatgacgccagggcgaggaagctctccaacgacctgaaacggtgcacgtactacgagacgtgtgctacatacgggctgaatgtggagagggtcttccaggacgttgcccagaagattgttgccacaaggaagaagcagcagctgtccataggaccctgcaagtcgctacctaattctcccagccattcctccgtctgttccgcgcaggtgtctgccgtgcacatcagccagacaagtaatggaggtgggagtttaagcgactattcctcctccgttccatcgactcccagcaccagccagaaggaacttcggatcgatgttcctcccactgccaacacgcccacgcccgttcgcaagcagtctaagcgccggtccaacctgttcacctctcggaaagggagcgacccagacaaagagaagaaaggcctggagagtcgtgcggacagcattgggagcggccgagccatcccaattaaacagggcatgctgttgaagcgaagtggcaaatcgttgaataaagagtggaaaaagaaatatgtcaccctgtgtgacaatggcgtgctgacctatcatcccagtttacatgattacatgcagaatgttcatggtaaggagattgaccttctgagaaccactgtgaaagtcccagggaagaggccaccccgagccacgtcagcctgcgcacccatctccagccctaaaaccaatggcctatccaaggacatgagcagtttacacatctcacccaattcagacacagggctgggtgactccgtatgctccagccccagtatctccagcaccaccagccccaagctcgacccgcccccctcccctcacgccaacagaaagaagcaccgaaggaagaaaagcactagcaacttcaaagccgacggcctgtccggcactgctgaagaacaagaagaaaattttgagtttatcattgtgtccctcactggccaaacatggcactttgaagccacgacgtatgaggagcgggacgcctgggtccaagccatcgagagccagatcctggccagcctgcagtcgtgcgagagcagcaagaacaagtcccggctgacgagccagagcgaggccatggccctgcagtcgatccggaacatgcgcgggaactcccactgtgtggactgcgagacccagaatcccaactgggccagtttgaacttgggagccctcatgtgcatcgaatgctcagggatccaccggaatcttggcacccacctttcccgagtccgatctctggacctggatgactggccaatcgagctcatcaaggtgatgtcatccatcgggaacgagctagccaacagcgtctgggaagagagcagccaggggcggacgaaaccatcggtagactccacaagggaagagaaggaacggtggatccgtgccaagtacgagcagaagctcttcctggccccgctgccctgcacggagctgtccctgggccagcacctgctgcgggccaccgccgacgaggacctgcggacggccatcctgctgctggcacacggctcccgggacgaggtgaacgagacctgcggggagggagacggccgcacggcgctgcatctggcctgccgcaaggggaatgtggtcctggcgcagctcctgatctggtacggagtggacgtcacggcccgagatgcccacgggaacacagctctggcctacgcccggcaggcctccagccaggagtgcatcgacgtgctgctgcagtacggctgccccgacgagcgcttcgtgctcatggccacccctaacctgtccaggagaaacaataaccggaacaacagcagtgggagggtgcccaccatcatctgaggaacagccgtgcccgcctgctcgccgcacctgggacgcggcagcctcgccgcattctcgctcagaagtcgcagcacgtgagtcccgtcgcatcccctccctcttcctggtggccacctccctcccgcccacccactctcaccccaaacaaaatcacaaaacctggacatccctcaaggggcgaagaggcggccgggagactgcagaagtggctccttttcataaactcccctaaaccacacacaggagagagcgacgggcctcggccctttgatgatagcacatggcgcaggacccttgtcctggtggcacaagggatggggacgcgagggggaggggaggcgaggaacaaggagaaggggcaactttccttaactggcagttgagcacatagtacatttcccctctaccaaacggaacacttggattccatctcttctctgaggagctcgacggcataaatcagaagcaagcacagagtttgtcaggtttgaagcccctatgatggtgtgtgtcaaatcagttgtagctaatctgtccagggagaatactggcttcattacacttgtacagccgagttcttcccgcattactgctgtttaatagaacgtgattagtcatcgccgagaagaaagcatattagccgaggaggtagtcacgcggcacgcgccggtgattgccacgatgtgattgcaatactcttagaagcaccatattatcccagacatgttctttcaagcccttggagccctctctaaattcactgtcatcatttagtatctgtttaatttttcagtccaaagagaggaaatcagtcgctgagtattatttgactccggtctccttggtgcaaaaacaaaatgggaaaaataaataagaataactcagaaactcaaaaggaaaccacaaattcagctaataatagcatttcgagtatatttcgtaaactaaggaaatacacaaaaggctgttttttccgactgtaagagatatttgatgtccttttgccgaggtggatgtgttagtctcaggccctcctggaccacgttgcccaagtcacacaggcttctgtgttatgtatttagataagatgtgtgaaaatatatttgaataaaagaagttcataaatatgcattgatttttgtacagacaaatggcacctctcttaatttataaattgaactggatgtgaactaataatgtgcaactagttgagataagagggttacagatcattgtacatggaaaatattcccagcagtaaacacttccattaatgtgatctacggcttttgaaaaggagcatctcagaataagatggtggtacaatttgcttattaaaattgagaaagaaaaaaaaagacacactggagtatattagaaaggaaaaagaaggaatgtggtctctcatgattgaaagcatgatttagatcggatacggcttttgctaaccaaggaccaagggactctggcaagatggggtggttttccgaatgccagaccgaggtgccttacgaaggcagctgccaatggttctgtggcacagactggctcctgagaacccagacgaccttgacctggcagcccggccctccacgctagtacctcgcctgattttccatcgttgcggtatccagccgcttcagacgtccgccgccttcagtggtggtagtcaaatgtagtcaaccaaaccacagcatcccttaggttaaaagcaaacggggcagctttgcctagagctcattgacagtgtgatggggggagaagggttgtcacaatggaagatgaggacactagactcatgtagcacagaaacatgaagccacacgcaccggcagcctccggggtgttcctcgctctctcgtatgttaaaccttatattttataagagtttttcctcttatttcactttttaaaaaaaattaaagtaggtggggaaaaaaataaagctttacacagaatttatatgtgggtaagtgtttcatggaaatttctaatcttaacgaagctaagtggagctcactcgtatccaaaagtataacaggtgcagaagccacaagtctgagaaccttgacgacagttccatcgtcctgccatattgatttttcagtctgcgtttcatcactgtgtagctattgtaaatgtgaatagaaaaaaacaggtcattgcctatttttgaagaacgcgttggtgttcgagtccactagacacactcgctccacacagccttcaccgtagactctgtagtggacacagatatagcataaatgaaattgttaaattatttcattgtagttaattcccactataggaatgctttatcatagtgaagtttcttttgagaagaaacggaactccttgaggcttctctttgggatgtatatgagcgtgtacatattattctatgtgtttataatataatattttcccaaatg

SEQ ID NO: 299289 - DNA, 5393 bp, Homo sapiens
ggcgctcggagcgggctccgcggcttgcaaggcgcctgcgactcggtcccaggtcggcgggcggcgcgcggcgggctcgcgcgggggccccggcgcgccgggcggcgcagtacgcagcgcgcggacccacgccacggccaggagcccagagcagcgcggccacactgcccaggggtcggccctcggccccggcgctcggagcgcggcggctgcctgggctttaatggctgctccgcggagcagcgcctagggctggaaggcggctgcggctcaggaagtcacccgagcaagcctccttcggggccggccgcacccgccgcggcgcgctccatgggggcgcgctccccccgggcggcccgctgacccgggacgccggggcccgctcgctcgccggccgcgcgtcccggccatgaactgagcccgcgggccagccccgcgcctgctccgcccgcgcctttcttctcgcgcctcctccgcccgccgccggcgggcccggctccccgggggctgcggcgccccgggctcggcggcccgcgggccccggggcgcggggcggcggcggcggggggcgcgcggctccgggcgcggcgcctgcaccatgaactaccagcagcagctggccaactcggctgccatccgggccgagatccagcgcttcgagtcggtccaccccaacatctactccatctacgagctgctggagcgcgtggaggagccggtgctgcagaaccagatccgggagcacgtcatcgccatcgaagatgccttcgtgaacagccaggaatggacgctgagtcgatctgtcccggagctcaaagtgggaattgtgggtaacttggccagcggcaagtctgccctggtgcaccggtacctgacgggcacatatgtccaggaggagtctccggaaggtggcaggttcaagaaagagattgtcgttgatggacagagctatctgctgctgatcagagatgaagggggccccccggaggcgcagtttgccatgtgggtggacgctgttatatttgtcttcagcttggaggatgaaataagtttccagaccgtttaccactactacagtcgaatggccaactatcggaacacgagcgagattcctctggttctggtgggaacccaggatgccataagttctgctaacccgagggtcatcgatgacgccagggcgaggaagctctccaacgacctgaaacggtgcacgtactacgagacgtgtgctacatacgggctgaatgtggagagggtcttccaggacgttgcccagaagattgttgccacaaggaagaagcagcagctgtccataggaccctgcaagtcgctacctaattctcccagccattcctccgtctgttccgcgcaggtgtctgccgtgcacatcagccagacaagtaatggaggtgggagtttaagcgactattcctcctccgttccatcgactcccagcaccagccagaaggaacttcggatcgatgttcctcccactgccaacacgcccacgcccgttcgcaagcagtctaagcgccggtccaacctgttcacctctcggaaagggagcgacccagacaaagagaagaaaggcctggagagtcgtgcggacagcattgggagcggccgagccatcccaattaaacagggcatgctgttgaagcgaagtggcaaatcgttgaataaagagtggaaaaagaaatatgtcaccctgtgtgacaatggcgtgctgacctatcatcccagtttacatgattacatgcagaatgttcatggtaaggagattgaccttctgagaaccactgtgaaagtcccagggaagaggccaccccgagccacgtcagcctgcgcacccatctccagccctaaaaccaatggcctatccaaggacatgagcagtttacacatctcacccaattcagacacagggctgggtgactccgtatgctccagccccagtatctccagcaccaccagccccaagctcgacccgcccccctcccctcacgccaacagaaagaagcaccgaaggaagaaaagcactagcaacttcaaagccgacggcctgtccggcactgctgaagaacaagaagaaaattttgagtttatcattgtgtccctcactggccaaacatggcactttgaagccacgacgtatgaggagcgggacgcctgggtccaagccatcgagagccagatcctggccagcctgcagtcgtgcgagagcagcaagaacaagtcccggctgacgagccagagcgaggccatggccctgcagtcgatccggaacatgcgcgggaactcccactgtgtggactgcgagacccagaatcccaactgggccagtttgaacttgggagccctcatgtgcatcgaatgctcagggatccaccggaatcttggcacccacctttcccgagtccgatctctggacctggatgactggccaatcgagctcatcaaggtgatgtcatccatcgggaacgagctagccaacagcgtctgggaagagagcagccaggggcggacgaaaccatcggtagactccacaagggaagagaaggaacggtggatccgtgccaagtacgagcagaagctcttcctggccccgctgccctgcacggagctgtccctgggccagcacctgctgcgggccaccgccgacgaggacctgcggacggccatcctgctgctggcacacggctcccgggacgaggtgaacgagacctgcggggagggagacggccgcacggcgctgcatctggcctgccgcaaggggaatgtggtcctggcgcagctcctgatctggtacggagtggacgtcacggcccgagatgcccacgggaacacagctctggcctacgcccggcaggcctccagccaggagtgcatcgacgtgctgctgcagtacggctgccccgacgagcgcttcgtgctcatggccacccctaacctgtccaggagaaacaataaccggaacaacagcagtgggagggtgcccaccatcatctgaggaacagccgtgcccgcctgctcgccgcacctgggacgcggcagcctcgccgcattctcgctcagaagtcgcagcacgtgagtcccgtcgcatcccctccctcttcctggtggccacctccctcccgcccacccactctcaccccaaacaaaatcacaaaacctggacatccctcaaggggcgaagaggcggccgggagactgcagaagtggctccttttcataaactcccctaaaccacacacaggagagagcgacgggcctcggccctttgatgatagcacatggcgcaggacccttgtcctggtggcacaagggatggggacgcgagggggaggggaggcgaggaacaaggagaaggggcaactttccttaactggcagttgagcacatagtacatttcccctctaccaaacggaacacttggattccatctcttctctgaggagctcgacggcataaatcagaagcaagcacagagtttgtcaggtttgaagcccctatgatggtgtgtgtcaaatcagttgtagctaatctgtccagggagaatactggcttcattacacttgtacagccgagttcttcccgcattactgctgtttaatagaacgtgattagtcatcgccgagaagaaagcatattagccgaggaggtagtcacgcggcacgcgccggtgattgccacgatgtgattgcaatactcttagaagcaccatattatcccagacatgttctttcaagcccttggagccctctctaaattcactgtcatcatttagtatctgtttaatttttcagtccaaagagaggaaatcagtcgctgagtattatttgactccggtctccttggtgcaaaaacaaaatgggaaaaataaataagaataactcagaaactcaaaaggaaaccacaaattcagctaataatagcatttcgagtatatttcgtaaactaaggaaatacacaaaaggctgttttttccgactgtaagagatatttgatgtccttttgccgaggtggatgtgttagtctcaggccctcctggaccacgttgcccaagtcacacaggcttctgtgttatgtatttagataagatgtgtgaaaatatatttgaataaaagaagttcataaatatgcattgatttttgtacagacaaatggcacctctcttaatttataaattgaactggatgtgaactaataatgtgcaactagttgagataagagggttacagatcattgtacatggaaaatattcccagcagtaaacacttccattaatgtgatctacggcttttgaaaaggagcatctcagaataagatggtggtacaatttgcttattaaaattgagaaagaaaaaaaaagacacactggagtatattagaaaggaaaaagaaggaatgtggtctctcatgattgaaagcatgatttagatcggatacggcttttgctaaccaaggaccaagggactctggcaagatggggtggttttccgaatgccagaccgaggtgccttacgaaggcagctgccaatggttctgtggcacagactggctcctgagaacccagacgaccttgacctggcagcccggccctccacgctagtacctcgcctgattttccatcgttgcggtatccagccgcttcagacgtccgccgccttcagtggtggtagtcaaatgtagtcaaccaaaccacagcatcccttaggttaaaagcaaacggggcagctttgcctagagctcattgacagtgtgatggggggagaagggttgtcacaatggaagatgaggacactagactcatgtagcacagaaacatgaagccacacgcaccggcagcctccggggtgttcctcgctctctcgtatgttaaaccttatattttataagagtttttcctcttatttcactttttaaaaaaaattaaagtaggtggggaaaaaaataaagctttacacagaatttatatgtgggtaagtgtttcatggaaatttctaatcttaacgaagctaagtggagctcactcgtatccaaaagtataacaggtgcagatcagtctgcgtttcatcactgtgtagctattgtaaatgtgaatagaaaaaaacaggtcattgcctatttttgaagaacgcgttggtgttcgagtccactagacacactcgctccacacagccttcaccgtagactctgtagtggacacagatatagcataaatgaaattgttaaattatttcattgtagttaattcccactataggaatgctttatcatagtgaagtttcttttgagaagaaacggaactccttgaggcttctctttgggatgtatatgagcgtgtacatattattctatgtgtttataatataatattttcccaaatg

SEQ ID NO: 299290 - DNA, 5607 bp, Homo sapiens
ggcgctcggagcgggctccgcggcttgcaaggcgcctgcgactcggtcccaggtcggcgggcggcgcgcggcgggctcgcgcgggggccccggcgcgccgggcggcgcagtacgcagcgcgcggacccacgccacggccaggagcccagagcagcgcggccacactgcccaggggtcggccctcggccccggcgctcggagcgcggcggctgcctgggctttaatggctgctccgcggagcagcgcctagggctggaaggcggctgcggctcaggaagtcacccgagcaagcctccttcggggccggccgcacccgccgcggcgcgctccatgggggcgcgctccccccgggcggcccgctgacccgggacgccggggcccgctcgctcgccggccgcgcgtcccggccatgaactgagcccgcgggccagccccgcgcctgctccgcccgcgcctttcttctcgcgcctcctccgcccgccgccggcgggcccggctccccgggggctgcggcgccccgggctcggcggcccgcgggccccggggcgcggggcggcggcggcggggggcgcgcggctccgggcgcggcgcctgcaccatgaactaccagcagcagctggccaactcggctgccatccgggccgagatccagcgcttcgagtcggtccaccccaacatctactccatctacgagctgctggagcgcgtggaggagccggtgctgcagaaccagatccgggagcacgtcatcgccatcgaagatgccttcgtgaacagccaggaatggacgctgagtcgatctgtcccggagctcaaagtgggaattgtgggtaacttggccagcggcaagtctgccctggtgcaccggtacctgacgggcacatatgtccaggaggagtctccggaaggtggcaggttcaagaaagagattgtcgttgatggacagagctatctgctgctgatcagagatgaagggggccccccggaggcgcagtttgccatgtgggtggacgctgttatatttgtcttcagcttggaggatgaaataagtttccagaccgtttaccactactacagtcgaatggccaactatcggaacacgagcgagattcctctggttctggtgggaacccaggatgccataagttctgctaacccgagggtcatcgatgacgccagggcgaggaagctctccaacgacctgaaacggtgcacgtactacgagacgtgtgctacatacgggctgaatgtggagagggtcttccaggacgttgcccagaagattgttgccacaaggaagaagcagcagctgtccataggaccctgcaagtcgctacctaattctcccagccattcctccgtctgttccgcgcaggtgtctgccgtgcacatcagccagacaagtaatggaggtgggagtttaagcgactattcctcctccgttccatcgactcccagcaccagccagaaggaacttcggatcgatgttcctcccactgccaacacgcccacgcccgttcgcaagcagtctaagcgccggtccaacctgttcacctctcggaaagggagcgacccagacaaagagaagaaaggcctggagagtcgtgcggacagcattgggagcggccgagccatcccaattaaacagggcatgctgttgaagcgaagtggcaaatcgttgaataaagagtggaaaaagaaatatgtcaccctgtgtgacaatggcgtgctgacctatcatcccagtttacatgattacatgcagaatgttcatggtaaggagattgaccttctgagaaccactgtgaaagtcccagggaagaggccaccccgagccacgtcagcctgcgcacccatctccagccctaaaaccaatggcctatccaaggacatgagcagtttacacatctcacccaattcagggaatgtcactagtgcatctgggtctcagatggcaagcggcatcagcctggtctccttcaacagccgacccgacggcatgcaccagcgctcctactcagtctccagtgccgaccagtggagtgaggctacggtcattgcaaactcggccatcagcagtgacacagggctgggtgactccgtatgctccagccccagtatctccagcaccaccagccccaagctcgacccgcccccctcccctcacgccaacagaaagaagcaccgaaggaagaaaagcactagcaacttcaaagccgacggcctgtccggcactgctgaagaacaagaagaaaattttgagtttatcattgtgtccctcactggccaaacatggcactttgaagccacgacgtatgaggagcgggacgcctgggtccaagccatcgagagccagatcctggccagcctgcagtcgtgcgagagcagcaagaacaagtcccggctgacgagccagagcgaggccatggccctgcagtcgatccggaacatgcgcgggaactcccactgtgtggactgcgagacccagaatcccaactgggccagtttgaacttgggagccctcatgtgcatcgaatgctcagggatccaccggaatcttggcacccacctttcccgagtccgatctctggacctggatgactggccaatcgagctcatcaaggtgatgtcatccatcgggaacgagctagccaacagcgtctgggaagagagcagccaggggcggacgaaaccatcggtagactccacaagggaagagaaggaacggtggatccgtgccaagtacgagcagaagctcttcctggccccgctgccctgcacggagctgtccctgggccagcacctgctgcgggccaccgccgacgaggacctgcggacggccatcctgctgctggcacacggctcccgggacgaggtgaacgagacctgcggggagggagacggccgcacggcgctgcatctggcctgccgcaaggggaatgtggtcctggcgcagctcctgatctggtacggagtggacgtcacggcccgagatgcccacgggaacacagctctggcctacgcccggcaggcctccagccaggagtgcatcgacgtgctgctgcagtacggctgccccgacgagcgcttcgtgctcatggccacccctaacctgtccaggagaaacaataaccggaacaacagcagtgggagggtgcccaccatcatctgaggaacagccgtgcccgcctgctcgccgcacctgggacgcggcagcctcgccgcattctcgctcagaagtcgcagcacgtgagtcccgtcgcatcccctccctcttcctggtggccacctccctcccgcccacccactctcaccccaaacaaaatcacaaaacctggacatccctcaaggggcgaagaggcggccgggagactgcagaagtggctccttttcataaactcccctaaaccacacacaggagagagcgacgggcctcggccctttgatgatagcacatggcgcaggacccttgtcctggtggcacaagggatggggacgcgagggggaggggaggcgaggaacaaggagaaggggcaactttccttaactggcagttgagcacatagtacatttcccctctaccaaacggaacacttggattccatctcttctctgaggagctcgacggcataaatcagaagcaagcacagagtttgtcaggtttgaagcccctatgatggtgtgtgtcaaatcagttgtagctaatctgtccagggagaatactggcttcattacacttgtacagccgagttcttcccgcattactgctgtttaatagaacgtgattagtcatcgccgagaagaaagcatattagccgaggaggtagtcacgcggcacgcgccggtgattgccacgatgtgattgcaatactcttagaagcaccatattatcccagacatgttctttcaagcccttggagccctctctaaattcactgtcatcatttagtatctgtttaatttttcagtccaaagagaggaaatcagtcgctgagtattatttgactccggtctccttggtgcaaaaacaaaatgggaaaaataaataagaataactcagaaactcaaaaggaaaccacaaattcagctaataatagcatttcgagtatatttcgtaaactaaggaaatacacaaaaggctgttttttccgactgtaagagatatttgatgtccttttgccgaggtggatgtgttagtctcaggccctcctggaccacgttgcccaagtcacacaggcttctgtgttatgtatttagataagatgtgtgaaaatatatttgaataaaagaagttcataaatatgcattgatttttgtacagacaaatggcacctctcttaatttataaattgaactggatgtgaactaataatgtgcaactagttgagataagagggttacagatcattgtacatggaaaatattcccagcagtaaacacttccattaatgtgatctacggcttttgaaaaggagcatctcagaataagatggtggtacaatttgcttattaaaattgagaaagaaaaaaaaagacacactggagtatattagaaaggaaaaagaaggaatgtggtctctcatgattgaaagcatgatttagatcggatacggcttttgctaaccaaggaccaagggactctggcaagatggggtggttttccgaatgccagaccgaggtgccttacgaaggcagctgccaatggttctgtggcacagactggctcctgagaacccagacgaccttgacctggcagcccggccctccacgctagtacctcgcctgattttccatcgttgcggtatccagccgcttcagacgtccgccgccttcagtggtggtagtcaaatgtagtcaaccaaaccacagcatcccttaggttaaaagcaaacggggcagctttgcctagagctcattgacagtgtgatggggggagaagggttgtcacaatggaagatgaggacactagactcatgtagcacagaaacatgaagccacacgcaccggcagcctccggggtgttcctcgctctctcgtatgttaaaccttatattttataagagtttttcctcttatttcactttttaaaaaaaattaaagtaggtggggaaaaaaataaagctttacacagaatttatatgtgggtaagtgtttcatggaaatttctaatcttaacgaagctaagtggagctcactcgtatccaaaagtataacaggtgcagaagccacaagtctgagaaccttgacgacagttccatcgtcctgccatattgatttttcagtctgcgtttcatcactgtgtagctattgtaaatgtgaatagaaaaaaacaggtcattgcctatttttgaagaacgcgttggtgttcgagtccactagacacactcgctccacacagccttcaccgtagactctgtagtggacacagatatagcataaatgaaattgttaaattatttcattgtagttaattcccactataggaatgctttatcatagtgaagtttcttttgagaagaaacggaactccttgaggcttctctttgggatgtatatgagcgtgtacatattattctatgtgtttataatataatattttcccaaatg

SEQ ID NO: 299291 - DNA, 3955 bp, Homo sapiens
cttttccacagggcagtgccattcctaggggaagtgaggtcagcacgccattgtcacccctgtgtgacaatggcgtgctgacctatcatcccagtttacatgattacatgcagaatgttcatggtaaggagattgaccttctgagaaccactgtgaaagtcccagggaagaggccaccccgagccacgtcagcctgcgcacccatctccagccctaaaaccaatggcctatccaaggacatgagcagtttacacatctcacccaattcagggaatgtcactagtgcatctgggtctcagatggcaagcggcatcagcctggtctccttcaacagccgacccgacggcatgcaccagcgctcctactcagtctccagtgccgaccagtggagtgaggctacggtcattgcaaactcggccatcagcagtgacacagggctgggtgactccgtatgctccagccccagtatctccagcaccaccagccccaagctcgacccgcccccctcccctcacgccaacagaaagaagcaccgaaggaagaaaagcactagcaacttcaaagccgacggcctgtccggcactgctgaagaacaagaagaaaattttgagtttatcattgtgtccctcactggccaaacatggcactttgaagccacgacgtatgaggagcgggacgcctgggtccaagccatcgagagccagatcctggccagcctgcagtcgtgcgagagcagcaagaacaagtcccggctgacgagccagagcgaggccatggccctgcagtcgatccggaacatgcgcgggaactcccactgtgtggactgcgagacccagaatcccaactgggccagtttgaacttgggagccctcatgtgcatcgaatgctcagggatccaccggaatcttggcacccacctttcccgagtccgatctctggacctggatgactggccaatcgagctcatcaaggtgatgtcatccatcgggaacgagctagccaacagcgtctgggaagagagcagccaggggcggacgaaaccatcggtagactccacaagggaagagaaggaacggtggatccgtgccaagtacgagcagaagctcttcctggccccgctgccctgcacggagctgtccctgggccagcacctgctgcgggccaccgccgacgaggacctgcggacggccatcctgctgctggcacacggctcccgggacgaggtgaacgagacctgcggggagggagacggccgcacggcgctgcatctggcctgccgcaaggggaatgtggtcctggcgcagctcctgatctggtacggagtggacgtcacggcccgagatgcccacgggaacacagctctggcctacgcccggcaggcctccagccaggagtgcatcgacgtgctgctgcagtacggctgccccgacgagcgcttcgtgctcatggccacccctaacctgtccaggagaaacaataaccggaacaacagcagtgggagggtgcccaccatcatctgaggaacagccgtgcccgcctgctcgccgcacctgggacgcggcagcctcgccgcattctcgctcagaagtcgcagcacgtgagtcccgtcgcatcccctccctcttcctggtggccacctccctcccgcccacccactctcaccccaaacaaaatcacaaaacctggacatccctcaaggggcgaagaggcggccgggagactgcagaagtggctccttttcataaactcccctaaaccacacacaggagagagcgacgggcctcggccctttgatgatagcacatggcgcaggacccttgtcctggtggcacaagggatggggacgcgagggggaggggaggcgaggaacaaggagaaggggcaactttccttaactggcagttgagcacatagtacatttcccctctaccaaacggaacacttggattccatctcttctctgaggagctcgacggcataaatcagaagcaagcacagagtttgtcaggtttgaagcccctatgatggtgtgtgtcaaatcagttgtagctaatctgtccagggagaatactggcttcattacacttgtacagccgagttcttcccgcattactgctgtttaatagaacgtgattagtcatcgccgagaagaaagcatattagccgaggaggtagtcacgcggcacgcgccggtgattgccacgatgtgattgcaatactcttagaagcaccatattatcccagacatgttctttcaagcccttggagccctctctaaattcactgtcatcatttagtatctgtttaatttttcagtccaaagagaggaaatcagtcgctgagtattatttgactccggtctccttggtgcaaaaacaaaatgggaaaaataaataagaataactcagaaactcaaaaggaaaccacaaattcagctaataatagcatttcgagtatatttcgtaaactaaggaaatacacaaaaggctgttttttccgactgtaagagatatttgatgtccttttgccgaggtggatgtgttagtctcaggccctcctggaccacgttgcccaagtcacacaggcttctgtgttatgtatttagataagatgtgtgaaaatatatttgaataaaagaagttcataaatatgcattgatttttgtacagacaaatggcacctctcttaatttataaattgaactggatgtgaactaataatgtgcaactagttgagataagagggttacagatcattgtacatggaaaatattcccagcagtaaacacttccattaatgtgatctacggcttttgaaaaggagcatctcagaataagatggtggtacaatttgcttattaaaattgagaaagaaaaaaaaagacacactggagtatattagaaaggaaaaagaaggaatgtggtctctcatgattgaaagcatgatttagatcggatacggcttttgctaaccaaggaccaagggactctggcaagatggggtggttttccgaatgccagaccgaggtgccttacgaaggcagctgccaatggttctgtggcacagactggctcctgagaacccagacgaccttgacctggcagcccggccctccacgctagtacctcgcctgattttccatcgttgcggtatccagccgcttcagacgtccgccgccttcagtggtggtagtcaaatgtagtcaaccaaaccacagcatcccttaggttaaaagcaaacggggcagctttgcctagagctcattgacagtgtgatggggggagaagggttgtcacaatggaagatgaggacactagactcatgtagcacagaaacatgaagccacacgcaccggcagcctccggggtgttcctcgctctctcgtatgttaaaccttatattttataagagtttttcctcttatttcactttttaaaaaaaattaaagtaggtggggaaaaaaataaagctttacacagaatttatatgtgggtaagtgtttcatggaaatttctaatcttaacgaagctaagtggagctcactcgtatccaaaagtataacaggtgcagaagccacaagtctgagaaccttgacgacagttccatcgtcctgccatattgatttttcagtctgcgtttcatcactgtgtagctattgtaaatgtgaatagaaaaaaacaggtcattgcctatttttgaagaacgcgttggtgttcgagtccactagacacactcgctccacacagccttcaccgtagactctgtagtggacacagatatagcataaatgaaattgttaaattatttcattgtagttaattcccactataggaatgctttatcatagtgaagtttcttttgagaagaaacggaactccttgaggcttctctttgggatgtatatgagcgtgtacatattattctatgtgtttataatataatattttcccaaatg

SEQ ID NO: 299292 - DNA, 3229 bp, Homo sapiens
ggcgctcggagcgggctccgcggcttgcaaggcgcctgcgactcggtcccaggtcggcgggcggcgcgcggcgggctcgcgcgggggccccggcgcgccgggcggcgcagtacgcagcgcgcggacccacgccacggccaggagcccagagcagcgcggccacactgcccaggggtcggccctcggccccggcgctcggagcgcggcggctgcctgggctttaatggctgctccgcggagcagcgcctagggctggaaggcggctgcggctcaggaagtcacccgagcaagcctccttcggggccggccgcacccgccgcggcgcgctccatgggggcgcgctccccccgggcggcccgctgacccgggacgccggggcccgctcgctcgccggccgcgcgtcccggccatgaactgagcccgcgggccagccccgcgcctgctccgcccgcgcctttcttctcgcgcctcctccgcccgccgccggcgggcccggctccccgggggctgcggcgccccgggctcggcggcccgcgggccccggggcgcggggcggcggcggcggggggcgcgcggctccgggcgcggcgcctgcaccatgaactaccagcagcagctggccaactcggctgccatccgggccgagatccagcgcttcgagtcggtccaccccaacatctactccatctacgagctgctggagcgcgtggaggagccggtgctgcagaaccagatccgggagcacgtcatcgccatcgaagatgccttcgtgaacagccaggaatggacgctgagtcgatctgtcccggagctcaaagtgggaattgtgggtaacttggccagcggcaagtctgccctggtgcaccggtacctgacgggcacatatgtccaggaggagtctccggaaggtggcaggttcaagaaagagattgtcgttgatggacagagctatctgctgctgatcagagatgaagggggccccccggaggcgcagtttgccatgtgggtggacgctgttatatttgtcttcagcttggaggatgaaataagtttccagaccgtttaccactactacagtcgaatggccaactatcggaacacgagcgagattcctctggttctggtgggaacccaggatgccataagttctgctaacccgagggtcatcgatgacgccagggcgaggaagctctccaacgacctgaaacggtgcacgtactacgagacgtgtgctacatacgggctgaatgtggagagggtcttccaggacgttgcccagaagattgttgccacaaggaagaagcagcagctgtccataggaccctgcaagtcgctacctaattctcccagccattcctccgtctgttccgcgcaggtgtctgccgtgcacatcagccagacaagtaatggaggtgggagtttaagcgactattcctcctccgttccatcgactcccagcaccagccagaaggaacttcggatcgatgttcctcccactgccaacacgcccacgcccgttcgcaagcagtctaagcgccggtccaacctgttcacctctcggaaagggagcgacccagacaaagagaagaaaggcctggagagtcgtgcggacagcattgggagcggccgagccatcccaattaaacagggcatgctgttgaagcgaagtggcaaatcgttgaataaagagtggaaaaagaaatatgtcaccctgtgtgacaatggcgtgctgacctatcatcccagtttacatgattacatgcagaatgttcatggtaaggagattgaccttctgagaaccactgtgaaagtcccagggaagaggccaccccgagccacgtcagcctgcgcacccatctccagccctaaaaccaatggcctatccaaggacatgagcagtttacacatctcacccaattcagggaatgtcactagtgcatctgggtctcagatggcaagcggcatcagcctggtctccttcaacagccgacccgacggcatgcaccagcgctcctactcagtctccagtgccgaccagtggagtgaggctacggtcattgcaaactcggccatcagcagtgacacagggctgggtgactccgtatgctccagccccagtatctccagcaccaccagccccaagctcgacccgcccccctcccctcacgccaacagaaagaagcaccgaaggaagaaaagcactagcaacttcaaagccgacggcctgtccggcactgctgaagaacaagaagaaaattttgagtttatcattgtgtccctcactggccaaacatggcactttgaagccacgacgtatgaggagcgggacgcctgggtccaagccatcgagagccagatcctggccagcctgcagtcgtgcgagagcagcaagaacaagtcccggctgacgagccagagcgaggccatggccctgcagtcgatccggaacatgcgcgggaactcccactgtgtggactgcgagacccagaatcccaactgggccagtttgaacttgggagccctcatgtgcatcgaatgctcagggatccaccggaatcttggcacccacctttcccgagtccgatctctggacctggatgactggccaatcgagctcatcaaggtgatgtcatccatcgggaacgagctagccaacagcgtctgggaagagagcagccaggggcggacgaaaccatcggtagactccacaaggtaggaactttggaagatgcctggctcccgacacgtttgccaacagttaggcaactggaagtgatcataatgacagccacggttgggaaggccctgataacctgtaggaattcgggaattccgattcatccggcataggaatgtctgtgtttaaagttggtcttgagcagacgtggataattcacactccttaattttttatgtttgtttttaggcctggggatttctctcccccctcttagaaatgtattaagcttctaaccttatgaatatattactttaattaatacatttctaataggcataagctgtgccgttaacactaattatgaatttttgatcctttaattttgttattcttatagcttggataagcatctgctctgtcgatcccccccccgcaccatcacacaaaagttatttttatggtaacaaaatctattttattttctaaaatatatctcaacacatttagtcaaccaagttcagcataatgtatgatgtaactcctcattaa

SEQ ID NO: 299293 - DNA, 2003 bp, Homo sapiens
  misc_feature (2001)..(2001): n is a, c, g, or t
  misc_feature (2003)..(2003): n is a, c, g, or t
ggcgctcggagcgggctccgcggcttgcaaggcgcctgcgactcggtcccaggtcggcgggcggcgcgcggcgggctcgcgcgggggccccggcgcgccgggcggcgcagtacgcagcgcgcggacccacgccacggccaggagcccagagcagcgcggccacactgcccaggggtcggccctcggccccggcgctcggagcgcggcggctgcctgggctttaatggctgctccgcggagcagcgcctagggctggaaggcggctgcggctcaggaagtcacccgagcaagcctccttcggggccggccgcacccgccgcggcgcgctccatgggggcgcgctccccccgggcggcccgctgacccgggacgccggggcccgctcgctcgccggccgcgcgtcccggccatgaactgagcccgcgggccagccccgcgcctgctccgcccgcgcctttcttctcgcgcctcctccgcccgccgccggcgggcccggctccccgggggctgcggcgccccgggctcggcggcccgcgggccccggggcgcggggcggcggcggcggggggcgcgcggctccgggcgcggcgcctgcaccatgaactaccagcagcagctggccaactcggctgccatccgggccgagatccagcgcttcgagtcggtccaccccaacatctactccatctacgagctgctggagcgcgtggaggagccggtgctgcagaaccagatccgggagcacgtcatcgccatcgaagatgccttcgtgaacagccaggaatggacgctgagtcgatctgtcccggagctcaaagtgggaattgtgggtaacttggccagcggcaagtctgccctggtgcaccggtacctgacgggcacatatgtccaggaggagtctccggaaggtggcaggttcaagaaagagattgtcgttgatggacagagctatctgctgctgatcagagatgaagggggccccccggaggcgcagtttgccatgtgggtggacgctgttatatttgtcttcagcttggaggatgaaataagtttccagaccgtttaccactactacagtcgaatggccaactatcggaacacgagcgagattcctctggttctggtgggaacccaggatgccataagttctgctaacccgagggtcatcgatgacgccagggcgaggaagctctccaacgacctgaaacggtgcacgtactacgagacgtgtgctacatacgggctgaatgtggagagggtcttccaggacgttgcccagaagattgttgccacaaggaagaagcagcagctgtccataggaccctgcaagtcgctacctaattctcccagccattcctccgtctgttccgcgcaggtgtctgccgtgcacatcagccagacaagtaatggaggtgggagtttaagcgactattcctcctccgttccatcgactcccagcaccagccagaaggaacttcggatcgatgttcctcccactgccaacacgcccacgcccgttcgcaagcagtctaagcgccggtccaacctgttcacctctcggaaagggagcgacccagacaaagagaagaaaggcctggagagtcgtgcggacagcattgggagcggccgagccatcccaattaaacagggcatgctgttgaagcgaagtggcaaatcgttgaataaagagtggaaaaagaaatatgtcaccctgtgtgacaatggcgtgctgacctatcatcccagtttacatgacactgccggatgtcatggtacgagatggccttctgggacactgggaaggtccagaagaggcacgagcactttactgggcacctttcagagctaaacatgcgcttcgctgttctctattttaatcctggaggcaagctcggtcaaggaggaccgtctaaggcgaggacagctaaccagtggagggggggaagcacaaggggtgcgcgccaacagcccaaagaagcgggtcgggagtgttgccgcggngn

SEQ ID NO: 299294 - DNA, 186 bp, Homo sapiens
cactgtgccgttactttttggtcttctgttccagatgccataagttctgctaacccgagggtcatcgatgacgccagggcgaggaagctctccaacgacctgaaacggtgcacgtactacgagacgtgtgctacatacgggctgaatgtggagagggtcttccaggacggtaaatgcgcgtggctg

SEQ ID NO: 299295 - DNA, 597 bp, Homo sapiens
cctgcccagcagcttaagtcctaaaacttccctggactaagcttaccctaggttctttcccaccttccccttctgactgccccagggagtggccaaacccaggggccaggctcacaaaaccatgaaggatttctaaagacactttagatgctcttaatgaaatataaagtgtgctcccaggatacaaatacaggacaggaattactgaggaccggtaaatctaatacttccctccctgacatcacttgtagttccaggccagcaaaagtctgacaatgtgcttaagccaaattcagaagtgtagctgaggccgggcacggtggctcacatttgtaatcccagcatcttcggaggccaaagggagtggaatacttgaggcaggagttaccagcctgaccaacatgatgaaaactcatatctactaaaaatacaaaaatgcatcaggtgtggtagtgtgactgtaatcccagctacttgggacgctgaggcatgagaattgcttgaacccgggagagggaggttgcagtgagctgagaccatgccactgcaatccagcctgggtaacagagtgacactctgtctttcaaaaaaaaaaaa

SEQ ID NO: 299296 - DNA, 177 bp, Homo sapiens
tgccgagcagagactggtttggaggggaggtgaccacatgaagaatccataaaatcctgactgagtatccccctctgtgacagacctgaagtggggaactgagaaacaacagagcccccacaaggagtgcaccttccagccttgaagaaagtggggaacagtgggcggggcacgaca

SEQ ID NO: 299297 - DNA, 821 bp, Homo sapiens
  misc_feature (475)..(475): n is a, c, g, or t
  misc_feature (785)..(785): n is a, c, g, or t
aaggaaaataaaggagacttgaaatttttgaactaaatagtggtgatggctacacattgtgaatgtaattaacaccactgagttaaacacttaaaatggttaaaatggcaaattgtatgttatacctattttactacaataaaaagtataaaaaagagaagatatttaggtgacttacagcaaccaattgcaacaaaacaaaatgttaagaaatgatctttttatgaggcaattggaaatttgaacactgatcaactataggatgattggaattattaatttttaaaggtgtgataagatactgcacttggctgggcacagtggcacatgcctgtaatcccagctaacagtcggcacgactctaaagcgtcgtgcgaggcaattcgacgtgggagtctctatggcgtttcgacgactcccccactgagtctacgatgtacgaagagtctcccagtcgtataccacccagctcttncaggatcttcactaattaatagagtatctgcaccacgcgacagtaagctgcccaaactcgtgagtcagcagctactattacgtgcgaacacaaggtacgcgtaaagatctacggagagaatcgagagtatggcaatgacccaagtctgcgccgaaacatggagcacaatgtaccgctctggcgacagcagagcagatagcgaagaacacgagcatgtagcaactagtggacacacgcacgagagtatgaccggacaccagtcgagagcgacttgaggtacacgagcagtatgactggacagacctatganatacgtgcctggtcctgaaacacatgggaagcttac

SEQ ID NO: 299298 - DNA, 4045 bp, Homo sapiens
tccgggcttgcggccgggcggcgcagaggcgcggaggctccccgggcggctgcatcccggggctgccccggacatgccccgcaccccttgtcggacgcccgcgccgcttcaccggctgccactccccggagtgctctgggactagagcgccctccgccccaacttctgactttggggtcccccagccctagaggaacgggcgcccggctgggggagccccgggcatggtgtgacggggcagtcaggtcagctttgcggcgcccccaaactccagccacccgtcgtctccgtgccctccagaatgtagctgctgaccccgcgccccccggactccagcagcagtctccgccacctccgggctccagcagccaactcttgtgtctctcaggaacccgccgacgtctccgcgtcccccggattccaggttcgcgacccccgccgtcttcgcgcctccgggactctagcagcggtctccgcgaccccctaggatccagccactgtacccgtgctccccaaacccaggctccagccgtcgtctccgcgctcccggggatccagctgtcgcgccagtacccgcgaggacagcggcaccgcccacaccccgcgcgctcagagcccggccgggcctcggcgtggagatgaacgcgccgctggacggcctgtcggtgagctcgtcctccaccggctcgctgggctcggcggccggggcgggcggcggcgggggcgcggggctgcggttactgtctgccaacgtgcgccagctgcaccaagcgctgaccgcgctgctgagcgaggcggagcgggagcagttcacccactgcctgaacgcttaccacgcgcgccgcaacgtcttcgacctggtgcgcaccctgcgcgtgctgctggacagtccggtcaagcggcgcctgctgcccatgcttcgtctggtcatcccgcgctccgaccagctgctcttcgaccaatacacggccgagggcctctacctgcccgccaccaccccctacaggcagcccgcctggggcggccccgacagcgcggggccaggggaggtgcgcctggtgagtttgcggcgtgccaaggcccacgagggcttgggcttcagcatccgtgggggctcggagcacggcgtgggcatctacgtgtctctggtggaaccaggctctctagctgagaaggaaggactgcgggtcggggaccagattctgcgcgtcaacgacaaatccctggcccgggtgacccacgcggaggccgtcaaggctctgaagggctccaagaagctggtgctgtctgtgtactcagcagggcgcatccctgggggctacgtcaccaaccacatctacacctgggtggacccgcagggccgcagcatctccccaccctcgggcctgccccagccccacggtggtgccctgaggcagcaggagggtgaccggaggagcaccctgcacctcctgcaaggaggggatgagaaaaaggtgaacctggtgctgggggacggccggtccctgggcctcacgatccgtgggggagctgagtacggccttggcatttacatcactggcgtggacccaggctctgaagcagaaggcagcgggctcaaggttggggaccagattctagaagtgaatgggcggagctttctcaacatcctacacgacgaggctgtcaggctgcttaagtcatctcggcacctcatcctgacagtgaaggacgtcgggaggctgccccatgcccgcaccattgtggacgagaccaagtggatcgccagttcccggatcagggagaccatggcgaactcggcagggtttcttggcgatctcacaacagaaggaataaacaagccaggattttacaagggcccagccggctcccaggtgaccctgagcagcctggggaaccagacacgagtgctgctggaggagcaggctcggcacctgctgaacgagcaggaacacgccaccatggcctactacctggatgagtaccgtggcggcagcgtctctgtggaggccctcgtcatggccctgttcaagctgctcaacacccacgccaagttctcactcctctctgaggtgagaggcaccatttccccgcaagacctagaacgcttcgaccacctggtgctgaggcgtgagattgagtccatgaaggcgcggcagcccccaggccccggggctggggacacctactccatggtctcctacagtgacacgggttcatccacaggcagccacggcacctccaccaccgtcagctcggccaggaacactctggacctggaggaaactggcgaggctgtccagggcaatatcaacgccctcccagatgtgtccgtggatgatgtcagatccacctcccaggggctgtcaagcttcaagccactgcctcgcccaccacctctggcccaaggcaacgacctcccactaggccagccaaggaagctggggagagaggacctccagccaccttcctccatgccttcctgctcgggcactgtcttctcggctccacagaaccgcagcccgccagcgggcaccgcacccaccccagggacctcctctgcacaggacttgccctcttcccccatctatgcctccgtctcccctgccaaccccagctccaagaggccgctggacgcccatctggccctggtcaaccaacaccccatcggccccttcccacgggtccagtcacccccgcacctgaaaagcccctctgcagaggccacagtggctgggggctgccttctgcccccatcaccctctggccacccagaccagacaggcacaaaccagcactttgtcatggtggaggtccaccgccccgacagcgagccagacgtcaatgaagtgagggcgctgccccagacgcgcacagcctctacgctctcccagctctcggacagcgggcagactctaagcgaggacagtggtgtggatgctggcgaggcagaggccagcgccccaggccgaggaaggcagtcggtgtccaccaagagcaggagtagcaaggagctgcctcggaacgagaggcccacagatggggccaacaaaccgcctggacttctggagcccacgtccactctggtccgtgtgaagaaaagtgcggccaccctgggcatcgccatcgagggtggcgccaacacccgccagcccctgcctaggattgtcactattcagagaggcggctcagctcacaactgtgggcagctcaaggtgggccacgtgattctggaagtgaatgggctgacgcttcggggcaaggagcaccgggaggccgcccgcattatcgccgaggccttcaagactaaggaccgtgactacattgactttctggtcactgagttcaatgtgatgctctagaggccaaggcctgagggcctcccaccactgcccagcccctggtcccagtccctttccaccgttggcttcatcaagctccttgcggggttggggctgcatggccagggtggcaggaagacatcccccctccatcccagcccactggaccagaactgggagaggaagagagcaggacaaggcagacagaaggtcaggtcaggaactggtgctgtactgggtacacagtaggcgcccaggacaagtgggttgcaagacaggaagaaaggaaaaggaagggcagagtgctggtttctccaggttgggttgggggcactgctgtcccccctccagctaggacccagcccatccccagatgcctgagcctttgtccaaagtgaggtcactcgagaattcatggacacggcccccagtcagggggcatcttgcaagacctttagtgccacaaataagcatcgagcacctccccattcacacccccattcctcctggctccttatcccccatggtgtttattatttatttccctccccatgcccctggggaccccaaggccccagcttccctctgcacccccagcctatcccagaggccttgcaggtgaccagcagtgtcattgtatttatatacagagcttatgactttaatttttcaataaagaaatctgaacaaggttaaaaaaaagc

SEQ ID NO: 299299 - DNA, 2776 bp, Homo sapiens
tagtattaaacattttcaaagttacttgccaacatctagaaagataccaggttttctataaaaaagaaaactggatttctggatgcttcttaaaaatcaggaagtctggcagcctgagcccacatcggctggagctgagccgcacctgcgagttgcatctgggatctccagttcaccggcccctaagctcctgagggttggcctgaccctgaggttgcctgtcaatcaccatttcttccctccactccttgtgttacctgcctggtcctgcggggttggcaacaactcaggagcccacctcgggtggttttggaggtgccgtgcacactgctgattgggaggctggacgctgccagtctgtccggagtttcctttacccctgagtagcccccagactgaactggcagcgagtggaggccacgatgcatggttctcttgaagctttgctcttcctgccccaagtcaccctgtcccttgcccacgcccatttgatctgctcaaatgcacaactggagatgtgtgtctttccccacaggtttcttggcgatctcacaacagaaggaataaacaagccaggattttacaagggcccagccggctcccaggtgaccctgagcagcctggggaaccagacacgagtgctgctggaggagcaggctcggcacctgctgaacgagcaggaacacgccaccatggcctactacctggatgagtaccgtggcggcagcgtctctgtggaggccctcgtcatggccctgttcaagctgctcaacacccacgccaagttctcactcctctctgaggtgagaggcaccatttccccgcaagacctagaacgcttcgaccacctggtgctgaggcgtgagattgagtccatgaaggcgcggcagcccccaggccccggggctggggacacctactccatggtctcctacagtgacacgggttcatccacaggcagccacggcacctccaccaccgtcagctcggccaggaacactctggacctggaggaaactggcgaggctgtccagggcaatatcaacgccctcccagatgtgtccgtggatgatgtcagatccacctcccaggggctgtcaagcttcaagccactgcctcgcccaccacctctggcccaaggcaacgacctcccactaggccagccaaggaagctggggagagaggacctccagccaccttcctccatgccttcctgctcgggcactgtcttctcggctccacagaaccgcagcccgccagcgggcaccgcacccaccccagggacctcctctgcacaggacttgccctcttcccccatctatgcctccgtctcccctgccaaccccagctccaagaggccgctggacgcccatctggccctggtcaaccaacaccccatcggccccttcccacgggtccagtcacccccgcacctgaaaagcccctctgcagaggccacagtggctgggggctgccttctgcccccatcaccctctggccacccagaccagacaggcacaaaccagcactttgtcatggtggaggtccaccgccccgacagcgagccagacgtcaatgaagtgagggcgctgccccagacgcgcacagcctctacgctctcccagctctcggacagcgggcagactctaagcgaggacagtggtgtggatgctggcgaggcagaggccagcgccccaggccgaggaaggcagtcggtgtccaccaagagcaggagtagcaaggagctgcctcggaacgagaggcccacagatggggccaacaaaccgcctggacttctggagcccacgtccactctggtccgtgtgaagaaaagtgcggccaccctgggcatcgccatcgagggtggcgccaacacccgccagcccctgcctaggattgtcactattcagagaggcggctcagctcacaactgtgggcagctcaaggtgggccacgtgattctggaagtgaatgggctgacgcttcggggcaaggagcaccgggaggccgcccgcattatcgccgaggccttcaagactaaggaccgtgactacattgactttctggtcactgagttcaatgtgatgctctagaggccaaggcctgagggcctcccaccactgcccagcccctggtcccagtccctttccaccgttggcttcatcaagctccttgcggggttggggctgcatggccagggtggcaggaagacatcccccctccatcccagcccactggaccagaactgggagaggaagagagcaggacaaggcagacagaaggtcaggtcaggaactggtgctgtactgggtacacagtaggcgcccaggacaagtgggttgcaagacaggaagaaaggaaaaggaagggcagagtgctggtttctccaggttgggttgggggcactgctgtcccccctccagctaggacccagcccatccccagatgcctgagcctttgtccaaagtgaggtcactcgagaattcatggacacggcccccagtcagggggcatcttgcaagacctttagtgccacaaataagcatcgagcacctccccattcacacccccattcctcctggctccttatcccccatggtgtttattatttatttccctccccatgcccctggggaccccaaggccccagcttccctctgcacccccagcctatcccagaggccttgcaggtgaccagcagtgtcattgtatttatatacagagcttatgactttaatttttcaataaagaaatctgaacaaggttaaaaaaaagc

SEQ ID NO: 299300 - DNA, 2856 bp, Homo sapiens
gaaactcctaggcagcagaggcccacgactacttcctcctgagtgccgttcagtggcctgtgtccaggctctgaagggctccaagaagctggtgctgtctgtgtactcagcagggcgcatccctgggggctacgtcaccaaccacatctacacctgggtggacccgcagggccgcagcatctccccaccctcgggcctgccccagccccacggtggtgccctgaggcagcaggagggtgaccggaggagcaccctgcacctcctgcaaggaggggatgagaaaaaggtgaacctggtgctgggggacggccggtccctgggcctcacgatccgtgggggagctgagtacggccttggcatttacatcactggcgtggacccaggctctgaagcagaaggcagcgggctcaaggttggggaccagattctagaagtgaatgggcggagctttctcaacatcctacacgacgaggctgtcaggctgcttaagtcatctcggcacctcatcctgacagtgaaggacgtcgggaggctgccccatgcccgcaccattgtggacgagaccaagtggatcgccagttcccggatcagggagaccatggcgaactcggcagggtttcttggcgatctcacaacagaaggaataaacaagccaggattttacaagggcccagccggctcccaggtgaccctgagcagcctggggaaccagacacgagtgctgctggaggagcaggctcggcacctgctgaacgagcaggaacacgccaccatggcctactacctggatgagtaccgtggcggcagcgtctctgtggaggccctcgtcatggccctgttcaagctgctcaacacccacgccaagttctcactcctctctgaggtgagaggcaccatttccccgcaagacctagaacgcttcgaccacctggtgctgaggcgtgagattgagtccatgaaggcgcggcagcccccaggccccggggctggggacacctactccatggtctcctacagtgacacgggttcatccacaggcagccacggcacctccaccaccgtcagctcggccaggaacactctggacctggaggaaactggcgaggctgtccagggcaatatcaacgccctcccagatgtgtccgtggatgatgtcagatccacctcccaggggctgtcaagcttcaagccactgcctcgcccaccacctctggcccaaggcaacgacctcccactaggccagccaaggaagctggggagagaggacctccagccaccttcctccatgccttcctgctcgggcactgtcttctcggctccacagaaccgcagcccgccagcgggcaccgcacccaccccagggacctcctctgcacaggacttgccctcttcccccatctatgcctccgtctcccctgccaaccccagctccaagaggccgctggacgcccatctggccctggtcaaccaacaccccatcggccccttcccacgggtccagtcacccccgcacctgaaaagcccctctgcagaggccacagtggctgggggctgccttctgcccccatcaccctctggccacccagaccagacaggcacaaaccagcactttgtcatggtggaggtccaccgccccgacagcgagccagacgtcaatgaagtgagggcgctgccccagacgcgcacagcctctacgctctcccagctctcggacagcgggcagactctaagcgaggacagtggtgtggatgctggcgaggcagaggccagcgccccaggccgaggaaggcagtcggtgtccaccaagagcaggagtagcaaggagctgcctcggaacgagaggcccacagatggggccaacaaaccgcctggacttctggagcccacgtccactctggtccgtgtgaagaaaagtgcggccaccctgggcatcgccatcgagggtggcgccaacacccgccagcccctgcctaggattgtcactattcagagaggcggctcagctcacaactgtgggcagctcaaggtgggccacgtgattctggaagtgaatgggctgacgcttcggggcaaggagcaccgggaggccgcccgcattatcgccgaggccttcaagactaaggaccgtgactacattgactttctggtcactgagttcaatgtgatgctctagaggccaaggcctgagggcctcccaccactgcccagcccctggtcccagtccctttccaccgttggcttcatcaagctccttgcggggttggggctgcatggccagggtggcaggaagacatcccccctccatcccagcccactggaccagaactgggagaggaagagagcaggacaaggcagacagaaggtcaggtcaggaactggtgctgtactgggtacacagtaggcgcccaggacaagtgggttgcaagacaggaagaaaggaaaaggaagggcagagtgctggtttctccaggttgggttgggggcactgctgtcccccctccagctaggacccagcccatccccagatgcctgagcctttgtccaaagtgaggtcactcgagaattcatggacacggcccccagtcagggggcatcttgcaagacctttagtgccacaaataagcatcgagcacctccccattcacacccccattcctcctggctccttatcccccatggtgtttattatttatttccctccccatgcccctggggaccccaaggccccagcttccctctgcacccccagcctatcccagaggccttgcaggtgaccagcagtgtcattgtatttatatacagagcttatgactttaatttttcaataaagaaatctgaacaaggttaaaaaaaagc

SEQ ID NO: 299301 - DNA, 384 bp, Homo sapiens
ttgtcgtctagaggatccctcacgccatgtcacaaccttgagcaccctgcacctcctgcaaggaggggatgagaaaaaggtgaacctggtgctgggggacggccggtccctgggcctcacgatccgtgggggagctgagtacggccttggcatttacatcactggcgtggacccaggctctgaagcagaaggcagcgggctcaaggttggggaccagattctagaagtgaatgggcggagctttctcaacatcctacacgacgaggctgtcaggctgcttaagtcatctcggcacctcatcctgacagtgaaggacgtcgggaggctgccccatgcccgcaccattgtgacatggcgtgagggatcctctagatcaccacacat

SEQ ID NO: 299302 - DNA, 1682 bp, Homo sapiens
tccgggcttgcggccgggcggcgcagaggcgcggaggctccccgggcggctgcatcccggggctgccccggacatgccccgcaccccttgtcggacgcccgcgccgcttcaccggctgccactccccggagtgctctgggactagagcgccctccgccccaacttctgactttggggtcccccagccctagaggaacgggcgcccggctgggggagccccgggcatggtgtgacggggcagtcaggtcagctttgcggcgcccccaaactccagccacccgtcgtctccgtgccctccagaatgtagctgctgaccccgcgccccccggactccagcagcagtctccgccacctccgggctccagcagccaactcttgtgtctctcaggaacccgccgacgtctccgcgtcccccggattccaggttcgcgacccccgccgtcttcgcgcctccgggactctagcagcggtctccgcgaccccctaggatccagccactgtacccgtgctccccaaacccaggctccagccgtcgtctccgcgctcccggggatccagctgtcgcgccagtacccgcgaggacagcggcaccgcccacaccccgcgcgctcagagcccggccgggcctcggcgtggagatgaacgcgccgctggacggcctgtcggtgagctcgtcctccaccggctcgctgggctcggcggccggggcgggcggcggcgggggcgcggggctgcggttactgtctgccaacgtgcgccagctgcaccaagcgctgaccgcgctgctgagcgaggcggagcgggagcagttcacccactgcctgaacgcttaccacgcgcgccgcaacgtcttcgacctggtgcgcaccctgcgcgtgctgctggacagtccggtcaagcggcgcctgctgcccatgcttcgtctggtcatcccgcgctccgaccagctgctcttcgaccaatacacggccgagggcctctacctgcccgccaccaccccctacaggcagcccgcctggggcggccccgacagcgcggggccaggggaggtgcgcctggtgagtttgcggcgtgccaaggcccacgagggcttgggcttcagcatccgtgggggctcggagcacggcgtgggcatctacgtgtctctggtggaaccaggctctctagctgagaaggaaggactgcgggtcggggaccagattctgcgcgtcaacgacaaatccctggcccgggtgacccacgcggaggccgtcaaggctctgaagggctccaagaagctggtgctgtctgtgtactcagcagggcgcatccctgggggctacgtcaccaaccacatctacacctgggtggacccgcagggccgcagcatctccccaccctcgggcctgccccagccccacggtggtgccctgaggcagcaggagggtgaccggaggagcaccctgcacctcctgcaaggaggggatgagaaaaaggtgagtggggtggggaaaggaggccagcctctcagacaccgtattctccctccgaacccagaacagcagagctgcttggaggccgcaagaagaggctggttctgtccaggctctgtcttccctcaagtctgtactgaagggtggtgttttttctttgcttttctttttgacctgtgtagtgtatgttataatacaggctaagctgcc

SEQ ID NO: 299303 - DNA, 1405 bp, Homo sapiens
tccgggcttgcggccgggcggcgcagaggcgcggaggctccccgggcggctgcatcccggggctgccccggacatgccccgcaccccttgtcggacgcccgcgccgcttcaccggctgccactccccggagtgctctgggactagagcgccctccgccccaacttctgactttggggtcccccagccctagaggaacgggcgcccggctgggggagccccgggcatggtgtgacggggcagtcaggtcagctttgcggcgcccccaaactccagccacccgtcgtctccgtgccctccagaatgtagctgctgaccccgcgccccccggactccagcagcagtctccgccacctccgggctccagcagccaactcttgtgtctctcaggaacccgccgacgtctccgcgtcccccggattccaggttcgcgacccccgccgtcttcgcgcctccgggactctagcagcggtctccgcgaccccctaggatccagccactgtacccgtgctccccaaacccaggctccagccgtcgtctccgcgctcccggggatccagctgtcgcgccagtacccgcgaggacagcggcaccgcccacaccccgcgcgctcagagcccggccgggcctcggcgtggagatgaacgcgccgctggacggcctgtcggtgagctcgtcctccaccggctcgctgggctcggcggccggggcgggcggcggcgggggcgcggggctgcggttactgtctgccaacgtgcgccagctgcaccaagcgctgaccgcgctgctgagcgaggcggagcgggagcagttcacccactgcctgaacgcttaccacgcgcgccgcaacgtcttcgacctggtgcgcaccctgcgcgtgctgctggacagtccggtcaagcggcgcctgctgcccatgcttcgtctggtcatcccgcgctccgaccagctgctcttcgaccaatacacggccgagggcctctacctgcccgccaccaccccctacaggcagcccgcctggggcggccccgacagcgcggggccaggggaggtgcgcctggtgagtttgcggcgtgccaaggcccacgagggcttgggcttcagcatccgtgggggctcggagcacggcgtgggcatctacgtgtctctggtggaaccaggctctctagctgagaaggaaggactgcgggtcggggaccagattctgcgcgtcaacgacaaatccctggcccgggtgacccacgcggaggccgtcaaggttgtgtatcctgaagcaagtcacttgccctctcaggacctcttgttctccacttggaaaatggggccactggaccaaataagcggtccctaacctttttggaaatgagactcctgcctgaatgtaaaaaataaattccctagcccctg

SEQ ID NO: 299304 - DNA, 2649 bp, Homo sapiens
ttgtcgtctagaggatccctcacgccatgtcacaaccttgagcaccctgcacctcctgcaaggaggggatgagaaaaaggtgaacctggtgctgggggacggccggtccctgggcctcacgatccgtgggggagctgagtacggccttggcatttacatcactggcgtggacccaggctctgaagcagaaggcagcgggctcaaggttggggaccagattctagaagtgaatgggcggagctttctcaacatcctacacgacgaggctgtcaggctgcttaagtcatctcggcacctcatcctgacagtgaaggacgtcgggaggctgccccatgcccgcaccattgtggacgagaccaagtggatcgccagttcccggatcagggagaccatggcgaactcggcagggtttcttggcgatctcacaacagaaggaataaacaagccaggattttacaagggcccagccggctcccaggtgaccctgagcagcctggggaaccagacacgagtgctgctggaggagcaggctcggcacctgctgaacgagcaggaacacgccaccatggcctactacctggatgagtaccgtggcggcagcgtctctgtggaggccctcgtcatggccctgttcaagctgctcaacacccacgccaagttctcactcctctctgaggtgagaggcaccatttccccgcaagacctagaacgcttcgaccacctggtgctgaggcgtgagattgagtccatgaaggcgcggcagcccccaggccccggggctggggacacctactccatggtctcctacagtgacacgggttcatccacaggcagccacggcacctccaccaccgtcagctcggccaggaacactctggacctggaggaaactggcgaggctgtccagggcaatatcaacgccctcccagatgtgtccgtggatgatgtcagatccacctcccaggggctgtcaagcttcaagccactgcctcgcccaccacctctggcccaaggcaacgacctcccactaggccagccaaggaagctggggagagaggacctccagccaccttcctccatgccttcctgctcgggcactgtcttctcggctccacagaaccgcagcccgccagcgggcaccgcacccaccccagggacctcctctgcacaggacttgccctcttcccccatctatgcctccgtctcccctgccaaccccagctccaagaggccgctggacgcccatctggccctggtcaaccaacaccccatcggccccttcccacgggtccagtcacccccgcacctgaaaagcccctctgcagaggccacagtggctgggggctgccttctgcccccatcaccctctggccacccagaccagacaggcacaaaccagcactttgtcatggtggaggtccaccgccccgacagcgagccagacgtcaatgaagtgagggcgctgccccagacgcgcacagcctctacgctctcccagctctcggacagcgggcagactctaagcgaggacagtggtgtggatgctggcgaggcagaggccagcgccccaggccgaggaaggcagtcggtgtccaccaagagcaggagtagcaaggagctgcctcggaacgagaggcccacagatggggccaacaaaccgcctggacttctggagcccacgtccactctggtccgtgtgaagaaaagtgcggccaccctgggcatcgccatcgagggtggcgccaacacccgccagcccctgcctaggattgtcactattcagagaggcggctcagctcacaactgtgggcagctcaaggtgggccacgtgattctggaagtgaatgggctgacgcttcggggcaaggagcaccgggaggccgcccgcattatcgccgaggccttcaagactaaggaccgtgactacattgactttctggtcactgagttcaatgtgatgctctagaggccaaggcctgagggcctcccaccactgcccagcccctggtcccagtccctttccaccgttggcttcatcaagctccttgcggggttggggctgcatggccagggtggcaggaagacatcccccctccatcccagcccactggaccagaactgggagaggaagagagcaggacaaggcagacagaaggtcaggtcaggaactggtgctgtactgggtacacagtaggcgcccaggacaagtgggttgcaagacaggaagaaaggaaaaggaagggcagagtgctggtttctccaggttgggttgggggcactgctgtcccccctccagctaggacccagcccatccccagatgcctgagcctttgtccaaagtgaggtcactcgagaattcatggacacggcccccagtcagggggcatcttgcaagacctttagtgccacaaataagcatcgagcacctccccattcacacccccattcctcctggctccttatcccccatggtgtttattatttatttccctccccatgcccctggggaccccaaggccccagcttccctctgcacccccagcctatcccagaggccttgcaggtgaccagcagtgtcattgtatttatatacagagcttatgactttaatttttcaataaagaaatctgaacaaggttaaaaaaaagc

SEQ ID NO: 299305 - DNA, 932 bp, Homo sapiens
catcgagctcgcacccccgcagcacctccttgaaccgtagcacctccttggattgtcactattcagagaggcggctcagctcacaactgtgggcagctcaaggtgggccacgtgattctggaagtgaatgggctgacgcttcggggcaaggagcaccgggaggccgcccgcattatcgccgaggccttcaagactaaggaccgtgactacattgactttctggtcactgagttcaatgtgatgctctagaggccaaggcctgagggcctcccaccactgcccagcccctggtcccagtccctttccaccgttggcttcatcaagctccttgcggggttggggctgcatggccagggtggcaggaagacatcccccctccatcccagcccactggaccagaactgggagaggaagagagcaggacaaggcagacagaaggtcaggtcaggaactggtgctgtactgggtacacagtaggcgcccaggacaagtgggttgcaagacaggaagaaaggaaaaggaagggcagagtgctggtttctccaggttgggttgggggcactgctgtcccccctccagctaggacccagcccatccccagatgcctgagcctttgtccaaagtgaggtcactcgagaattcatggacacggcccccagtcagggggcatcttgcaagacctttagtgccacaaataagcatcgagcacctccccattcacacccccattcctcctggctccttatcccccatggtgtttattatttatttccctccccatgcccctggggaccccaaggccccagcttccctctgcacccccagcctatcccagaggccttgcaggtgaccagcagtgtcattgtatttatatacagagcttatgactttaatttttcaataaagaaatctgaacaaggttaaaaaaaagc

SEQ ID NO: 299306 - DNA, 1282 bp, Homo sapiens
ttgtcgtctagaggatccctcacgccatgtcacaaccttgagcaccctgcacctcctgcaaggaggggatgagaaaaaggtgaacctggtgctgggggacggccggtccctgggcctcacgatccgtgggggagctgagtacggccttggcatttacatcactggcgtggacccaggctctgaagcagaaggcagcgggctcaaggttggggaccagattctagaagtgaatgggcggagctttctcaacatcctacacgacgaggctgtcaggctgcttaagtcatctcggcacctcatcctgacagtgaaggacgtcgggaggctgccccatgcccgcaccattgtggacgagaccaagtggatcgccagttcccggatcagggagaccatggcgaactcggcagggtttcttggcgatctcacaacagaaggaataaacaagccaggattttacaagggcccagccggctcccaggtgaccctgagcagcctggggaaccagacacgagtgctgctggaggagcaggctcggcacctgctgaacgagcaggaacacgccaccatggcctactacctggatgagtaccgtggcggcagcgtctctgtggaggccctcgtcatggccctgttcaagctgctcaacacccacgccaagttctcactcctctctgaggtgagaggcaccatttccccgcaagacctagaacgcttcgaccacctggtgctgaggcgtgagattgagtccatgaaggcgcggcagcccccaggccccggggctggggacacctactccatggtctcctacagtgacacgggttcatccacaggcagccacggcacctccaccaccgtcagctcggccaggaacactctggacctggaggaaactggcgaggctgtccagggcaatatcaacgccctcccagatgtgtccgtggatgatgtcagatccacctcccaggggctgtcaagcttcaagccactgcctcgcccaccacctctggcccaaggcaacgacctcccactaggccagccaaggaagctggggagagaggacctccagccaccttcctccatgccttcctgctcgggcactgtcttctcggctccacagaaccgcagcccgccagcgggcaccgcacccaccccagggacctcctctgcacaggacttgcccctatcctgcgtcccgccttcgtcccccacgtgctacagagacagatccgctctctcactctcagcaaccgcatcaggtaccagctcgattcgtatatgtatc

SEQ ID NO: 299307 - DNA, 887 bp, Homo sapiens
ctcggcccgggtggctcaacagttcgcaaagtccgggcttgcggccgggcggcgcagaggcgcggaggctccccgggcggctgcatcccggggctgccccggacatgccccgcaccccttgtcggacgcccgcgccgcttcaccggctgccactccccggagtgctctgggactagagcgccctccgccccaacttctgactttggggtcccccagccctagaggaacgggcgcccggctgggggagccccgggcatggtgtgacggggcagtcaggtcagctttgcggcgcccccaaactccagccacccgtcgtctccgtgccctccagaatgtagctgctgaccccgcgccccccggactccagcagcagtctccgccacctccgggctccagcagccaactcttgtgtctctcaggaacccgccgacgtctccgcgtcccccggattccaggttcgcgacccccgccgtcttcgcgcctccgggactctagcagcggtctccgcgaccccctaggatccagccactgtacccgtgctccccaaacccaggctccagccgtcgtctccgcgctcccggggatccagctgtcgcgccagtacccgcgaggacagcggcaccgcccacaccccgcgcgctcagagcccggccgggcctcggcgtggagatgaacgcgccgctggacggcctgtcggtgagctcgtcctccaccggctcgctgggctcggcggccggggcgggcggcggcgggggcgcggggctgcggttactgtctgccaacgtgcgccagctgcaccaagcgctgaccgcgctgctgagcgaggcggagcgggagcagttcacccactgcctgaacgcttaccacgcgcgccgcaacgtcttcga

SEQ ID NO: 299308 - DNA, 2446 bp, Homo sapiens
tcctactggctaccagagcctctcagtcatcatactgagacttcagaaggccaaaattccctagatgttttcctctgtcccactaagagctagtttatggatatgatcatatcaggaagagactgagcctctcacaaagggtgacatgaaaggtgtaaagggatcagggcttcagttattctatatttcccaatctttgtgggaatctgttcctcaccatatcatcccacgcctttccatgggataatagggacctaacaaagcatgatatccttatttctcaccactaggacatcaaaggccagttctggaatgatgacgactcggagggagataatgaatcagaggaatttctctatggcgttcaggggagctgtgcagctgacctgtatcgacacccacagcttgatgcagacattgaagccgtgaaggagatctacagtgagaactctgtatccatcagagaatatggaactatcgatgacgtggacattgacctccacatcaacatcagcttcctcgatgaggaagtctctacagcctggaaggtcctccggacagaacctattgtgttgaggctgcgattttctctctcccagtacctagatggaccagaaccatccattgaggttttccagccatcaaataaggaaggatttgggctgggtcttcagttgaaaaagatcctgggtatgtttacatcccaacaatggaaacatctgagcaatgatttcttgaagacccagcaggagaagaggcacagttggttcaaggcaagtggtaccatcaagaagttccgagctggcctcagcatcttttcacccatccccaagtctcccagtttccctatcatacaggactccatgctgaaaggcaaactaggtgtaccagagcttcgggttgggcgcctcatgaaccgttccatctcctgtaccatgaagaaccccaaagtggaagtgtttggctaccctcccagcccccaggtcagtggtcactgcaagaacattcccactctggagtatggattcctcgttcagatcatgaagtatgcagaacagaggattccaacattgaatgagtactgtgtggtgtgtgatgagcagcatgtcttccaaaatggatctatgctgaagccagctgtctgtactcgtgaactatgcgttttctccttctacacactgggcgtcatgtctggagctgcagaggaggtggccactggagcagaggtggtggatctgctggtggccatgtgtagggcagctttagagtcccctagaaagagcatcatctttgagccttatccctctgtggtggaccccactgatcccaagactctggcctttaaccctaagaagaagaattatgagcggcttcagaaagctctggatagtgtgatgtctattcgggagatgacccagggctgtaggaattgcataaaatgagggagacccacctgcatgttgttttggctcatatttggaaatcaagaaacagatggacaagttggatcccctggcccatcctctcctgcagtggatcatctctagcaacaggtcacacattgtcaaactacctctcagcaggcagctgaagttcatgcacacctcacaccagttcctcctgctgagcagccctcctgccaaggaggctcggttccggaccgccaagaagctctatggcagcacctttgccttccatgggtcccacattgagaactggcattcgatcctgcgcaatgggctggtcaatgcatcctacaccaaactgcagctgcatggagcagcctatggcaaaggcatctacctgagccccatctccagtatttcctttggatactcaggaatgggaaaaggacagcacaggatgccctccaaggatgagctggtccagagatacaacaggatgaataccatcccccagacccgatccattcagtcacggttcctgcagagtcggaatctaaactgtatagcactttgtgaagtgattacatctaaggacctccagaagcatgggaacatctgggtgtgccctgtgtccgaccatgtctgcacaagattcttctttgtatatgaggatggtcaggtgggcgatgccaacattaatactcaggaccccaagatacagaaggaaatcatgcgtgtgatcggaactcaggtttacacaaactgagggggccccagccctcgtaccacccctgttaccccaggatccatctgccctcataaaagtgttcaggtacagcagctgaggctgccctgaggaatcaaggggccattaccaaggggcaggaaaaggatatgtaagaggtggccttcatggtagagcttgacccaagaactactccacattcggatggcccagactgactccatcccctgactttccctttgacttcaccctgtttgtaaataaaacaataaaatggaaggtgctgtggactgga

SEQ ID NO: 299309 - DNA, 662 bp, Homo sapiens
tcctactggctaccagagcctctcagtcatcatactgagacttcagaaggccaaaattccctagatgttttcctctgtcccactaagagctagtttatggatatgatcatatcaggaagagactgagcctctcacaaagggtgacatgaaaggtgtaaagggatcagggcttcagttattctatatttcccaatctttgtgggaatctgttcctcaccatatcatcccacgcctttccatgggataatagggacctaacaaagcatgatatccttatttctcaccactaggacatcaaaggccagttctggaatgatgacgactcggagggagataatgaatcagaggaatttctctatggcgttcaggtgaggttacatctcccaagacccccgtgttggatggtctagatatgtgctgctttttggatacatcaggagtgaaagaggttctggagcacagatgagatgaggttataatgttgatgtggtctgagcatggtcttgtcagagctgatcccgtgcccttgctctttctttggagtcatacctgttccagagtaaactacatcctctgtatgtggagactacccatatcttaattagacataattattttctgacttttataacactagccagtgggggtagtttcattcatta

SEQ ID NO: 299310 - DNA, 497 bp, Homo sapiens
cggcttgatctgatcctagcttgcctcttctacatcatttctcaccactcctctgcaattcactattctctatgcaactaacacacactaccttatctttccttcaggccttctgtatcctattacttcttcccagacacttccccgctgtttatttaattaactcttcctaatcctgcagttctcagtctagctgtcaccacatgacttctttaaactcttaggctaggctagttgccctcctctaggctcacaccatgctctataatctgcatcacaaccccttaccatgctgtgttgttaattacttgttcttgcttgtaatttccagcagactaaattctgtgggggaaaataatcttctttgttttattctctgctgttttgatgagcatctagctcagtgctgggacatagtaggcactttcgtaaatttttgataaattagccgggcgtggtggcgcatgcctgtagtcccagcatctccgctttggaaa

SEQ ID NO: 299311 - DNA, 4362 bp, Homo sapiens
gaatttttaaaagcccgaggtgttcgacttccattgtcgaaccagagaatcctgcagtcagcaaggcctcaggacttccctcagtctctacctgccggccccaacctccggcgaggggactccctcccggcctacaggcaacctgggttgcccttcctgcttgttcctcccaaccactcggggcgctaaatgcaagtattctcctttggaaggctccccgcactcccccagagtccctgttccttctccactgcctcccctacccacggcgcaggcgccaccccccactccgcaccctttcccgactagcgaccgccgcgcaggcgtctcagggctggcgtcggctgctgaggcgcgcccaggagcaggccgtcaggctgttggtcaggagcgggccacgtgccatcgtgtcaccgcgcgagcgtgcgcagagtggctgagcgcgcccgtgacggaacgacgaggcgtggggtgcgcgacctcgcccgccaggcccggcccccgccccttggcctgccgctccgcccccgcggggcgtcccgggccgctcgtcccgtcggctgcggccgcgcgcggcccggggtcgccgtgagtactcgccaggctggcctgtgtggccgccaccacgggcacagggcggtgcggccgggccacgggaagggtgcggggctcgccccgtctccgcaggggtggacgaagtgagaggcttggaccgggaggttctgagggcccctcctaggctggacaggcttcactcaggcccggcggccgggcggcatagatcgggcccagagcgtctttcctggggaggcaggtgttgggtgtttttggggtcttcaggggagccccggagaacaggtgtaactgcttccccgggagaggcctcagggcctgtcctggaagcacgggtgccagagagtgttttcgcggggcagccgtatcctctctccctgcggggtgcccgagatagcgctaacctgcgggagtcgcccctcagtgattcttcctagtagtctttgtttagtggcctactcctgagaagggagcacacgggatggagtggagtaacctcctccaggaccacaaagccgggagcccaacccacaatttaaacattgagctctgaagctgctttgactagacgtgaagttgtcacacctagagaagcgcccatggacctagggaaagacctttgtgatccagacttgaggctcatttacatttgacttattctcgtggaaactcataaagcgttctatattagccgctgagttttaacaccttctctggacactcatcatatagtctatttttggcccaacttcttttgaaagggcccattctttacctcatttagataaatcagataggtctttcttgcttacttcattaacaactcaattaattataaccacatcacatgaagattagatgtaattaggacctgtccaatgtctttacatcccagtccttctgtactcctaaccttaagcaaattggtcgacctctgtaggtctaagtattctgtgtgtaacatgaaagctttgaattaggccacgtttccggctaattttttaaaaagtgtttgtgatcctgtgaattccataacccaccaccttccttttccaactcttcaccttttaaatccactttccatctctccagaggaaagggcattgagagtagaggaagcaagtccctttcactaaagcagcctggtttgaaaaagccggtaatctctgaactgtctcttgcttgaacaagaaaaactccctctgaaatacctttttctccttgtgatagcaacagaaaccaagcagcaacagcccttggaaagaggctaaatttttcttgacttctgcagcaacaaagaccgtgaaaagttggcacttctggcctaacgctgccgtcatcctacccctcaccccagggcaacccaggctggacatttagtgcctccctctttattcctctgtgatcatccagatcagcacttgactgtttattttcaaatctcacgaacctcaccccaagatcttcacattctggatctcagctgctcttgaaggacagtgacttgttaccaccgcaacagcagagcctgccatccccaacagatcaccagttgtccctgacatcgtgccctaccttgtctccctttgtggtctcctaaatgcccatctcgttggccttggttcggctagtggtatggaggggtgctgcctagcactgacctgagagtgtgtgtgacccactgacccaatggacatcaaaggccagttctggaatgatgacgactcggagggagataatgaatcagaggaatttctctatggcgttcaggggagctgtgcagctgacctgtatcgacacccacagcttgatgcagacattgaagccgtgaaggagatctacagtgagaactctgtatccatcagagaatatggaactatcgatgacgtggacattgacctccacatcaacatcagcttcctcgatgaggaagtctctacagcctggaaggtcctccggacagaacctattgtgttgaggctgcgattttctctctcccagtacctagatggaccagaaccatccattgaggttttccagccatcaaataaggaaggatttgggctgggtcttcagttgaaaaagatcctgggtatgtttacatcccaacaatggaaacatctgagcaatgatttcttgaagacccagcaggagaagaggcacagttggttcaaggcaagtggtaccatcaagaagttccgagctggcctcagcatcttttcacccatccccaagtctcccagtttccctatcatacaggactccatgctgaaaggcaaactaggtgtaccagagcttcgggttgggcgcctcatgaaccgttccatctcctgtaccatgaagaaccccaaagtggaagtgtttggctaccctcccagcccccaggcaggtctcctgtgccctcagcacgtgggcctccctcccccagcacggacctctcctttggtcagtggtcactgcaagaacattcccactctggagtatggattcctcgttcagatcatgaagtatgcagaacagaggattccaacattgaatgagtactgtgtggtgtgtgatgagcagcatgtcttccaaaatggatctatgctgaagccagctgtctgtactcgtgaactatgcgttttctccttctacacactgggcgtcatgtctggagctgcagaggaggtggccactggagcagaggtggtggatctgctggtggccatgtgtagggcagctttagagtcccctagaaagagcatcatctttgagccttatccctctgtggtggaccccactgatcccaagactctggcctttaaccctaagaagaagaattatgagcggcttcagaaagctctggatagtgtgatgtctattcgggagatgacccagggctcatatttggaaatcaagaaacagatggacaagttggatcccctggcccatcctctcctgcagtggatcatctctagcaacaggtcacacattgtcaaactacctctcagcaggcagctgaagttcatgcacacctcacaccagttcctcctgctgagcagccctcctgccaaggaggctcggttccggaccgccaagaagctctatggcagcacctttgccttccatgggtcccacattgagaactggcattcgatcctgcgcaatgggctggtcaatgcatcctacaccaaactgcaggaatgggaaaaggacagcacaggatgccctccaaggatgagctggtccagagatacaacaggatgaataccatcccccagacccgatccattcagtcacggttcctgcagagtcggaatctaaactgtatagcactttgtgaagtgattacatctaaggacctccagaagcatgggaacatctgggtgtgccctgtgtccgaccatgtctgcacaagattcttctttgtatatgaggatggtcaggtgggcgatgccaacattaatactcaggaccccaagatacagaaggaaatcatgcgtgtgatcggaactcaggtttacacaaactgagggggccccagccctcgtaccacccctgttaccccaggatccatctgccctcataaaagtgttcaggtacagcagctgaggctgccctgaggaatcaaggggccattaccaaggggcaggaaaaggatatgtaagaggtggccttcatggtagagcttgacccaagaactactccacattcggatggcccagactgactccatcccctgactttccctttgacttcaccctgtttgtaaataaaacaataaaatggaaggtgctgtggactgga

SEQ ID NO: 299312 - DNA, 3260 bp, Homo sapiens
gaatttttaaaagcccgaggtgttcgacttccattgtcgaaccagagaatcctgcagtcagcaaggcctcaggacttccctcagtctctacctgccggccccaacctccggcgaggggactccctcccggcctacaggcaacctgggttgcccttcctgcttgttcctcccaaccactcggggcgctaaatgcaagtattctcctttggaaggctccccgcactcccccagagtccctgttccttctccactgcctcccctacccacggcgcaggcgccaccccccactccgcaccctttcccgactagcgaccgccgcgcaggcgtctcagggctggcgtcggctgctgaggcgcgcccaggagcaggccgtcaggctgttggtcaggagcgggccacgtgccatcgtgtcaccgcgcgagcgtgcgcagagtggctgagcgcgcccgtgacggaacgacgaggcgtggggtgcgcgacctcgcccgccaggcccggcccccgccccttggcctgccgctccgcccccgcggggcgtcccgggccgctcgtcccgtcggctgcggccgcgcgcggcccggggtcgccgtgagtactcgccaggctggcctgtgtggccgccaccacgggcacagggcggtgcggccgggccacgggaagggtgcggggctcgccccgtctccgcaggggtggacgaagtgcaacagaaaccaagcagcaacagcccttggaaagaggctaaatttttcttgacttctgcagcaacaaagaccgtgaaaagttggcacttctggcctaacgctgccgtcatcctacccctcaccccagggcaacccaggctggacatttagtgcctccctctttattcctctgtgatcatccagatcagcacttgactgtttattttcaaatctcacgaacctcaccccaagatcttcacattctggatctcagctgctcttgaaggacagtgacttgttaccaccgcaacagcagagcctgccatccccaacagatcaccagttgtccctgacatcgtgccctaccttgtctccctttgtggtctcctaaatgcccatctcgttggccttggttcggctagtggtatggaggggtgctgcctagcactgacctgagagtgtgtgtgacccactgacccaatggacatcaaaggccagttctggaatgatgacgactcggagggagataatgaatcagaggaatttctctatggcgttcaggggagctgtgcagctgacctgtatcgacacccacagcttgatgcagacattgaagccgtgaaggagatctacagtgagaactctgtatccatcagagaatatggaactatcgatgacgtggacattgacctccacatcaacatcagcttcctcgatgaggaagtctctacagcctggaaggtcctccggacagaacctattgtgttgaggctgcgattttctctctcccagtacctagatggaccagaaccatccattgaggttttccagccatcaaataaggaaggatttgggctgggtcttcagttgaaaaagatcctgggtatgtttacatcccaacaatggaaacatctgagcaatgatttcttgaagacccagcaggagaagaggcacagttggttcaaggcaagtggtaccatcaagaagttccgagctggcctcagcatcttttcacccatccccaagtctcccagtttccctatcatacaggactccatgctgaaaggcaaactaggtgtaccagagcttcgggttgggcgcctcatgaaccgttccatctcctgtaccatgaagaaccccaaagtggaagtgtttggctaccctcccagcccccaggcaggtctcctgtgccctcagcacgtgggcctccctcccccagcacggacctctcctttggtcagtggtcactgcaagaacattcccactctggagtatggattcctcgttcagatcatgaagtatgcagaacagaggattccaacattgaatgagtactgtgtggtgtgtgatgagcagcatgtcttccaaaatggatctatgctgaagccagctgtctgtactcgtgaactatgcgttttctccttctacacactgggcgtcatgtctggagctgcagaggaggtggccactggagcagaggtggtggatctgctggtggccatgtgtagggcagctttagagtcccctagaaagagcatcatctttgagccttatccctctgtggtggaccccactgatcccaagactctggcctttaaccctaagaagaagaattatgagcggcttcagaaagctctggatagtgtgatgtctattcgggagatgacccagggctcatatttggaaatcaagaaacagatggacaagttggatcccctggcccatcctctcctgcagtggatcatctctagcaacaggtcacacattgtcaaactacctctcagcaggcagctgaagttcatgcacacctcacaccagttcctcctgctgagcagccctcctgccaaggaggctcggttccggaccgccaagaagctctatggcagcacctttgccttccatgggtcccacattgagaactggcattcgatcctgcgcaatgggctggtcaatgcatcctacaccaaactgcaggaatgggaaaaggacagcacaggatgccctccaaggatgagctggtccagagatacaacaggatgaataccatcccccagacccgatccattcagtcacggttcctgcagagtcggaatctaaactgtatagcactttgtgaagtgattacatctaaggacctccagaagcatgggaacatctgggtgtgccctgtgtccgaccatgtctgcacaagattcttctttgtatatgaggatggtcaggtgggcgatgccaacattaatactcaggaccccaagatacagaaggaaatcatgcgtgtgatcggaactcaggtttacacaaactgagggggccccagccctcgtaccacccctgttaccccaggatccatctgccctcataaaagtgttcaggtacagcagctgaggctgccctgaggaatcaaggggccattaccaaggggcaggaaaaggatatgtaagaggtggccttcatggtagagcttgacccaagaactactccacattcggatggcccagactgactccatcccctgactttccctttgacttcaccctgtttgtaaataaaacaataaaatggaaggtgctgtggactgga

SEQ ID NO: 299313 - DNA, 3369 bp, Homo sapiens
gaatttttaaaagcccgaggtgttcgacttccattgtcgaaccagagaatcctgcagtcagcaaggcctcaggacttccctcagtctctacctgccggccccaacctccggcgaggggactccctcccggcctacaggcaacctgggttgcccttcctgcttgttcctcccaaccactcggggcgctaaatgcaagtattctcctttggaaggctccccgcactcccccagagtccctgttccttctccactgcctcccctacccacggcgcaggcgccaccccccactccgcaccctttcccgactagcgaccgccgcgcaggcgtctcagggctggcgtcggctgctgaggcgcgcccaggagcaggccgtcaggctgttggtcaggagcgggccacgtgccatcgtgtcaccgcgcgagcgtgcgcagagtggctgagcgcgcccgtgacggaacgacgaggcgtggggtgcgcgacctcgcccgccaggcccggcccccgccccttggcctgccgctccgcccccgcggggcgtcccgggccgctcgtcccgtcggctgcggccgcgcgcggcccggggtcgccgtgagtactcgccaggctggcctgtgtggccgccaccacgggcacagggcggtgcggccgggccacgggaagggtgcggggctcgccccgtctccgcaggggtggacgaagtgagaggcttggaccgggaggttctgagggcccctcctaggctggacaggcttcactcaggcccggcggccgggcggcatagatcgggcccagagcgtctttcctggggagcaacagaaaccaagcagcaacagcccttggaaagaggctaaatttttcttgacttctgcagcaacaaagaccgtgaaaagttggcacttctggcctaacgctgccgtcatcctacccctcaccccagggcaacccaggctggacatttagtgcctccctctttattcctctgtgatcatccagatcagcacttgactgtttattttcaaatctcacgaacctcaccccaagatcttcacattctggatctcagctgctcttgaaggacagtgacttgttaccaccgcaacagcagagcctgccatccccaacagatcaccagttgtccctgacatcgtgccctaccttgtctccctttgtggtctcctaaatgcccatctcgttggccttggttcggctagtggtatggaggggtgctgcctagcactgacctgagagtgtgtgtgacccactgacccaatggacatcaaaggccagttctggaatgatgacgactcggagggagataatgaatcagaggaatttctctatggcgttcaggggagctgtgcagctgacctgtatcgacacccacagcttgatgcagacattgaagccgtgaaggagatctacagtgagaactctgtatccatcagagaatatggaactatcgatgacgtggacattgacctccacatcaacatcagcttcctcgatgaggaagtctctacagcctggaaggtcctccggacagaacctattgtgttgaggctgcgattttctctctcccagtacctagatggaccagaaccatccattgaggttttccagccatcaaataaggaaggatttgggctgggtcttcagttgaaaaagatcctgggtatgtttacatcccaacaatggaaacatctgagcaatgatttcttgaagacccagcaggagaagaggcacagttggttcaaggcaagtggtaccatcaagaagttccgagctggcctcagcatcttttcacccatccccaagtctcccagtttccctatcatacaggactccatgctgaaaggcaaactaggtgtaccagagcttcgggttgggcgcctcatgaaccgttccatctcctgtaccatgaagaaccccaaagtggaagtgtttggctaccctcccagcccccaggcaggtctcctgtgccctcagcacgtgggcctccctcccccagcacggacctctcctttggtcagtggtcactgcaagaacattcccactctggagtatggattcctcgttcagatcatgaagtatgcagaacagaggattccaacattgaatgagtactgtgtggtgtgtgatgagcagcatgtcttccaaaatggatctatgctgaagccagctgtctgtactcgtgaactatgcgttttctccttctacacactgggcgtcatgtctggagctgcagaggaggtggccactggagcagaggtggtggatctgctggtggccatgtgtagggcagctttagagtcccctagaaagagcatcatctttgagccttatccctctgtggtggaccccactgatcccaagactctggcctttaaccctaagaagaagaattatgagcggcttcagaaagctctggatagtgtgatgtctattcgggagatgacccagggctcatatttggaaatcaagaaacagatggacaagttggatcccctggcccatcctctcctgcagtggatcatctctagcaacaggtcacacattgtcaaactacctctcagcaggcagctgaagttcatgcacacctcacaccagttcctcctgctgagcagccctcctgccaaggaggctcggttccggaccgccaagaagctctatggcagcacctttgccttccatgggtcccacattgagaactggcattcgatcctgcgcaatgggctggtcaatgcatcctacaccaaactgcaggaatgggaaaaggacagcacaggatgccctccaaggatgagctggtccagagatacaacaggatgaataccatcccccagacccgatccattcagtcacggttcctgcagagtcggaatctaaactgtatagcactttgtgaagtgattacatctaaggacctccagaagcatgggaacatctgggtgtgccctgtgtccgaccatgtctgcacaagattcttctttgtatatgaggatggtcaggtgggcgatgccaacattaatactcaggaccccaagatacagaaggaaatcatgcgtgtgatcggaactcaggtttacacaaactgagggggccccagccctcgtaccacccctgttaccccaggatccatctgccctcataaaagtgttcaggtacagcagctgaggctgccctgaggaatcaaggggccattaccaaggggcaggaaaaggatatgtaagaggtggccttcatggtagagcttgacccaagaactactccacattcggatggcccagactgactccatcccctgactttccctttgacttcaccctgtttgtaaataaaacaataaaatggaaggtgctgtggactgga

SEQ ID NO: 299314 - DNA, 3147 bp, Homo sapiens
gaatttttaaaagcccgaggtgttcgacttccattgtcgaaccagagaatcctgcagtcagcaaggcctcaggacttccctcagtctctacctgccggccccaacctccggcgaggggactccctcccggcctacaggcaacctgggttgcccttcctgcttgttcctcccaaccactcggggcgctaaatgcaagtattctcctttggaaggctccccgcactcccccagagtccctgttccttctccactgcctcccctacccacggcgcaggcgccaccccccactccgcaccctttcccgactagcgaccgccgcgcaggcgtctcagggctggcgtcggctgctgaggcgcgcccaggagcaggccgtcaggctgttggtcaggagcgggccacgtgccatcgtgtcaccgcgcgagcgtgcgcagagtggctgagcgcgcccgtgacggaacgacgaggcgtggggtgcgcgacctcgcccgccaggcccggcccccgccccttggcctgccgctccgcccccgcggggcgtcccgggccgctcgtcccgtcggctgcggccgcgcgcggcccggggtcgcccaacagaaaccaagcagcaacagcccttggaaagaggctaaatttttcttgacttctgcagcaacaaagaccgtgaaaagttggcacttctggcctaacgctgccgtcatcctacccctcaccccagggcaacccaggctggacatttagtgcctccctctttattcctctgtgatcatccagatcagcacttgactgtttattttcaaatctcacgaacctcaccccaagatcttcacattctggatctcagctgctcttgaaggacagtgacttgttaccaccgcaacagcagagcctgccatccccaacagatcaccagttgtccctgacatcgtgccctaccttgtctccctttgtggtctcctaaatgcccatctcgttggccttggttcggctagtggtatggaggggtgctgcctagcactgacctgagagtgtgtgtgacccactgacccaatggacatcaaaggccagttctggaatgatgacgactcggagggagataatgaatcagaggaatttctctatggcgttcaggggagctgtgcagctgacctgtatcgacacccacagcttgatgcagacattgaagccgtgaaggagatctacagtgagaactctgtatccatcagagaatatggaactatcgatgacgtggacattgacctccacatcaacatcagcttcctcgatgaggaagtctctacagcctggaaggtcctccggacagaacctattgtgttgaggctgcgattttctctctcccagtacctagatggaccagaaccatccattgaggttttccagccatcaaataaggaaggatttgggctgggtcttcagttgaaaaagatcctgggtatgtttacatcccaacaatggaaacatctgagcaatgatttcttgaagacccagcaggagaagaggcacagttggttcaaggcaagtggtaccatcaagaagttccgagctggcctcagcatcttttcacccatccccaagtctcccagtttccctatcatacaggactccatgctgaaaggcaaactaggtgtaccagagcttcgggttgggcgcctcatgaaccgttccatctcctgtaccatgaagaaccccaaagtggaagtgtttggctaccctcccagcccccaggcaggtctcctgtgccctcagcacgtgggcctccctcccccagcacggacctctcctttggtcagtggtcactgcaagaacattcccactctggagtatggattcctcgttcagatcatgaagtatgcagaacagaggattccaacattgaatgagtactgtgtggtgtgtgatgagcagcatgtcttccaaaatggatctatgctgaagccagctgtctgtactcgtgaactatgcgttttctccttctacacactgggcgtcatgtctggagctgcagaggaggtggccactggagcagaggtggtggatctgctggtggccatgtgtagggcagctttagagtcccctagaaagagcatcatctttgagccttatccctctgtggtggaccccactgatcccaagactctggcctttaaccctaagaagaagaattatgagcggcttcagaaagctctggatagtgtgatgtctattcgggagatgacccagggctcatatttggaaatcaagaaacagatggacaagttggatcccctggcccatcctctcctgcagtggatcatctctagcaacaggtcacacattgtcaaactacctctcagcaggcagctgaagttcatgcacacctcacaccagttcctcctgctgagcagccctcctgccaaggaggctcggttccggaccgccaagaagctctatggcagcacctttgccttccatgggtcccacattgagaactggcattcgatcctgcgcaatgggctggtcaatgcatcctacaccaaactgcaggaatgggaaaaggacagcacaggatgccctccaaggatgagctggtccagagatacaacaggatgaataccatcccccagacccgatccattcagtcacggttcctgcagagtcggaatctaaactgtatagcactttgtgaagtgattacatctaaggacctccagaagcatgggaacatctgggtgtgccctgtgtccgaccatgtctgcacaagattcttctttgtatatgaggatggtcaggtgggcgatgccaacattaatactcaggaccccaagatacagaaggaaatcatgcgtgtgatcggaactcaggtttacacaaactgagggggccccagccctcgtaccacccctgttaccccaggatccatctgccctcataaaagtgttcaggtacagcagctgaggctgccctgaggaatcaaggggccattaccaaggggcaggaaaaggatatgtaagaggtggccttcatggtagagcttgacccaagaactactccacattcggatggcccagactgactccatcccctgactttccctttgacttcaccctgtttgtaaataaaacaataaaatggaaggtgctgtggactgga

SEQ ID NO: 299315 - DNA, 2750 bp, Homo sapiens
gaatttttaaaagcccgaggtgttcgacttccattgtcgaaccagagaatcctgcagtcagcaaggcctcaggacttccctcagtctctacctgccggccccaacctccggcgaggggactccctcccggcctacaggcaacctgggttgcccttcctgcttgttcctcccaaccactcggggcgctaaatcaacagaaaccaagcagcaacagcccttggaaagaggctaaatttttcttgacttctgcagcaacaaagaccgtgaaaagttggcacttctggcctaacgctgccgtcatcctacccctcaccccagggcaacccaggctggacatttagtgcctccctctttattcctctgtgatcatccagatcagcacttgactgtttattttcaaatctcacgaacctcaccccaagatcttcacattctggatctcagctgctcttgaaggacagtgacttgttaccaccgcaacagcagagcctgccatccccaacagatcaccagttgtccctgacatcgtgccctaccttgtctccctttgtggtctcctaaatgcccatctcgttggccttggttcggctagtggtatggaggggtgctgcctagcactgacctgagagtgtgtgtgacccactgacccaatggacatcaaaggccagttctggaatgatgacgactcggagggagataatgaatcagaggaatttctctatggcgttcaggggagctgtgcagctgacctgtatcgacacccacagcttgatgcagacattgaagccgtgaaggagatctacagtgagaactctgtatccatcagagaatatggaactatcgatgacgtggacattgacctccacatcaacatcagcttcctcgatgaggaagtctctacagcctggaaggtcctccggacagaacctattgtgttgaggctgcgattttctctctcccagtacctagatggaccagaaccatccattgaggttttccagccatcaaataaggaaggatttgggctgggtcttcagttgaaaaagatcctgggtatgtttacatcccaacaatggaaacatctgagcaatgatttcttgaagacccagcaggagaagaggcacagttggttcaaggcaagtggtaccatcaagaagttccgagctggcctcagcatcttttcacccatccccaagtctcccagtttccctatcatacaggactccatgctgaaaggcaaactaggtgtaccagagcttcgggttgggcgcctcatgaaccgttccatctcctgtaccatgaagaaccccaaagtggaagtgtttggctaccctcccagcccccaggcaggtctcctgtgccctcagcacgtgggcctccctcccccagcacggacctctcctttggtcagtggtcactgcaagaacattcccactctggagtatggattcctcgttcagatcatgaagtatgcagaacagaggattccaacattgaatgagtactgtgtggtgtgtgatgagcagcatgtcttccaaaatggatctatgctgaagccagctgtctgtactcgtgaactatgcgttttctccttctacacactgggcgtcatgtctggagctgcagaggaggtggccactggagcagaggtggtggatctgctggtggccatgtgtagggcagctttagagtcccctagaaagagcatcatctttgagccttatccctctgtggtggaccccactgatcccaagactctggcctttaaccctaagaagaagaattatgagcggcttcagaaagctctggatagtgtgatgtctattcgggagatgacccagggctcatatttggaaatcaagaaacagatggacaagttggatcccctggcccatcctctcctgcagtggatcatctctagcaacaggtcacacattgtcaaactacctctcagcaggcagctgaagttcatgcacacctcacaccagttcctcctgctgagcagccctcctgccaaggaggctcggttccggaccgccaagaagctctatggcagcacctttgccttccatgggtcccacattgagaactggcattcgatcctgcgcaatgggctggtcaatgcatcctacaccaaactgcaggaatgggaaaaggacagcacaggatgccctccaaggatgagctggtccagagatacaacaggatgaataccatcccccagacccgatccattcagtcacggttcctgcagagtcggaatctaaactgtatagcactttgtgaagtgattacatctaaggacctccagaagcatgggaacatctgggtgtgccctgtgtccgaccatgtctgcacaagattcttctttgtatatgaggatggtcaggtgggcgatgccaacattaatactcaggaccccaagatacagaaggaaatcatgcgtgtgatcggaactcaggtttacacaaactgagggggccccagccctcgtaccacccctgttaccccaggatccatctgccctcataaaagtgttcaggtacagcagctgaggctgccctgaggaatcaaggggccattaccaaggggcaggaaaaggatatgtaagaggtggccttcatggtagagcttgacccaagaactactccacattcggatggcccagactgactccatcccctgactttccctttgacttcaccctgtttgtaaataaaacaataaaatggaaggtgctgtggactgga

SEQ ID NO: 299316 - DNA, 2689 bp, Homo sapiens
gaatttttaaaagcccgaggtgttcgacttccattgtcgaaccagagaatcctgcagtcagcaaggcctcaggacttccctcagtctctacctgccggccccaacctccggcgaggggactccctcccggcctacaggcaacctgggttgcccttcctgcttgttcctcccaaccactcggggcgctaaatcaacaaagaccgtgaaaagttggcacttctggcctaacgctgccgtcatcctacccctcaccccagggcaacccaggctggacatttagtgcctccctctttattcctctgtgatcatccagatcagcacttgactgtttattttcaaatctcacgaacctcaccccaagatcttcacattctggatctcagctgctcttgaaggacagtgacttgttaccaccgcaacagcagagcctgccatccccaacagatcaccagttgtccctgacatcgtgccctaccttgtctccctttgtggtctcctaaatgcccatctcgttggccttggttcggctagtggtatggaggggtgctgcctagcactgacctgagagtgtgtgtgacccactgacccaatggacatcaaaggccagttctggaatgatgacgactcggagggagataatgaatcagaggaatttctctatggcgttcaggggagctgtgcagctgacctgtatcgacacccacagcttgatgcagacattgaagccgtgaaggagatctacagtgagaactctgtatccatcagagaatatggaactatcgatgacgtggacattgacctccacatcaacatcagcttcctcgatgaggaagtctctacagcctggaaggtcctccggacagaacctattgtgttgaggctgcgattttctctctcccagtacctagatggaccagaaccatccattgaggttttccagccatcaaataaggaaggatttgggctgggtcttcagttgaaaaagatcctgggtatgtttacatcccaacaatggaaacatctgagcaatgatttcttgaagacccagcaggagaagaggcacagttggttcaaggcaagtggtaccatcaagaagttccgagctggcctcagcatcttttcacccatccccaagtctcccagtttccctatcatacaggactccatgctgaaaggcaaactaggtgtaccagagcttcgggttgggcgcctcatgaaccgttccatctcctgtaccatgaagaaccccaaagtggaagtgtttggctaccctcccagcccccaggcaggtctcctgtgccctcagcacgtgggcctccctcccccagcacggacctctcctttggtcagtggtcactgcaagaacattcccactctggagtatggattcctcgttcagatcatgaagtatgcagaacagaggattccaacattgaatgagtactgtgtggtgtgtgatgagcagcatgtcttccaaaatggatctatgctgaagccagctgtctgtactcgtgaactatgcgttttctccttctacacactgggcgtcatgtctggagctgcagaggaggtggccactggagcagaggtggtggatctgctggtggccatgtgtagggcagctttagagtcccctagaaagagcatcatctttgagccttatccctctgtggtggaccccactgatcccaagactctggcctttaaccctaagaagaagaattatgagcggcttcagaaagctctggatagtgtgatgtctattcgggagatgacccagggctcatatttggaaatcaagaaacagatggacaagttggatcccctggcccatcctctcctgcagtggatcatctctagcaacaggtcacacattgtcaaactacctctcagcaggcagctgaagttcatgcacacctcacaccagttcctcctgctgagcagccctcctgccaaggaggctcggttccggaccgccaagaagctctatggcagcacctttgccttccatgggtcccacattgagaactggcattcgatcctgcgcaatgggctggtcaatgcatcctacaccaaactgcaggaatgggaaaaggacagcacaggatgccctccaaggatgagctggtccagagatacaacaggatgaataccatcccccagacccgatccattcagtcacggttcctgcagagtcggaatctaaactgtatagcactttgtgaagtgattacatctaaggacctccagaagcatgggaacatctgggtgtgccctgtgtccgaccatgtctgcacaagattcttctttgtatatgaggatggtcaggtgggcgatgccaacattaatactcaggaccccaagatacagaaggaaatcatgcgtgtgatcggaactcaggtttacacaaactgagggggccccagccctcgtaccacccctgttaccccaggatccatctgccctcataaaagtgttcaggtacagcagctgaggctgccctgaggaatcaaggggccattaccaaggggcaggaaaaggatatgtaagaggtggccttcatggtagagcttgacccaagaactactccacattcggatggcccagactgactccatcccctgactttccctttgacttcaccctgtttgtaaataaaacaataaaatggaaggtgctgtggactgga

SEQ ID NO: 299317 - DNA, 2567 bp, Homo sapiens
gaatttttaaaagcccgaggtgttcgacttccattgtcgaaccagagaatcctgcagtcagcaaggcctcaggacttccctcagtctctacctgccggccccaacctccggcgaggggactccctcccggcctacaggcaacctgggttgcccttcctgcttgttcctcccaaccactcggggcgctaaatatcagcacttgactgtttattttcaaatctcacgaacctcaccccaagatcttcacattctggatctcagctgctcttgaaggacagtgacttgttaccaccgcaacagcagagcctgccatccccaacagatcaccagttgtccctgacatcgtgccctaccttgtctccctttgtggtctcctaaatgcccatctcgttggccttggttcggctagtggtatggaggggtgctgcctagcactgacctgagagtgtgtgtgacccactgacccaatggacatcaaaggccagttctggaatgatgacgactcggagggagataatgaatcagaggaatttctctatggcgttcaggggagctgtgcagctgacctgtatcgacacccacagcttgatgcagacattgaagccgtgaaggagatctacagtgagaactctgtatccatcagagaatatggaactatcgatgacgtggacattgacctccacatcaacatcagcttcctcgatgaggaagtctctacagcctggaaggtcctccggacagaacctattgtgttgaggctgcgattttctctctcccagtacctagatggaccagaaccatccattgaggttttccagccatcaaataaggaaggatttgggctgggtcttcagttgaaaaagatcctgggtatgtttacatcccaacaatggaaacatctgagcaatgatttcttgaagacccagcaggagaagaggcacagttggttcaaggcaagtggtaccatcaagaagttccgagctggcctcagcatcttttcacccatccccaagtctcccagtttccctatcatacaggactccatgctgaaaggcaaactaggtgtaccagagcttcgggttgggcgcctcatgaaccgttccatctcctgtaccatgaagaaccccaaagtggaagtgtttggctaccctcccagcccccaggcaggtctcctgtgccctcagcacgtgggcctccctcccccagcacggacctctcctttggtcagtggtcactgcaagaacattcccactctggagtatggattcctcgttcagatcatgaagtatgcagaacagaggattccaacattgaatgagtactgtgtggtgtgtgatgagcagcatgtcttccaaaatggatctatgctgaagccagctgtctgtactcgtgaactatgcgttttctccttctacacactgggcgtcatgtctggagctgcagaggaggtggccactggagcagaggtggtggatctgctggtggccatgtgtagggcagctttagagtcccctagaaagagcatcatctttgagccttatccctctgtggtggaccccactgatcccaagactctggcctttaaccctaagaagaagaattatgagcggcttcagaaagctctggatagtgtgatgtctattcgggagatgacccagggctcatatttggaaatcaagaaacagatggacaagttggatcccctggcccatcctctcctgcagtggatcatctctagcaacaggtcacacattgtcaaactacctctcagcaggcagctgaagttcatgcacacctcacaccagttcctcctgctgagcagccctcctgccaaggaggctcggttccggaccgccaagaagctctatggcagcacctttgccttccatgggtcccacattgagaactggcattcgatcctgcgcaatgggctggtcaatgcatcctacaccaaactgcaggaatgggaaaaggacagcacaggatgccctccaaggatgagctggtccagagatacaacaggatgaataccatcccccagacccgatccattcagtcacggttcctgcagagtcggaatctaaactgtatagcactttgtgaagtgattacatctaaggacctccagaagcatgggaacatctgggtgtgccctgtgtccgaccatgtctgcacaagattcttctttgtatatgaggatggtcaggtgggcgatgccaacattaatactcaggaccccaagatacagaaggaaatcatgcgtgtgatcggaactcaggtttacacaaactgagggggccccagccctcgtaccacccctgttaccccaggatccatctgccctcataaaagtgttcaggtacagcagctgaggctgccctgaggaatcaaggggccattaccaaggggcaggaaaaggatatgtaagaggtggccttcatggtagagcttgacccaagaactactccacattcggatggcccagactgactccatcccctgactttccctttgacttcaccctgtttgtaaataaaacaataaaatggaaggtgctgtggactgga

SEQ ID NO: 299318 - DNA, 4302 bp, Homo sapiens
gaatttttaaaagcccgaggtgttcgacttccattgtcgaaccagagaatcctgcagtcagcaaggcctcaggacttccctcagtctctacctgccggccccaacctccggcgaggggactccctcccggcctacaggcaacctgggttgcccttcctgcttgttcctcccaaccactcggggcgctaaatgcaagtattctcctttggaaggctccccgcactcccccagagtccctgttccttctccactgcctcccctacccacggcgcaggcgccaccccccactccgcaccctttcccgactagcgaccgccgcgcaggcgtctcagggctggcgtcggctgctgaggcgcgcccaggagcaggccgtcaggctgttggtcaggagcgggccacgtgccatcgtgtcaccgcgcgagcgtgcgcagagtggctgagcgcgcccgtgacggaacgacgaggcgtggggtgcgcgacctcgcccgccaggcccggcccccgccccttggcctgccgctccgcccccgcggggcgtcccgggccgctcgtcccgtcggctgcggccgcgcgcggcccggggtcgccgtgagtactcgccaggctggcctgtgtggccgccaccacgggcacagggcggtgcggccgggccacgggaagggtgcggggctcgccccgtctccgcaggggtggacgaagtgagaggcttggaccgggaggttctgagggcccctcctaggctggacaggcttcactcaggcccggcggccgggcggcatagatcgggcccagagcgtctttcctggggaggcaggtgttgggtgtttttggggtcttcaggggagccccggagaacaggtgtaactgcttccccgggagaggcctcagggcctgtcctggaagcacgggtgccagagagtgttttcgcggggcagccgtatcctctctccctgcggggtgcccgagatagcgctaacctgcgggagtcgcccctcagtgattcttcctagtagtctttgtttagtggcctactcctgagaagggagcacacgggatggagtggagtaacctcctccaggaccacaaagccgggagcccaacccacaatttaaacattgagctctgaagctgctttgactagacgtgaagttgtcacacctagagaagcgcccatggacctagggaaagacctttgtgatccagacttgaggctcatttacatttgacttattctcgtggaaactcataaagcgttctatattagccgctgagttttaacaccttctctggacactcatcatatagtctatttttggcccaacttcttttgaaagggcccattctttacctcatttagataaatcagataggtctttcttgcttacttcattaacaactcaattaattataaccacatcacatgaagattagatgtaattaggacctgtccaatgtctttacatcccagtccttctgtactcctaaccttaagcaaattggtcgacctctgtaggtctaagtattctgtgtgtaacatgaaagctttgaattaggccacgtttccggctaattttttaaaaagtgtttgtgatcctgtgaattccataacccaccaccttccttttccaactcttcaccttttaaatccactttccatctctccagaggaaagggcattgagagtagaggaagcaagtccctttcactaaagcagcctggtttgaaaaagccggtaatctctgaactgtctcttgcttgaacaagaaaaactccctctgaaatacctttttctccttgtgatagcaacagaaaccaagcagcaacagcccttggaaagaggctaaatttttcttgacttctgcagcaacaaagaccgtgaaaagttggcacttctggcctaacgctgccgtcatcctacccctcaccccagggcaacccaggctggacatttagtgcctccctctttattcctctgtgatcatccagatcagcacttgactgtttattttcaaatctcacgaacctcaccccaagatcttcacattctggatctcagctgctcttgaaggacagtgacttgttaccaccgcaacagcagagcctgccatccccaacagatcaccagttgtccctgacatcgtgccctaccttgtctccctttgtggtctcctaaatgcccatctcgttggccttggttcggctagtggtatggaggggtgctgcctagcactgacctgagagtgtgtgtgacccactgacccaatggacatcaaaggccagttctggaatgatgacgactcggagggagataatgaatcagaggaatttctctatggcgttcaggggagctgtgcagctgacctgtatcgacacccacagcttgatgcagacattgaagccgtgaaggagatctacagtgagaactctgtatccatcagagaatatggaactatcgatgacgtggacattgacctccacatcaacatcagcttcctcgatgaggaagtctctacagcctggaaggtcctccggacagaacctattgtgttgaggctgcgattttctctctcccagtacctagatggaccagaaccatccattgaggttttccagccatcaaataaggaaggatttgggctgggtcttcagttgaaaaagatcctgggtatgtttacatcccaacaatggaaacatctgagcaatgatttcttgaagacccagcaggagaagaggcacagttggttcaaggcaagtggtaccatcaagaagttccgagctggcctcagcatcttttcacccatccccaagtctcccagtttccctatcatacaggactccatgctgaaaggcaaactaggtgtaccagagcttcgggttgggcgcctcatgaaccgttccatctcctgtaccatgaagaaccccaaagtggaagtgtttggctaccctcccagcccccaggtcagtggtcactgcaagaacattcccactctggagtatggattcctcgttcagatcatgaagtatgcagaacagaggattccaacattgaatgagtactgtgtggtgtgtgatgagcagcatgtcttccaaaatggatctatgctgaagccagctgtctgtactcgtgaactatgcgttttctccttctacacactgggcgtcatgtctggagctgcagaggaggtggccactggagcagaggtggtggatctgctggtggccatgtgtagggcagctttagagtcccctagaaagagcatcatctttgagccttatccctctgtggtggaccccactgatcccaagactctggcctttaaccctaagaagaagaattatgagcggcttcagaaagctctggatagtgtgatgtctattcgggagatgacccagggctcatatttggaaatcaagaaacagatggacaagttggatcccctggcccatcctctcctgcagtggatcatctctagcaacaggtcacacattgtcaaactacctctcagcaggcagctgaagttcatgcacacctcacaccagttcctcctgctgagcagccctcctgccaaggaggctcggttccggaccgccaagaagctctatggcagcacctttgccttccatgggtcccacattgagaactggcattcgatcctgcgcaatgggctggtcaatgcatcctacaccaaactgcaggaatgggaaaaggacagcacaggatgccctccaaggatgagctggtccagagatacaacaggatgaataccatcccccagacccgatccattcagtcacggttcctgcagagtcggaatctaaactgtatagcactttgtgaagtgattacatctaaggacctccagaagcatgggaacatctgggtgtgccctgtgtccgaccatgtctgcacaagattcttctttgtatatgaggatggtcaggtgggcgatgccaacattaatactcaggaccccaagatacagaaggaaatcatgcgtgtgatcggaactcaggtttacacaaactgagggggccccagccctcgtaccacccctgttaccccaggatccatctgccctcataaaagtgttcaggtacagcagctgaggctgccctgaggaatcaaggggccattaccaaggggcaggaaaaggatatgtaagaggtggccttcatggtagagcttgacccaagaactactccacattcggatggcccagactgactccatcccctgactttccctttgacttcaccctgtttgtaaataaaacaataaaatggaaggtgctgtggactgga

SEQ ID NO: 299319 - DNA, 4189 bp, Homo sapiens
gaatttttaaaagcccgaggtgttcgacttccattgtcgaaccagagaatcctgcagtcagcaaggcctcaggacttccctcagtctctacctgccggccccaacctccggcgaggggactccctcccggcctacaggcaacctgggttgcccttcctgcttgttcctcccaaccactcggggcgctaaatgcaagtattctcctttggaaggctccccgcactcccccagagtccctgttccttctccactgcctcccctacccacggcgcaggcgccaccccccactccgcaccctttcccgactagcgaccgccgcgcaggcgtctcagggctggcgtcggctgctgaggcgcgcccaggagcaggccgtcaggctgttggtcaggagcgggccacgtgccatcgtgtcaccgcgcgagcgtgcgcagagtggctgagcgcgcccgtgacggaacgacgaggcgtggggtgcgcgacctcgcccgccaggcccggcccccgccccttggcctgccgctccgcccccgcggggcgtcccgggccgctcgtcccgtcggctgcggccgcgcgcggcccggggtcgccgtgagtactcgccaggctggcctgtgtggccgccaccacgggcacagggcggtgcggccgggccacgggaagggtgcggggctcgccccgtctccgcaggggtggacgaagtgagaggcttggaccgggaggttctgagggcccctcctaggctggacaggcttcactcaggcccggcggccgggcggcatagatcgggcccagagcgtctttcctggggaggcaggtgttgggtgtttttggggtcttcaggggagccccggagaacaggtgtaactgcttccccgggagaggcctcagggcctgtcctggaagcacgggtgccagagagtgttttcgcggggcagccgtatcctctctccctgcggggtgcccgagatagcgctaacctgcgggagtcgcccctcagtgattcttcctagtagtctttgtttagtggcctactcctgagaagggagcacacgggatggagtggagtaacctcctccaggaccacaaagccgggagcccaacccacaatttaaacattgagctctgaagctgctttgactagacgtgaagttgtcacacctagagaagcgcccatggacctagggaaagacctttgtgatccagacttgaggctcatttacatttgacttattctcgtggaaactcataaagcgttctatattagccgctgagttttaacaccttctctggacactcatcatatagtctatttttggcccaacttcttttgaaagggcccattctttacctcatttagataaatcagataggtctttcttgcttacttcattaacaactcaattaattataaccacatcacatgaagattagatgtaattaggacctgtccaatgtctttacatcccagtccttctgtactcctaaccttaagcaaattggtcgacctctgtaggtctaagtattctgtgtgtaacatgaaagctttgaattaggccacgtttccggctaattttttaaaaagtgtttgtgatcctgtgaattccataacccaccaccttccttttccaactcttcaccttttaaatccactttccatctctccagaggaaagggcattgagagtagaggaagcaagtccctttcactaaagcagcctggtttgaaaaagccggtaatctctgaactgtctcttgcttgaacaagaaaaactccctctgaaatacctttttctccttgtgatagcaacagaaaccaagcagcaacagcccttggaaagaggctaaatttttcttgacttctgcagcaacaaagaccgtgaaaagttggcacttctggcctaacgctgccgtcatcctacccctcaccccagggcaacccaggctggacatttagtgcctccctctttattcctctgtgatcatccagatcagcacttgactgtttattttcaaatctcacgaacctcaccccaagatcttcacattctggatctcagctgctcttgaaggacagtgacttgttaccaccgcaacagcagagcctgccatccccaacagatcaccagttgtccctgacatcgtgccctaccttgtctccctttgtggtctcctaaatgcccatctcgttggccttggttcggctagtggtatggaggggtgctgcctagcactgacctgagagtgtgtgtgacccactgacccaatggacatcaaaggccagttctggaatgatgacgactcggagggagataatgaatcagaggaatttctctatggcgttcaggggagctgtgcagctgacctgtatcgacacccacagcttgatgcagacattgaagccgtgaaggagatctacagtgagaactctgtatccatcagagaatatggaactatcgatgacgtggacattgacctccacatcaacatcagcttcctcgatgaggaagtctctacagcctggaaggtcctccggacagaacctattgtgttgaggctgcgattttctctctcccagtacctagatggaccagaaccatccattgaggttttccagccatcaaataaggaaggatttgggctgggtcttcagttgaaaaagatcctgggtatgtttacatcccaacaatggaaacatctgagcaatgatttcttgaagacccagcaggagaagaggcacagttggttcaaggcaagtggtaccatcaagaagttccgagctggcctcagcatcttttcacccatccccaagtctcccagtttccctatcatacaggactccatgctgaaaggcaaactaggtgtaccagagcttcgggttgggcgcctcatgaaccgttccatctcctgtaccatgaagaaccccaaagtggaagtgtttggctaccctcccagcccccaggtcagtggtcactgcaagaacattcccactctggagtatggattcctcgttcagatcatgaagtatgcagaacagaggattccaacattgaatgagtactgtgtggtgtgtgatgagcagcatgtcttccaaaatggatctatgctgaagccagctgtctgtactcgtgaactatgcgttttctccttctacacactgggcgtcatgtctggagctgcagaggaggtggccactggagcagaggtggtggatctgctggtggccatgtgtagggcagctttagagtcccctagaaagagcatcatctttgagccttatccctctgtggtggaccccactgatcccaagactctggcctttaaccctaagaagaagaattatgagcggcttcagaaagctctggatagtgtgatgtctattcgggagatgacccagggctcatatttggaaatcaagaaacagatggacaagttggatcccctggcccatcctctcctgcagtggatcatctctagcaacaggtcacacattgtcaaactacctctcagcaggtgggtcccacattgagaactggcattcgatcctgcgcaatgggctggtcaatgcatcctacaccaaactgcaggaatgggaaaaggacagcacaggatgccctccaaggatgagctggtccagagatacaacaggatgaataccatcccccagacccgatccattcagtcacggttcctgcagagtcggaatctaaactgtatagcactttgtgaagtgattacatctaaggacctccagaagcatgggaacatctgggtgtgccctgtgtccgaccatgtctgcacaagattcttctttgtatatgaggatggtcaggtgggcgatgccaacattaatactcaggaccccaagatacagaaggaaatcatgcgtgtgatcggaactcaggtttacacaaactgagggggccccagccctcgtaccacccctgttaccccaggatccatctgccctcataaaagtgttcaggtacagcagctgaggctgccctgaggaatcaaggggccattaccaaggggcaggaaaaggatatgtaagaggtggccttcatggtagagcttgacccaagaactactccacattcggatggcccagactgactccatcccctgactttccctttgacttcaccctgtttgtaaataaaacaataaaatggaaggtgctgtggactgga

SEQ ID NO: 299320 - DNA, 4372 bp, Homo sapiens
gaatttttaaaagcccgaggtgttcgacttccattgtcgaaccagagaatcctgcagtcagcaaggcctcaggacttccctcagtctctacctgccggccccaacctccggcgaggggactccctcccggcctacaggcaacctgggttgcccttcctgcttgttcctcccaaccactcggggcgctaaatgcaagtattctcctttggaaggctccccgcactcccccagagtccctgttccttctccactgcctcccctacccacggcgcaggcgccaccccccactccgcaccctttcccgactagcgaccgccgcgcaggcgtctcagggctggcgtcggctgctgaggcgcgcccaggagcaggccgtcaggctgttggtcaggagcgggccacgtgccatcgtgtcaccgcgcgagcgtgcgcagagtggctgagcgcgcccgtgacggaacgacgaggcgtggggtgcgcgacctcgcccgccaggcccggcccccgccccttggcctgccgctccgcccccgcggggcgtcccgggccgctcgtcccgtcggctgcggccgcgcgcggcccggggtcgccgtgagtactcgccaggctggcctgtgtggccgccaccacgggcacagggcggtgcggccgggccacgggaagggtgcggggctcgccccgtctccgcaggggtggacgaagtgagaggcttggaccgggaggttctgagggcccctcctaggctggacaggcttcactcaggcccggcggccgggcggcatagatcgggcccagagcgtctttcctggggaggcaggtgttgggtgtttttggggtcttcaggggagccccggagaacaggtgtaactgcttccccgggagaggcctcagggcctgtcctggaagcacgggtgccagagagtgttttcgcggggcagccgtatcctctctccctgcggggtgcccgagatagcgctaacctgcgggagtcgcccctcagtgattcttcctagtagtctttgtttagtggcctactcctgagaagggagcacacgggatggagtggagtaacctcctccaggaccacaaagccgggagcccaacccacaatttaaacattgagctctgaagctgctttgactagacgtgaagttgtcacacctagagaagcgcccatggacctagggaaagacctttgtgatccagacttgaggctcatttacatttgacttattctcgtggaaactcataaagcgttctatattagccgctgagttttaacaccttctctggacactcatcatatagtctatttttggcccaacttcttttgaaagggcccattctttacctcatttagataaatcagataggtctttcttgcttacttcattaacaactcaattaattataaccacatcacatgaagattagatgtaattaggacctgtccaatgtctttacatcccagtccttctgtactcctaaccttaagcaaattggtcgacctctgtaggtctaagtattctgtgtgtaacatgaaagctttgaattaggccacgtttccggctaattttttaaaaagtgtttgtgatcctgtgaattccataacccaccaccttccttttccaactcttcaccttttaaatccactttccatctctccagaggaaagggcattgagagtagaggaagcaagtccctttcactaaagcagcctggtttgaaaaagccggtaatctctgaactgtctcttgcttgaacaagaaaaactccctctgaaatacctttttctccttgtgatagcaacagaaaccaagcagcaacagcccttggaaagaggctaaatttttcttgacttctgcagcaacaaagaccgtgaaaagttggcacttctggcctaacgctgccgtcatcctacccctcaccccagggcaacccaggctggacatttagtgcctccctctttattcctctgtgatcatccagatcagcacttgactgtttattttcaaatctcacgaacctcaccccaagatcttcacattctggatctcagctgctcttgaaggacagtgacttgttaccaccgcaacagcagagcctgccatccccaacagatcaccagttgtccctgacatcgtgccctaccttgtctccctttgtggtctcctaaatgcccatctcgttggccttggttcggctagtggtatggaggggtgctgcctagcactgacctgagagtgtgtgtgacccactgacccaatggacatcaaaggccagttctggaatgatgacgactcggagggagataatgaatcagaggaatttctctatggcgttcaggggagctgtgcagctgacctgtatcgacacccacagcttgatgcagacattgaagccgtgaaggagatctacagtgagaactctgtatccatcagagaatatggaactatcgatgacgtggacattgacctccacatcaacatcagcttcctcgatgaggaagtctctacagcctggaaggtcctccggacagaacctattgtgttgaggctgcgattttctctctcccagtacctagatggaccagaaccatccattgaggttttccagccatcaaataaggaaggatttgggctgggtcttcagttgaaaaagatcctgggtatgtttacatcccaacaatggaaacatctgagcaatgatttcttgaagacccagcaggagaagaggcacagttggttcaaggcaagtggtaccatcaagaagttccgagctggcctcagcatcttttcacccatccccaagtctcccagtttccctatcatacaggactccatgctgaaaggcaaactaggtgtaccagagcttcgggttgggcgcctcatgaaccgttccatctcctgtaccatgaagaaccccaaagtggaagtgtttggctaccctcccagcccccaggtcagtggtcactgcaagaacattcccactctggagtatggattcctcgttcagatcatgaagtatgcagaacagaggattccaacattgaatgagtactgtgtggtgtgtgatgagcagcatgtcttccaaaatggatctatgctgaagccagctgtctgtactcgtgaactatgcgttttctccttctacacactgggcgtcatgtctggagctgcagaggaggtggccactggagcagaggtggtggatctgctggtggccatgtgtagggcagctttagagtcccctagaaagagcatcatctttgagccttatccctctgtggtggaccccactgatcccaagactctggcctttaaccctaagaagaagaattatgagcggcttcagaaagctctggatagtgtgatgtctattcgggagatgacccagggctcatatttggaaatcaagaaacagatggacaagttggatcccctggcccatcctctcctgcagtggatcatctctagcaacaggtcacacattgtcaaactacctctcagcaggcagctgaagttcatgcacacctcacaccagttcctcctgctgagcagccctcctgccaaggaggctcggttccggaccgccaagaagctctatggcagcacctttgccttccatgggtcccacattgagaactggcattcgatcctgcgcaatgggctggtcaatgcatcctacaccaaactgcagctgcatggagcagcctatggcaaaggcatctacctgagccccatctccagtatttcctttggatactcaggaatgggaaaaggacagcacaggatgccctccaaggatgagctggtccagagatacaacaggatgaataccatcccccagacccgatccattcagtcacggttcctgcagagtcggaatctaaactgtatagcactttgtgaagtgattacatctaaggacctccagaagcatgggaacatctgggtgtgccctgtgtccgaccatgtctgcacaagattcttctttgtatatgaggatggtcaggtgggcgatgccaacattaatactcaggaccccaagatacagaaggaaatcatgcgtgtgatcggaactcaggtttacacaaactgagggggccccagccctcgtaccacccctgttaccccaggatccatctgccctcataaaagtgttcaggtacagcagctgaggctgccctgaggaatcaaggggccattaccaaggggcaggaaaaggatatgtaagaggtggccttcatggtagagcttgacccaagaactactccacattcggatggcccagactgactccatcccctgactttccctttgacttcaccctgtttgtaaataaaacaataaaatggaaggtgctgtggactgga

SEQ ID NO: 299321 - DNA, 4432 bp, Homo sapiens
gaatttttaaaagcccgaggtgttcgacttccattgtcgaaccagagaatcctgcagtcagcaaggcctcaggacttccctcagtctctacctgccggccccaacctccggcgaggggactccctcccggcctacaggcaacctgggttgcccttcctgcttgttcctcccaaccactcggggcgctaaatgcaagtattctcctttggaaggctccccgcactcccccagagtccctgttccttctccactgcctcccctacccacggcgcaggcgccaccccccactccgcaccctttcccgactagcgaccgccgcgcaggcgtctcagggctggcgtcggctgctgaggcgcgcccaggagcaggccgtcaggctgttggtcaggagcgggccacgtgccatcgtgtcaccgcgcgagcgtgcgcagagtggctgagcgcgcccgtgacggaacgacgaggcgtggggtgcgcgacctcgcccgccaggcccggcccccgccccttggcctgccgctccgcccccgcggggcgtcccgggccgctcgtcccgtcggctgcggccgcgcgcggcccggggtcgccgtgagtactcgccaggctggcctgtgtggccgccaccacgggcacagggcggtgcggccgggccacgggaagggtgcggggctcgccccgtctccgcaggggtggacgaagtgagaggcttggaccgggaggttctgagggcccctcctaggctggacaggcttcactcaggcccggcggccgggcggcatagatcgggcccagagcgtctttcctggggaggcaggtgttgggtgtttttggggtcttcaggggagccccggagaacaggtgtaactgcttccccgggagaggcctcagggcctgtcctggaagcacgggtgccagagagtgttttcgcggggcagccgtatcctctctccctgcggggtgcccgagatagcgctaacctgcgggagtcgcccctcagtgattcttcctagtagtctttgtttagtggcctactcctgagaagggagcacacgggatggagtggagtaacctcctccaggaccacaaagccgggagcccaacccacaatttaaacattgagctctgaagctgctttgactagacgtgaagttgtcacacctagagaagcgcccatggacctagggaaagacctttgtgatccagacttgaggctcatttacatttgacttattctcgtggaaactcataaagcgttctatattagccgctgagttttaacaccttctctggacactcatcatatagtctatttttggcccaacttcttttgaaagggcccattctttacctcatttagataaatcagataggtctttcttgcttacttcattaacaactcaattaattataaccacatcacatgaagattagatgtaattaggacctgtccaatgtctttacatcccagtccttctgtactcctaaccttaagcaaattggtcgacctctgtaggtctaagtattctgtgtgtaacatgaaagctttgaattaggccacgtttccggctaattttttaaaaagtgtttgtgatcctgtgaattccataacccaccaccttccttttccaactcttcaccttttaaatccactttccatctctccagaggaaagggcattgagagtagaggaagcaagtccctttcactaaagcagcctggtttgaaaaagccggtaatctctgaactgtctcttgcttgaacaagaaaaactccctctgaaatacctttttctccttgtgatagcaacagaaaccaagcagcaacagcccttggaaagaggctaaatttttcttgacttctgcagcaacaaagaccgtgaaaagttggcacttctggcctaacgctgccgtcatcctacccctcaccccagggcaacccaggctggacatttagtgcctccctctttattcctctgtgatcatccagatcagcacttgactgtttattttcaaatctcacgaacctcaccccaagatcttcacattctggatctcagctgctcttgaaggacagtgacttgttaccaccgcaacagcagagcctgccatccccaacagatcaccagttgtccctgacatcgtgccctaccttgtctccctttgtggtctcctaaatgcccatctcgttggccttggttcggctagtggtatggaggggtgctgcctagcactgacctgagagtgtgtgtgacccactgacccaatggacatcaaaggccagttctggaatgatgacgactcggagggagataatgaatcagaggaatttctctatggcgttcaggggagctgtgcagctgacctgtatcgacacccacagcttgatgcagacattgaagccgtgaaggagatctacagtgagaactctgtatccatcagagaatatggaactatcgatgacgtggacattgacctccacatcaacatcagcttcctcgatgaggaagtctctacagcctggaaggtcctccggacagaacctattgtgttgaggctgcgattttctctctcccagtacctagatggaccagaaccatccattgaggttttccagccatcaaataaggaaggatttgggctgggtcttcagttgaaaaagatcctgggtatgtttacatcccaacaatggaaacatctgagcaatgatttcttgaagacccagcaggagaagaggcacagttggttcaaggcaagtggtaccatcaagaagttccgagctggcctcagcatcttttcacccatccccaagtctcccagtttccctatcatacaggactccatgctgaaaggcaaactaggtgtaccagagcttcgggttgggcgcctcatgaaccgttccatctcctgtaccatgaagaaccccaaagtggaagtgtttggctaccctcccagcccccaggcaggtctcctgtgccctcagcacgtgggcctccctcccccagcacggacctctcctttggtcagtggtcactgcaagaacattcccactctggagtatggattcctcgttcagatcatgaagtatgcagaacagaggattccaacattgaatgagtactgtgtggtgtgtgatgagcagcatgtcttccaaaatggatctatgctgaagccagctgtctgtactcgtgaactatgcgttttctccttctacacactgggcgtcatgtctggagctgcagaggaggtggccactggagcagaggtggtggatctgctggtggccatgtgtagggcagctttagagtcccctagaaagagcatcatctttgagccttatccctctgtggtggaccccactgatcccaagactctggcctttaaccctaagaagaagaattatgagcggcttcagaaagctctggatagtgtgatgtctattcgggagatgacccagggctcatatttggaaatcaagaaacagatggacaagttggatcccctggcccatcctctcctgcagtggatcatctctagcaacaggtcacacattgtcaaactacctctcagcaggcagctgaagttcatgcacacctcacaccagttcctcctgctgagcagccctcctgccaaggaggctcggttccggaccgccaagaagctctatggcagcacctttgccttccatgggtcccacattgagaactggcattcgatcctgcgcaatgggctggtcaatgcatcctacaccaaactgcagctgcatggagcagcctatggcaaaggcatctacctgagccccatctccagtatttcctttggatactcaggaatgggaaaaggacagcacaggatgccctccaaggatgagctggtccagagatacaacaggatgaataccatcccccagacccgatccattcagtcacggttcctgcagagtcggaatctaaactgtatagcactttgtgaagtgattacatctaaggacctccagaagcatgggaacatctgggtgtgccctgtgtccgaccatgtctgcacaagattcttctttgtatatgaggatggtcaggtgggcgatgccaacattaatactcaggaccccaagatacagaaggaaatcatgcgtgtgatcggaactcaggtttacacaaactgagggggccccagccctcgtaccacccctgttaccccaggatccatctgccctcataaaagtgttcaggtacagcagctgaggctgccctgaggaatcaaggggccattaccaaggggcaggaaaaggatatgtaagaggtggccttcatggtagagcttgacccaagaactactccacattcggatggcccagactgactccatcccctgactttccctttgacttcaccctgtttgtaaataaaacaataaaatggaaggtgctgtggactgga

SEQ ID NO: 299322 - DNA, 3997 bp, Homo sapiens
gaatttttaaaagcccgaggtgttcgacttccattgtcgaaccagagaatcctgcagtcagcaaggcctcaggacttccctcagtctctacctgccggccccaacctccggcgaggggactccctcccggcctacaggcaacctgggttgcccttcctgcttgttcctcccaaccactcggggcgctaaatgcaagtattctcctttggaaggctccccgcactcccccagagtccctgttccttctccactgcctcccctacccacggcgcaggcgccaccccccactccgcaccctttcccgactagcgaccgccgcgcaggcgtctcagggctggcgtcggctgctgaggcgcgcccaggagcaggccgtcaggctgttggtcaggagcgggccacgtgccatcgtgtcaccgcgcgagcgtgcgcagagtggctgagcgcgcccgtgacggaacgacgaggcgtggggtgcgcgacctcgcccgccaggcccggcccccgccccttggcctgccgctccgcccccgcggggcgtcccgggccgctcgtcccgtcggctgcggccgcgcgcggcccggggtcgccgtgagtactcgccaggctggcctgtgtggccgccaccacgggcacagggcggtgcggccgggccacgggaagggtgcggggctcgccccgtctccgcaggggtggacgaagtgagaggcttggaccgggaggttctgagggcccctcctaggctggacaggcttcactcaggcccggcggccgggcggcatagatcgggcccagagcgtctttcctggggaggcaggtgttgggtgtttttggggtcttcaggggagccccggagaacaggtgtaactgcttccccgggagaggcctcagggcctgtcctggaagcacgggtgccagagagtgttttcgcggggcagccgtatcctctctccctgcggggtgcccgagatagcgctaacctgcgggagtcgcccctcagtgattcttcctagtagtctttgtttagtggcctactcctgagaagggagcacacgggatggagtggagtaacctcctccaggaccacaaagccgggagcccaacccacaatttaaacattgagctctgaagctgctttgactagacgtgaagttgtcacacctagagaagcgcccatggacctagggaaagacctttgtgatccagacttgaggctcatttacatttgacttattctcgtggaaactcataaagcgttctatattagccgctgagttttaacaccttctctggacactcatcatatagtctatttttggcccaacttcttttgaaagggcccattctttacctcatttagataaatcagataggtctttcttgcttacttcattaacaactcaattaattataaccacatcacatgaagattagatgtaattaggacctgtccaatgtctttacatcccagtccttctgtactcctaaccttaagcaaattggtcgacctctgtaggtctaagtattctgtgtgtaacatgaaagctttgaattaggccacgtttccggctaattttttaaaaagtgtttgtgatcctgtgaattccataacccaccaccttccttttccaactcttcaccttttaaatccactttccatctctccagaggaaagggcattgagagtagaggaagcaagtccctttcactaaagcagcctggtttgaaaaagccggtaatctctgaactgtctcttgcttgaacaagaaaaactccctctgaaatacctttttctccttgtgatagcaacagaaaccaagcagcaacagcccttggaaagaggctaaatttttcttgacttctgcagcaacaaagaccgtgaaaagttggcacttctggcctaacgctgccgtcatcctacccctcaccccagggcaacccaggctggacatttagtgcctccctctttattcctctgtgatcatccagatcagcacttgactgtttattttcaaatctcacgaacctcaccccaagatcttcacattctggatctcagctgctcttgaaggacagtgacttgttaccaccgcaacagcagagcctgccatccccaacagatcaccagttgtccctgacatcgtgccctaccttgtctccctttgtggtctcctaaatgcccatctcgttggccttggttcggctagtggtatggaggggtgctgcctagcactgacctgagagtgtgtgtgacccactgacccaatggacatcaaaggccagttctggaatgatgacgactcggagggagataatgaatcagaggaatttctctatggcgttcaggggagctgtgcagctgacctgtatcgacacccacagcttgatgcagacattgaagccgtgaaggagatctacagtgagaactctgtatccatcagagaatatggaactatcgatgacgtggacattgacctccacatcaacatcagcttcctcgatgaggaagtctctacagcctggaaggtcctccggacagaacctattgtgttgaggctgcgattttctctctcccagtacctagatggaccagaaccatccattgaggttttccagccatcaaataaggaaggatttgggctgggtcttcagttgaaaaagatcctgggtatgtttacatcccaacaatggaaacatctgagcaatgatttcttgaagacccagcaggagaagaggcacagttggttcaaggcaagtggtaccatcaagaagttccgagctggcctcagcatcttttcacccatccccaagtctcccagtttccctatcatacaggactccatgctgaaaggcaaactaggtgtaccagagcttcgggttgggcgcctcatgaaccgttccatctcctgtaccatgaagaaccccaaagtggaagtgtttggctaccctcccagcccccaggtcagtggtcactgcaagaacattcccactctggagtatggattcctcgttcagatcatgaagtatgcagaacagaggattccaacattgaatgagtactgtgtggtgtgtgatgagcagcatgtcttccaaaatggatctatgctgaagccagctgtctgtactcgtgaactatgcgttttctccttctacacactgggcgtcatgtctggagctgcagaggaggtggccactggagcagagggctcatatttggaaatcaagaaacagatggacaagttggatcccctggcccatcctctcctgcagtggatcatctctagcaacaggtcacacattgtcaaactacctctcagcaggtgggtcccacattgagaactggcattcgatcctgcgcaatgggctggtcaatgcatcctacaccaaactgcaggaatgggaaaaggacagcacaggatgccctccaaggatgagctggtccagagatacaacaggatgaataccatcccccagacccgatccattcagtcacggttcctgcagagtcggaatctaaactgtatagcactttgtgaagtgattacatctaaggacctccagaagcatgggaacatctgggtgtgccctgtgtccgaccatgtctgcacaagattcttctttgtatatgaggatggtcaggtgggcgatgccaacattaatactcaggaccccaagatacagaaggaaatcatgcgtgtgatcggaactcaggtttacacaaactgagggggccccagccctcgtaccacccctgttaccccaggatccatctgccctcataaaagtgttcaggtacagcagctgaggctgccctgaggaatcaaggggccattaccaaggggcaggaaaaggatatgtaagaggtggccttcatggtagagcttgacccaagaactactccacattcggatggcccagactgactccatcccctgactttccctttgacttcaccctgtttgtaaataaaacaataaaatggaaggtgctgtggactgga

SEQ ID NO: 299323 - DNA, 4351 bp, Homo sapiens
gaatttttaaaagcccgaggtgttcgacttccattgtcgaaccagagaatcctgcagtcagcaaggcctcaggacttccctcagtctctacctgccggccccaacctccggcgaggggactccctcccggcctacaggcaacctgggttgcccttcctgcttgttcctcccaaccactcggggcgctaaatgcaagtattctcctttggaaggctccccgcactcccccagagtccctgttccttctccactgcctcccctacccacggcgcaggcgccaccccccactccgcaccctttcccgactagcgaccgccgcgcaggcgtctcagggctggcgtcggctgctgaggcgcgcccaggagcaggccgtcaggctgttggtcaggagcgggccacgtgccatcgtgtcaccgcgcgagcgtgcgcagagtggctgagcgcgcccgtgacggaacgacgaggcgtggggtgcgcgacctcgcccgccaggcccggcccccgccccttggcctgccgctccgcccccgcggggcgtcccgggccgctcgtcccgtcggctgcggccgcgcgcggcccggggtcgccgtgagtactcgccaggctggcctgtgtggccgccaccacgggcacagggcggtgcggccgggccacgggaagggtgcggggctcgccccgtctccgcaggggtggacgaagtgagaggcttggaccgggaggttctgagggcccctcctaggctggacaggcttcactcaggcccggcggccgggcggcatagatcgggcccagagcgtctttcctggggaggcaggtgttgggtgtttttggggtcttcaggggagccccggagaacaggtgtaactgcttccccgggagaggcctcagggcctgtcctggaagcacgggtgccagagagtgttttcgcggggcagccgtatcctctctccctgcggggtgcccgagatagcgctaacctgcgggagtcgcccctcagtgattcttcctagtagtctttgtttagtggcctactcctgagaagggagcacacgggatggagtggagtaacctcctccaggaccacaaagccgggagcccaacccacaatttaaacattgagctctgaagctgctttgactagacgtgaagttgtcacacctagagaagcgcccatggacctagggaaagacctttgtgatccagacttgaggctcatttacatttgacttattctcgtggaaactcataaagcgttctatattagccgctgagttttaacaccttctctggacactcatcatatagtctatttttggcccaacttcttttgaaagggcccattctttacctcatttagataaatcagataggtctttcttgcttacttcattaacaactcaattaattataaccacatcacatgaagattagatgtaattaggacctgtccaatgtctttacatcccagtccttctgtactcctaaccttaagcaaattggtcgacctctgtaggtctaagtattctgtgtgtaacatgaaagctttgaattaggccacgtttccggctaattttttaaaaagtgtttgtgatcctgtgaattccataacccaccaccttccttttccaactcttcaccttttaaatccactttccatctctccagaggaaagggcattgagagtagaggaagcaagtccctttcactaaagcagcctggtttgaaaaagccggtaatctctgaactgtctcttgcttgaacaagaaaaactccctctgaaatacctttttctccttgtgatagcaacagaaaccaagcagcaacagcccttggaaagaggctaaatttttcttgacttctgcagcaacaaagaccgtgaaaagttggcacttctggcctaacgctgccgtcatcctacccctcaccccagggcaacccaggctggacatttagtgcctccctctttattcctctgtgatcatccagatcagcacttgactgtttattttcaaatctcacgaacctcaccccaagatcttcacattctggatctcagctgctcttgaaggacagtgacttgttaccaccgcaacagcagagcctgccatccccaacagatcaccagttgtccctgacatcgtgccctaccttgtctccctttgtggtctcctaaatgcccatctcgttggccttggttcggctagtggtatggaggggtgctgcctagcactgacctgagagtgtgtgtgacccactgacccaatggacatcaaaggccagttctggaatgatgacgactcggagggagataatgaatcagaggaatttctctatggcgttcaggggagctgtgcagctgacctgtatcgacacccacagcttgatgcagacattgaagccgtgaaggagatctacagtgagaactctgtatccatcagagaatatggaactatcgatgacgtggacattgacctccacatcaacatcagcttcctcgatgaggaagtctctacagcctggaaggtcctccggacagaacctattgtgttgaggctgcgattttctctctcccagtacctagatggaccagaaccatccattgaggttttccagccatcaaataaggaaggatttgggctgggtcttcagttgaaaaagatcctgggtatgtttacatcccaacaatggaaacatctgagcaatgatttcttgaagacccagcaggagaagaggcacagttggttcaaggcaagtggtaccatcaagaagttccgagctggcctcagcatcttttcacccatccccaagtctcccagtttccctatcatacaggactccatgctgaaaggcaaactaggtgtaccagagcttcgggttgggcgcctcatgaaccgttccatctcctgtaccatgaagaaccccaaagtggaagtgtttggctaccctcccagcccccaggtcagtggtcactgcaagaacattcccactctggagtatggattcctcgttcagatcatgaagtatgcagaacagaggattccaacattgaatgagtactgtgtggtgtgtgatgagcagcatgtcttccaaaatggatctatgctgaagccagctgtctgtactcgtgaactatgcgttttctccttctacacactgggcgtcatgtctggagctgcagaggaggtggccactggagcagaggtggtggatctgctggtggccatgtgtagggcagctttagagtcccctagaaagagcatcatctttgagccttatccctctgtggtggaccccactgatcccaagactctggcctttaaccctaagaagaagaattatgagcggcttcagaaagctctggatagtgtgatgtctattcgggagatgacccagggctcatatttggaaatcaagaaacagatggacaagttggatcccctggcccatcctctcctgcagtggatcatctctagcaacaggtcacacattgtcaaactacctctcagcaggcagctgaagttcatgcacacctcacaccagttcctcctgctgagcagccctcctgccaaggaggctcggttccggaccgccaagaagctctatggcagcacctttgccttccatgggtcccacattgagaactggcattcgatcctgcgcaatgggctggtcaatgcatcctacaccaaactgcaggaatgggaaaaggacagcacaggatgccctccaaggatgagctggtccagagatacaacaggatgaataccatcccccagacccgatccattcagtcacggttcctgcagagtcggaatctaaactgtatagcactttgtgaagtgattacatctaaggacctccagaagcatgggaacatctgggtgtgccctgtgtccgaccatgtctgcacaagattcttctttgtatatgaggatggtcaggtgggcgatgccaacattaatactcaggaccccaagatacagaaggaaatcatgcgtgtgatcggaactcaggtttacacaaactgagggggccccagccctcgtaccacccctgttaccccaggatccatctgccctcataaaagtgttcaggtacagcagctgaggctgccctgaggaatcaaggggccattaccaaggggcaggaaaaggatatgtaagaggtggccttcatggtagagcttgacccaagaactactccacattcggatggcccagactgactccatcccctgactttccctttgacttcaccctgtttgtaaataaaacaataaaatggaaggtgctgtggactggaaaaaaaccgccaccaaaggcgaacaacaaagacaacaaaacaaaggggg

SEQ ID NO: 299324 - DNA, 5048 bp, Homo sapiens
gaatttttaaaagcccgaggtgttcgacttccattgtcgaaccagagaatcctgcagtcagcaaggcctcaggacttccctcagtctctacctgccggccccaacctccggcgaggggactccctcccggcctacaggcaacctgggttgcccttcctgcttgttcctcccaaccactcggggcgctaaatgcaagtattctcctttggaaggctccccgcactcccccagagtccctgttccttctccactgcctcccctacccacggcgcaggcgccaccccccactccgcaccctttcccgactagcgaccgccgcgcaggcgtctcagggctggcgtcggctgctgaggcgcgcccaggagcaggccgtcaggctgttggtcaggagcgggccacgtgccatcgtgtcaccgcgcgagcgtgcgcagagtggctgagcgcgcccgtgacggaacgacgaggcgtggggtgcgcgacctcgcccgccaggcccggcccccgccccttggcctgccgctccgcccccgcggggcgtcccgggccgctcgtcccgtcggctgcggccgcgcgcggcccggggtcgccgtgagtactcgccaggctggcctgtgtggccgccaccacgggcacagggcggtgcggccgggccacgggaagggtgcggggctcgccccgtctccgcaggggtggacgaagtgagaggcttggaccgggaggttctgagggcccctcctaggctggacaggcttcactcaggcccggcggccgggcggcatagatcgggcccagagcgtctttcctggggaggcaggtgttgggtgtttttggggtcttcaggggagccccggagaacaggtgtaactgcttccccgggagaggcctcagggcctgtcctggaagcacgggtgccagagagtgttttcgcggggcagccgtatcctctctccctgcggggtgcccgagatagcgctaacctgcgggagtcgcccctcagtgattcttcctagtagtctttgtttagtggcctactcctgagaagggagcacacgggatggagtggagtaacctcctccaggaccacaaagccgggagcccaacccacaatttaaacattgagctctgaagctgctttgactagacgtgaagttgtcacacctagagaagcgcccatggacctagggaaagacctttgtgatccagacttgaggctcatttacatttgacttattctcgtggaaactcataaagcgttctatattagccgctgagttttaacaccttctctggacactcatcatatagtctatttttggcccaacttcttttgaaagggcccattctttacctcatttagataaatcagataggtctttcttgcttacttcattaacaactcaattaattataaccacatcacatgaagattagatgtaattaggacctgtccaatgtctttacatcccagtccttctgtactcctaaccttaagcaaattggtcgacctctgtaggtctaagtattctgtgtgtaacatgaaagctttgaattaggccacgtttccggctaattttttaaaaagtgtttgtgatcctgtgaattccataacccaccaccttccttttccaactcttcaccttttaaatccactttccatctctccagaggaaagggcattgagagtagaggaagcaagtccctttcactaaagcagcctggtttgaaaaagccggtaatctctgaactgtctcttgcttgaacaagaaaaactccctctgaaatacctttttctccttgtgatagcaacagaaaccaagcagcaacagcccttggaaagaggctaaatttttcttgacttctgcagcaacaaagaccgtgaaaagttggcacttctggcctaacgctgccgtcatcctacccctcaccccagggcaacccaggctggacatttagtgcctccctctttattcctctgtgatcatccagatcagcacttgactgtttattttcaaatctcacgaacctcaccccaagatcttcacattctggatctcagctgctcttgaaggacagtgacttgttaccaccgcaacagcagagcctgccatccccaacagatcaccagttgtccctgacatcgtgccctaccttgtctccctttgtggtctcctaaatgcccatctcgttggccttggttcggctagtggtatggaggggtgctgcctagcactgacctgagagtgtgtgtgacccactgacccaatggacatcaaaggccagttctggaatgatgacgactcggagggagataatgaatcagaggaatttctctatggcgttcaggggagctgtgcagctgacctgtatcgacacccacagcttgatgcagacattgaagccgtgaaggagatctacagtgagaactctgtatccatcagagaatatggaactatcgatgacgtggacattgacctccacatcaacatcagcttcctcgatgaggaagtctctacagcctggaaggtcctccggacagaacctattgtgttgaggctgcgattttctctctcccagtacctagatggaccagaaccatccattgaggttttccagccatcaaataaggaaggatttgggctgggtcttcagttgaaaaagatcctgggtatgtttacatcccaacaatggaaacatctgagcaatgatttcttgaagacccagcaggagaagaggcacagttggttcaaggcaagtggtaccatcaagaagttccgagctggcctcagcatcttttcacccatccccaagtctcccagtttccctatcatacaggactccatgctgaaaggcaaactaggtgtaccagagcttcgggttgggcgcctcatgaaccgttccatctcctgtaccatgaagaaccccaaagtggaagtgtttggctaccctcccagcccccaggtcagtggtcactgcaagaacattcccactctggagtatggattcctcgttcagatcatgaagtatgcagaacagaggattccaacattgaatgagtactgtgtggtgtgtgatgagcagcatgtcttccaaaatggatctatgctgaagccagctgtctgtactcgtgaactatgcgttttctccttctacacactgggcgtcatgtctggagctgcagaggaggtggccactggagcagaggtggtggatctgctggtggccatgtgtagggcagctttagagtcccctagaaagagcatcatctttgagccttatccctctgtggtggaccccactgatcccaagactctggcctttaaccctaagaagaagaattatgagcggcttcagaaagctctggatagtgtgatgtctattcgggagatgacccagggctcatatttggaaatcaagaaacagatggacaagttggatcccctggcccatcctctcctgcagtggatcatctctagcaacaggtcacacattgtcaaactacctctcagcaggcagctgaagttcatgcacacctcacaccagttcctcctgctgagcagccctcctgccaaggaggctcggttccggaccgccaagaagctctatggcagcacctttgccttccatgggtcccacattgagaactggcattcgatcctgcgcaatgggctggtcaatgcatcctacaccaaactgcaggaatgggaaaaggacagcacaggatgccctccaaggatgagctggtccagagatacaacaggatgaataccatcccccagacccgatccattcagtcacggttcctgcagagtcggaatctaaactgtatagcactttgtgaagtgattacatctaaggacctccagaagcatgggaacatctgggtgtgccctgtgtccgaccatgtctgcacaagattcttctttgtatatgaggatggtcaggtgggcgatgccaacattaatactcaggaccccaagatacagaaggaaatcatgcgtgtgatcggaactcaggtttacacaaactgagggggccccagccctcgtaccacccctgttaccccaggatccatctgccctcataaaagtgttcaggtacagcagctgaggctgccctgaggaatcaaggggccattaccaaggggcaggaaaaggatatgtaagaggtggccttcatggtagagcttgacccaagaactactccacattcggatggcccagactgactccatcccctgactttccctttgacttcaccctgtttgtaaataaaacaataaaatggaaggtgctgtggactggaacaacagaacaacagaaacaacaaacaactgaaatcacaacacacaaacactagaaacacacacaacaaacaaacggggggccctccttaaaaaatcacccccaaaggaggagcccaatagacataacgacactcacccacaaagtatttttagtgaataaccagaaaggtgcccccacaatagagtggcacgggcgggacaagatttattttaacatgaatcttggagcgaaagtgcgtagctctcgaccgatccttttatctcaaccacaatcaagactgtgaactgcaatccggtggagaaaaaaaacaacgtggatggaataatgcatggagacaactctactcttcaggtgaaagtcgaagcaaccctccctcgtccatccccacctgccagtcacgactgcaccagtcagcccaatccccacaaactgcttcaccacaatatcaacaataactccctatacccacgtcgagaaggcacacgatcgtctcctcgcagctccgcgacccaacgtagcggtgaagatatacataatatcaataattcacatatcttcatataggtagatgattctgtcagtataatacagatctctgtcatgacataaagataacatgctcaagtccacggtccgtgtaactcataccatacgtagccagtgccgcgaccctgtgtcgtccacaagatacagatttatttgcgtgctgcagttgtccgaacagaggtgcggtccgactgttca

SEQ ID NO: 299325 - DNA, 4304 bp, Homo sapiens
gaatttttaaaagcccgaggtgttcgacttccattgtcgaaccagagaatcctgcagtcagcaaggcctcaggacttccctcagtctctacctgccggccccaacctccggcgaggggactccctcccggcctacaggcaacctgggttgcccttcctgcttgttcctcccaaccactcggggcgctaaatgcaagtattctcctttggaaggctccccgcactcccccagagtccctgttccttctccactgcctcccctacccacggcgcaggcgccaccccccactccgcaccctttcccgactagcgaccgccgcgcaggcgtctcagggctggcgtcggctgctgaggcgcgcccaggagcaggccgtcaggctgttggtcaggagcgggccacgtgccatcgtgtcaccgcgcgagcgtgcgcagagtggctgagcgcgcccgtgacggaacgacgaggcgtggggtgcgcgacctcgcccgccaggcccggcccccgccccttggcctgccgctccgcccccgcggggcgtcccgggccgctcgtcccgtcggctgcggccgcgcgcggcccggggtcgccgtgagtactcgccaggctggcctgtgtggccgccaccacgggcacagggcggtgcggccgggccacgggaagggtgcggggctcgccccgtctccgcaggggtggacgaagtgagaggcttggaccgggaggttctgagggcccctcctaggctggacaggcttcactcaggcccggcggccgggcggcatagatcgggcccagagcgtctttcctggggaggcaggtgttgggtgtttttggggtcttcaggggagccccggagaacaggtgtaactgcttccccgggagaggcctcagggcctgtcctggaagcacgggtgccagagagtgttttcgcggggcagccgtatcctctctccctgcggggtgcccgagatagcgctaacctgcgggagtcgcccctcagtgattcttcctagtagtctttgtttagtggcctactcctgagaagggagcacacgggatggagtggagtaacctcctccaggaccacaaagccgggagcccaacccacaatttaaacattgagctctgaagctgctttgactagacgtgaagttgtcacacctagagaagcgcccatggacctagggaaagacctttgtgatccagacttgaggctcatttacatttgacttattctcgtggaaactcataaagcgttctatattagccgctgagttttaacaccttctctggacactcatcatatagtctatttttggcccaacttcttttgaaagggcccattctttacctcatttagataaatcagataggtctttcttgcttacttcattaacaactcaattaattataaccacatcacatgaagattagatgtaattaggacctgtccaatgtctttacatcccagtccttctgtactcctaaccttaagcaaattggtcgacctctgtaggtctaagtattctgtgtgtaacatgaaagctttgaattaggccacgtttccggctaattttttaaaaagtgtttgtgatcctgtgaattccataacccaccaccttccttttccaactcttcaccttttaaatccactttccatctctccagaggaaagggcattgagagtagaggaagcaagtccctttcactaaagcagcctggtttgaaaaagccggtaatctctgaactgtctcttgcttgaacaagaaaaactccctctgaaatacctttttctccttgtgatagcaacagaaaccaagcagcaacagcccttggaaagaggctaaatttttcttgacttctgcagcaacaaagaccgtgaaaagttggcacttctggcctaacgctgccgtcatcctacccctcaccccagggcaacccaggctggacatttagtgcctccctctttattcctctgtgatcatccagatcagcacttgactgtttattttcaaatctcacgaacctcaccccaagatcttcacattctggatctcagctgctcttgaaggacagtgacttgttaccaccgcaacagcagagcctgccatccccaacagatcaccagttgtccctgacatcgtgccctaccttgtctccctttgtggtctcctaaatgcccatctcgttggccttggttcggctagtggtatggaggggtgctgcctagcactgacctgagagtgtgtgtgacccactgacccaatggacatcaaaggccagttctggaatgatgacgactcggagggagataatgaatcagaggaatttctctatggcgttcaggggagctgtgcagctgacctgtatcgacacccacagcttgatgcagacattgaagccgtgaaggagatctacagtgagaactctgtatccatcagagaatatggaactatcgatgacgtggacattgacctccacatcaacatcagcttcctcgatgaggaagtctctacagcctggaaggtcctccggacagaacctattgtgttgaggctgcgattttctctctcccagtacctagatggaccagaaccatccattgaggttttccagccatcaaataaggaaggatttgggctgggtcttcagttgaaaaagatcctgggtatgtttacatcccaacaatggaaacatctgagcaatgatttcttgaagacccagcaggagaagaggcacagttggttcaaggcaagtggtaccatcaagaagttccgagctggcctcagcatcttttcacccatccccaagtctcccagtttccctatcatacaggactccatgctgaaaggcaaactaggtgtaccagagcttcgggttgggcgcctcatgaaccgttccatctcctgtaccatgaagaaccccaaagtggaagtgtttggctaccctcccagcccccaggtcagtggtcactgcaagaacattcccactctggagtatggattcctcgttcagatcatgaagtatgcagaacagaggattccaacattgaatgagtactgtgtggtgtgtgatgagcagcatgtcttccaaaatggatctatgctgaagccagctgtctgtactcgtgaactatgcgttttctccttctacacactgggcgtcatgtctggagctgcagaggaggtggccactggagcagaggtggtggatctgctggtggccatgtgtagggcagctttagagtcccctagaaagagcatcatctttgagccttatccctctgtggtggaccccactgatcccaagactctggcctttaaccctaagaagaagaattatgagcggcttcagaaagctctggatagtgtgatgtctattcgggagatgacccagggctcatatttggaaatcaagaaacagatggacaagttggatcccctggcccatcctctcctgcagtggatcatctctagcaacaggtcacacattgtcaaactacctctcagcaggcagctgaagttcatgcacacctcacaccagttcctcctgctgagcagccctcctgccaaggaggctcggttccggaccgccaagaagctctatggcagcacctttgccttccatgggtcccacattgagaactggcattcgatcctgcgcaatgggctggtcaatgcatcctacaccaaactgcaggaatgggaaaaggacagcacaggatgccctccaaggatgagctggtccagagatacaacaggatgaataccatcccccagacccgatccattcagtcacggttcctgcagagtcggaatctaaactgtatagcactttgtgaagtgattacatctaaggacctccagaagcatgggaacatctgggtgtgccctgtgtccgaccatgtctgcacaagattcttctttgtatatgaggatggtcaggtgggcgatgccaacattaatactcaggaccccaagatacagaaggaaatcatgcgtgtgatcggaactcaggtttacacaaactgagggggccccagccctcgtaccacccctgttaccccaggatccatctgccctcataaaagtgttcaggtacagcagctgaggctgccctgaggaatcaaggggccattaccaaggggcaggaaaaggatatgtaagaggtggccttcatggtagagcttgacccaagaactactccacattcggatggcccagactgactccatcccctgactttccctttgacttcaccctgcctcgatcccttccccccacaaggcaatgaatttcgttttttta

SEQ ID NO: 299326 - DNA, 989 bp, Homo sapiens
cagatgaatttattgaatttgaaatgtcaggataatgggcaaataaaaatactgaaccagcagttgaggatttaggatgggagtagctgaagcaccgaagagaggatgggactggaaatagagacgtagagtttaaccacacacacacatcttgcatgcctgtgactgtatccatgtgcatgtccatcactaggtgtacctgtccatcttcatgtcctgtgtgggtgagaatgggtgggaatggcagtcttgggagtgttcctgggaacctcatatcataaggagacatgtattctaccctgccttacagtgggtcccacattgagaactggcattcgatcctgcgcaatgggctggtcaatgcatcctacaccaaactgcaggaatgggaaaaggacagcacaggatgccctccaaggatgagctggtccagagatacaacaggatgaataccatcccccagacccgatccattcagtcacggttcctgcagagtcggaatctaaactgtatagcactttgtgaagtgattacatctaaggacctccagaagcatgggaacatctgggtgtgccctgtgtccgaccatgtctgcacaagattcttctttgtatatgaggatggtcaggtgggcgatgccaacattaatactcaggaccccaagatacagaaggaaatcatgcgtgtgatcggaactcaggtttacacaaactgagggggccccagccctcgtaccacccctgttaccccaggatccatctgccctcataaaagtgttcaggtacagcagctgaggctgccctgaggaatcaaggggccattaccaaggggcaggaaaaggatatgtaagaggtggccttcatggtagagcttgacccaagaactactccacattcggatggcccagactgactccatcccctgactttccctttgacttcaccctgtttgtaaataaaacaataaaatggaaggtgctgtggactgga

SEQ ID NO: 299327 - DNA, 4645 bp, Homo sapiens
gaatttttaaaagcccgaggtgttcgacttccattgtcgaaccagagaatcctgcagtcagcaaggcctcaggacttccctcagtctctacctgccggccccaacctccggcgaggggactccctcccggcctacaggcaacctgggttgcccttcctgcttgttcctcccaaccactcggggcgctaaatgcaagtattctcctttggaaggctccccgcactcccccagagtccctgttccttctccactgcctcccctacccacggcgcaggcgccaccccccactccgcaccctttcccgactagcgaccgccgcgcaggcgtctcagggctggcgtcggctgctgaggcgcgcccaggagcaggccgtcaggctgttggtcaggagcgggccacgtgccatcgtgtcaccgcgcgagcgtgcgcagagtggctgagcgcgcccgtgacggaacgacgaggcgtggggtgcgcgacctcgcccgccaggcccggcccccgccccttggcctgccgctccgcccccgcggggcgtcccgggccgctcgtcccgtcggctgcggccgcgcgcggcccggggtcgccgtgagtactcgccaggctggcctgtgtggccgccaccacgggcacagggcggtgcggccgggccacgggaagggtgcggggctcgccccgtctccgcaggggtggacgaagtgagaggcttggaccgggaggttctgagggcccctcctaggctggacaggcttcactcaggcccggcggccgggcggcatagatcgggcccagagcgtctttcctggggaggcaggtgttgggtgtttttggggtcttcaggggagccccggagaacaggtgtaactgcttccccgggagaggcctcagggcctgtcctggaagcacgggtgccagagagtgttttcgcggggcagccgtatcctctctccctgcggggtgcccgagatagcgctaacctgcgggagtcgcccctcagtgattcttcctagtagtctttgtttagtggcctactcctgagaagggagcacacgggatggagtggagtaacctcctccaggaccacaaagccgggagcccaacccacaatttaaacattgagctctgaagctgctttgactagacgtgaagttgtcacacctagagaagcgcccatggacctagggaaagacctttgtgatccagacttgaggctcatttacatttgacttattctcgtggaaactcataaagcgttctatattagccgctgagttttaacaccttctctggacactcatcatatagtctatttttggcccaacttcttttgaaagggcccattctttacctcatttagataaatcagataggtctttcttgcttacttcattaacaactcaattaattataaccacatcacatgaagattagatgtaattaggacctgtccaatgtctttacatcccagtccttctgtactcctaaccttaagcaaattggtcgacctctgtaggtctaagtattctgtgtgtaacatgaaagctttgaattaggccacgtttccggctaattttttaaaaagtgtttgtgatcctgtgaattccataacccaccaccttccttttccaactcttcaccttttaaatccactttccatctctccagaggaaagggcattgagagtagaggaagcaagtccctttcactaaagcagcctggtttgaaaaagccggtaatctctgaactgtctcttgcttgaacaagaaaaactccctctgaaatacctttttctccttgtgatagcaacagaaaccaagcagcaacagcccttggaaagaggctaaatttttcttgacttctgcagcaacaaagaccgtgaaaagttggcacttctggcctaacgctgccgtcatcctacccctcaccccagggcaacccaggctggacatttagtgcctccctctttattcctctgtgatcatccagatcagcacttgactgtttattttcaaatctcacgaacctcaccccaagatcttcacattctggatctcagctgctcttgaaggacagtgacttgttaccaccgcaacagcagagcctgccatccccaacagatcaccagttgtccctgacatcgtgccctaccttgtctccctttgtggtctcctaaatgcccatctcgttggccttggttcggctagtggtatggaggggtgctgcctagcactgacctgagagtgtgtgtgacccactgacccaatggacatcaaaggccagttctggaatgatgacgactcggagggagataatgaatcagaggaatttctctatggcgttcaggggagctgtgcagctgacctgtatcgacacccacagcttgatgcagacattgaagccgtgaaggagatctacagtgagaactctgtatccatcagagaatatggaactatcgatgacgtggacattgacctccacatcaacatcagcttcctcgatgaggaagtctctacagcctggaaggtcctccggacagaacctattgtgttgaggctgcgattttctctctcccagtacctagatggaccagaaccatccattgaggttttccagccatcaaataaggaaggatttgggctgggtcttcagttgaaaaagatcctgggtatgtttacatcccaacaatggaaacatctgagcaatgatttcttgaagacccagcaggagaagaggcacagttggttcaaggcaagtggtaccatcaagaagttccgagctggcctcagcatcttttcacccatccccaagtctcccagtttccctatcatacaggactccatgctgaaaggcaaactaggtgtaccagagcttcgggttgggcgcctcatgaaccgttccatctcctgtaccatgaagaaccccaaagtggaagtgtttggctaccctcccagcccccaggtcagtggtcactgcaagaacattcccactctggagtatggattcctcgttcagatcatgaagtatgcagaacagaggattccaacattgaatgagtactgtgtggtgtgtgatgagcagcatgtcttccaaaatggatctatgctgaagccagctgtctgtactcgtgaactatgcgttttctccttctacacactgggcgtcatgtctggagctgcagaggaggtggccactggagcagaggtggtggatctgctggtggccatgtgtagggcagctttagagtcccctagaaagagcatcatctttgagccttatccctctgtggtggaccccactgatcccaagactctggcctttaaccctaagaagaagaattatgagcggcttcagaaagctctggatagtgtgatgtctattcgggagatgacccagggctcatatttggaaatcaagaaacagatggacaagttggatcccctggcccatcctctcctgcagtggatcatctctagcaacaggtcacacattgtcaaactacctctcagcaggcagctgaagttcatgcacacctcacaccagttcctcctgctgagcagccctcctgccaaggaggctcggttccggaccgccaagaagctctatggcagcacctttgccttccatgggtcccacattgagaactggcattcgatcctgcgcaatgggctggtcaatgcatcctacaccaaactgcaggaatgggaaaaggacagcacaggatgccctccaaggatgagctggtccagagatacaacaggatgaataccatcccccagacccgatccattcagtcacggttcctgcagagtcggaatctaaactgtatagcactttgtgaagtgattacatctaaggacctccagaagcatgggaacatctgggtgtgccctgtgtccgaccatgtctgcacaagattcttctttgtgtaagtgtcggagggactctggggattactcgaggagtgaggttgggggtgtgatggtgtgtggctactgggaaaagtctatttctgttatctgagacatgtccttggctacctgagtggagctgtcactgggactttaccattggaggatgggaatgggtatagatggttgggatctatctagaggaaaccagataagctgaatatcttccactatgaagcagtgagaaagggctttgacttctgggatgggatggccataccttgaaatacagttccactgattgatgttattctggtattgttctccctcttatgctcacacttgccctatctttggcagatatgaggatggtcaggtgggcgatgccaacattaatactcaggaccccaagatacagaaggaaatcatgcgtgtgatcggaactcaggtttacacaaactgagggggccccagccctcgtaccacccctgttaccccaggatccatctgccctcataaaagtgttcaggtacagcagctgaggctgccctgaggaatcaaggggccattaccaaggggcaggaaaaggatatgtaagaggtggccttcatggtagagcttgacccaagaactactccacattcggatggcccagactgactccatcccctgactttccctttgacttcaccctgtttgtaaataaaacaataaaatggaaggtgctgtggactgga

SEQ ID NO: 299328 - DNA, 1077 bp, Homo sapiens
cggcttgatctgatcctagcttgcctcttctacatcatttctcaccactcctctgcaattcactattctctatgcaactaacacacactaccttatctttccttcaggccttctgtatcctattacttcttcccagacacttccccgctgtttatttaattaactcttcctaatcctgcagttctcagtctagctgtcaccacatgacttctttaaactcttaggctaggctagttgccctcctctaggctcacaccatgctctataatctgcatcacaaccccttaccatgctgtgttgttaattacttgttcttgcttgtaatttccagcagactaaattctgtgggggaaaataatcttctttgttttattctctgctgttttgatgagcatctagctcagtgctgggacatagtaggcactttcgtaaatttttgataaatgaagtgggtgtattgttctgtgacaggaatgggaaaaggacagcacaggatgccctccaaggatgagctggtccagagatacaacaggatgaataccatcccccagacccgatccattcagtcacggttcctgcagagtcggaatctaaactgtatagcactttgtgaagtgattacatctaaggacctccagaagcatgggaacatctgggtgtgccctgtgtccgaccatgtctgcacaagattcttctttgtatatgaggatggtcaggtgggcgatgccaacattaatactcaggaccccaagatacagaaggaaatcatgcgtgtgatcggaactcaggtttacacaaactgagggggccccagccctcgtaccacccctgttaccccaggatccatctgccctcataaaagtgttcaggtacagcagctgaggctgccctgaggaatcaaggggccattaccaaggggcaggaaaaggatatgtaagaggtggccttcatggtagagcttgacccaagaactactccacattcggatggcccagactgactccatcccctgactttccctttgacttcaccctgtttgtaaataaaacaataaaatggaaggtgctgtggactgga

SEQ ID NO: 299329 - DNA, 4103 bp, Homo sapiens
gaatttttaaaagcccgaggtgttcgacttccattgtcgaaccagagaatcctgcagtcagcaaggcctcaggacttccctcagtctctacctgccggccccaacctccggcgaggggactccctcccggcctacaggcaacctgggttgcccttcctgcttgttcctcccaaccactcggggcgctaaatgcaagtattctcctttggaaggctccccgcactcccccagagtccctgttccttctccactgcctcccctacccacggcgcaggcgccaccccccactccgcaccctttcccgactagcgaccgccgcgcaggcgtctcagggctggcgtcggctgctgaggcgcgcccaggagcaggccgtcaggctgttggtcaggagcgggccacgtgccatcgtgtcaccgcgcgagcgtgcgcagagtggctgagcgcgcccgtgacggaacgacgaggcgtggggtgcgcgacctcgcccgccaggcccggcccccgccccttggcctgccgctccgcccccgcggggcgtcccgggccgctcgtcccgtcggctgcggccgcgcgcggcccggggtcgccgtgagtactcgccaggctggcctgtgtggccgccaccacgggcacagggcggtgcggccgggccacgggaagggtgcggggctcgccccgtctccgcaggggtggacgaagtgagaggcttggaccgggaggttctgagggcccctcctaggctggacaggcttcactcaggcccggcggccgggcggcatagatcgggcccagagcgtctttcctggggaggcaggtgttgggtgtttttggggtcttcaggggagccccggagaacaggtgtaactgcttccccgggagaggcctcagggcctgtcctggaagcacgggtgccagagagtgttttcgcggggcagccgtatcctctctccctgcggggtgcccgagatagcgctaacctgcgggagtcgcccctcagtgattcttcctagtagtctttgtttagtggcctactcctgagaagggagcacacgggatggagtggagtaacctcctccaggaccacaaagccgggagcccaacccacaatttaaacattgagctctgaagctgctttgactagacgtgaagttgtcacacctagagaagcgcccatggacctagggaaagacctttgtgatccagacttgaggctcatttacatttgacttattctcgtggaaactcataaagcgttctatattagccgctgagttttaacaccttctctggacactcatcatatagtctatttttggcccaacttcttttgaaagggcccattctttacctcatttagataaatcagataggtctttcttgcttacttcattaacaactcaattaattataaccacatcacatgaagattagatgtaattaggacctgtccaatgtctttacatcccagtccttctgtactcctaaccttaagcaaattggtcgacctctgtaggtctaagtattctgtgtgtaacatgaaagctttgaattaggccacgtttccggctaattttttaaaaagtgtttgtgatcctgtgaattccataacccaccaccttccttttccaactcttcaccttttaaatccactttccatctctccagaggaaagggcattgagagtagaggaagcaagtccctttcactaaagcagcctggtttgaaaaagccggtaatctctgaactgtctcttgcttgaacaagaaaaactccctctgaaatacctttttctccttgtgatagcaacagaaaccaagcagcaacagcccttggaaagaggctaaatttttcttgacttctgcagcaacaaagaccgtgaaaagttggcacttctggcctaacgctgccgtcatcctacccctcaccccagggcaacccaggctggacatttagtgcctccctctttattcctctgtgatcatccagatcagcacttgactgtttattttcaaatctcacgaacctcaccccaagatcttcacattctggatctcagctgctcttgaaggacagtgacttgttaccaccgcaacagcagagcctgccatccccaacagatcaccagttgtccctgacatcgtgccctaccttgtctccctttgtggtctcctaaatgcccatctcgttggccttggttcggctagtggtatggaggggtgctgcctagcactgacctgagagtgtgtgtgacccactgacccaatggacatcaaaggccagttctggaatgatgacgactcggagggagataatgaatcagaggaatttctctatggcgttcaggggagctgtgcagctgacctgtatcgacacccacagcttgatgcagacattgaagccgtgaaggagatctacagtgagaactctgtatccatcagagaatatggaactatcgatgacgtggacattgacctccacatcaacatcagcttcctcgatgaggaagtctctacagcctggaaggtcctccggacagaacctattgtgttgaggctgcgattttctctctcccagtacctagatggaccagaaccatccattgaggttttccagccatcaaataaggaaggatttgggctgggtcttcagttgaaaaagatcctgggtatgtttacatcccaacaatggaaacatctgagcaatgatttcttgaagacccagcaggagaagaggcacagttggttcaaggcaagtggtaccatcaagaagttccgagctggcctcagcatcttttcacccatccccaagtctcccagtttccctatcatacaggactccatgctgaaaggcaaactaggtgtaccagagcttcgggttgggcgcctcatgaaccgttccatctcctgtaccatgaagaaccccaaagtggaagtgtttggctaccctcccagcccccaggtcagtggtcactgcaagaacattcccactctggagtatggattcctcgttcagatcatgaagtatgcagaacagaggattccaacattgaatgagtactgtgtggtgtgtgatgagcagcatgtcttccaaaatggatctatgctgaagccagctgtctgtactcgtgaactatgcgttttctccttctacacactgggcgtcatgtctggagctgcagaggaggtggccactggagcagaggtggtggatctgctggtggccatgtgtagggcagctttagagtcccctagaaagagcatcatctttgagccttatccctctgtggtggaccccactgatcccaagactctggcctttaaccctaagaagaagaattatgagcggcttcagaaagctctggatagtgtgatgtctattcgggagatgacccagggctcatatttggaaatcaagaaacagatggacaagttggatcccctggcccatcctctcctgcagtggatcatctctagcaacaggtcacacattgtcaaactacctctcagcaggcagctgaagttcatgcacacctcacaccagttcctcctgctgagcagccctcctgccaaggaggctcggttccggaccgccaagaagctctatggcagcacctttgccttccatgggtcccacattgagaactggcattcgatcctgcgcaatgggctggtcaatgcatcctacaccaaactgcaggaatgggaaaaggacagcacaggatgccctccaaggatgagctggtccagagatacaacaggatgaataccatcccccagacccgatccattcagtcacggttcctgcagagtcggaatctaaactgtatagcactttgtgaagtgattacatctaaggacctccagaagcatgggaacatctgggtgtgccctgtgtccgaccatgtctgcacaagattcttctttgtatatgaggatggtcaggtgggcgatgccaacattaatactcaggaccccaagatacagaaggaaatcatgcgtgtgatcggaactcaggtttacacaaactgagggggccccagccctcgtaccacatggtaacaccaagtgggctacgtcgggatcctctagatcagccgcagcatc

SEQ ID NO: 299330 - DNA, 3519 bp, Homo sapiens
gaatttttaaaagcccgaggtgttcgacttccattgtcgaaccagagaatcctgcagtcagcaaggcctcaggacttccctcagtctctacctgccggccccaacctccggcgaggggactccctcccggcctacaggcaacctgggttgcccttcctgcttgttcctcccaaccactcggggcgctaaatgcaagtattctcctttggaaggctccccgcactcccccagagtccctgttccttctccactgcctcccctacccacggcgcaggcgccaccccccactccgcaccctttcccgactagcgaccgccgcgcaggcgtctcagggctggcgtcggctgctgaggcgcgcccaggagcaggccgtcaggctgttggtcaggagcgggccacgtgccatcgtgtcaccgcgcgagcgtgcgcagagtggctgagcgcgcccgtgacggaacgacgaggcgtggggtgcgcgacctcgcccgccaggcccggcccccgccccttggcctgccgctccgcccccgcggggcgtcccgggccgctcgtcccgtcggctgcggccgcgcgcggcccggggtcgccgtgagtactcgccaggctggcctgtgtggccgccaccacgggcacagggcggtgcggccgggccacgggaagggtgcggggctcgccccgtctccgcaggggtggacgaagtgagaggcttggaccgggaggttctgagggcccctcctaggctggacaggcttcactcaggcccggcggccgggcggcatagatcgggcccagagcgtctttcctggggaggcaggtgttgggtgtttttggggtcttcaggggagccccggagaacaggtgtaactgcttccccgggagaggcctcagggcctgtcctggaagcacgggtgccagagagtgttttcgcggggcagccgtatcctctctccctgcggggtgcccgagatagcgctaacctgcgggagtcgcccctcagtgattcttcctagtagtctttgtttagtggcctactcctgagaagggagcacacgggatggagtggagtaacctcctccaggaccacaaagccgggagcccaacccacaatttaaacattgagctctgaagctgctttgactagacgtgaagttgtcacacctagagaagcgcccatggacctagggaaagacctttgtgatccagacttgaggctcatttacatttgacttattctcgtggaaactcataaagcgttctatattagccgctgagttttaacaccttctctggacactcatcatatagtctatttttggcccaacttcttttgaaagggcccattctttacctcatttagataaatcagataggtctttcttgcttacttcattaacaactcaattaattataaccacatcacatgaagattagatgtaattaggacctgtccaatgtctttacatcccagtccttctgtactcctaaccttaagcaaattggtcgacctctgtaggtctaagtattctgtgtgtaacatgaaagctttgaattaggccacgtttccggctaattttttaaaaagtgtttgtgatcctgtgaattccataacccaccaccttccttttccaactcttcaccttttaaatccactttccatctctccagaggaaagggcattgagagtagaggaagcaagtccctttcactaaagcagcctggtttgaaaaagccggtaatctctgaactgtctcttgcttgaacaagaaaaactccctctgaaatacctttttctccttgtgatagcaacagaaaccaagcagcaacagcccttggaaagaggctaaatttttcttgacttctgcagcaacaaagaccgtgaaaagttggcacttctggcctaacgctgccgtcatcctacccctcaccccagggcaacccaggctggacatttagtgcctccctctttattcctctgtgatcatccagatcagcacttgactgtttattttcaaatctcacgaacctcaccccaagatcttcacattctggatctcagctgctcttgaaggacagtgacttgttaccaccgcaacagcagagcctgccatccccaacagatcaccagttgtccctgacatcgtgccctaccttgtctccctttgtggtctcctaaatgcccatctcgttggccttggttcggctagtggtatggaggggtgctgcctagcactgacctgagagtgtgtgtgacccactgacccaatggacatcaaaggccagttctggaatgatgacgactcggagggagataatgaatcagaggaatttctctatggcgttcaggggagctgtgcagctgacctgtatcgacacccacagcttgatgcagacattgaagccgtgaaggagatctacagtgagaactctgtatccatcagagaatatggaactatcgatgacgtggacattgacctccacatcaacatcagcttcctcgatgaggaagtctctacagcctggaaggtcctccggacagaacctattgtgttgaggctgcgattttctctctcccagtacctagatggaccagaaccatccattgaggttttccagccatcaaataaggaaggatttgggctgggtcttcagttgaaaaagatcctgggtatgtttacatcccaacaatggaaacatctgagcaatgatttcttgaagacccagcaggagaagaggcacagttggttcaaggcaagtggtaccatcaagaagttccgagctggcctcagcatcttttcacccatccccaagtctcccagtttccctatcatacaggactccatgctgaaaggcaaactaggtgtaccagagcttcgggttgggcgcctcatgaaccgttccatctcctgtaccatgaagaaccccaaagtggaagtgtttggctaccctcccagcccccaggcaggtctcctgtgccctcagcacgtgggcctccctcccccagcacggacctctcctttggtcagtggtcactgcaagaacattcccactctggagtatggattcctcgttcagatcatgaagtatgcagaacagaggattccaacattgaatgagtactgtgtggtgtgtgatgagcagcatgtcttccaaaatggatctatgctgaagccagctgtctgtactcgtgaactatgcgttttctccttctacacactgggcgtcatgtctggagctgcagaggaggtggccactggagcagaggtggtggatctgctggtggccatgtgtagggcagctttagagtcccctagaaagagcatcatctttgagccttatccctctgtggtggaccccactgatcccaagactctggcctttaaccctaagcttcatggtagagcttgacccaagaactactccacattcggatggcccagactgactccatcccctgactttccctttgacttcaccctgtttgtaaataaaacaataaaatggaaggtgctgtggactgga

SEQ ID NO: 299331 - DNA, 3913 bp, Homo sapiens
gaatttttaaaagcccgaggtgttcgacttccattgtcgaaccagagaatcctgcagtcagcaaggcctcaggacttccctcagtctctacctgccggccccaacctccggcgaggggactccctcccggcctacaggcaacctgggttgcccttcctgcttgttcctcccaaccactcggggcgctaaatgcaagtattctcctttggaaggctccccgcactcccccagagtccctgttccttctccactgcctcccctacccacggcgcaggcgccaccccccactccgcaccctttcccgactagcgaccgccgcgcaggcgtctcagggctggcgtcggctgctgaggcgcgcccaggagcaggccgtcaggctgttggtcaggagcgggccacgtgccatcgtgtcaccgcgcgagcgtgcgcagagtggctgagcgcgcccgtgacggaacgacgaggcgtggggtgcgcgacctcgcccgccaggcccggcccccgccccttggcctgccgctccgcccccgcggggcgtcccgggccgctcgtcccgtcggctgcggccgcgcgcggcccggggtcgccgtgagtactcgccaggctggcctgtgtggccgccaccacgggcacagggcggtgcggccgggccacgggaagggtgcggggctcgccccgtctccgcaggggtggacgaagtgagaggcttggaccgggaggttctgagggcccctcctaggctggacaggcttcactcaggcccggcggccgggcggcatagatcgggcccagagcgtctttcctggggaggcaggtgttgggtgtttttggggtcttcaggggagccccggagaacaggtgtaactgcttccccgggagaggcctcagggcctgtcctggaagcacgggtgccagagagtgttttcgcggggcagccgtatcctctctccctgcggggtgcccgagatagcgctaacctgcgggagtcgcccctcagtgattcttcctagtagtctttgtttagtggcctactcctgagaagggagcacacgggatggagtggagtaacctcctccaggaccacaaagccgggagcccaacccacaatttaaacattgagctctgaagctgctttgactagacgtgaagttgtcacacctagagaagcgcccatggacctagggaaagacctttgtgatccagacttgaggctcatttacatttgacttattctcgtggaaactcataaagcgttctatattagccgctgagttttaacaccttctctggacactcatcatatagtctatttttggcccaacttcttttgaaagggcccattctttacctcatttagataaatcagataggtctttcttgcttacttcattaacaactcaattaattataaccacatcacatgaagattagatgtaattaggacctgtccaatgtctttacatcccagtccttctgtactcctaaccttaagcaaattggtcgacctctgtaggtctaagtattctgtgtgtaacatgaaagctttgaattaggccacgtttccggctaattttttaaaaagtgtttgtgatcctgtgaattccataacccaccaccttccttttccaactcttcaccttttaaatccactttccatctctccagaggaaagggcattgagagtagaggaagcaagtccctttcactaaagcagcctggtttgaaaaagccggtaatctctgaactgtctcttgcttgaacaagaaaaactccctctgaaatacctttttctccttgtgatagcaacagaaaccaagcagcaacagcccttggaaagaggctaaatttttcttgacttctgcagcaacaaagaccgtgaaaagttggcacttctggcctaacgctgccgtcatcctacccctcaccccagggcaacccaggctggacatttagtgcctccctctttattcctctgtgatcatccagatcagcacttgactgtttattttcaaatctcacgaacctcaccccaagatcttcacattctggatctcagctgctcttgaaggacagtgacttgttaccaccgcaacagcagagcctgccatccccaacagatcaccagttgtccctgacatcgtgccctaccttgtctccctttgtggtctcctaaatgcccatctcgttggccttggttcggctagtggtatggaggggtgctgcctagcactgacctgagagtgtgtgtgacccactgacccaatggacatcaaaggccagttctggaatgatgacgactcggagggagataatgaatcagaggaatttctctatggcgttcaggggagctgtgcagctgacctgtatcgacacccacagcttgatgcagacattgaagccgtgaaggagatctacagtgagaactctgtatccatcagagaatatggaactatcgatgacgtggacattgacctccacatcaacatcagcttcctcgatgaggaagtctctacagcctggaaggtcctccggacagaacctattgtgttgaggctgcgattttctctctcccagtacctagatggaccagaaccatccattgaggttttccagccatcaaataaggaaggatttgggctgggtcttcagttgaaaaagatcctgggtatgtttacatcccaacaatggaaacatctgagcaatgatttcttgaagacccagcaggagaagaggcacagttggttcaaggcaagtggtaccatcaagaagttccgagctggcctcagcatcttttcacccatccccaagtctcccagtttccctatcatacaggactccatgctgaaaggcaaactaggtgtaccagagcttcgggttgggcgcctcatgaaccgttccatctcctgtaccatgaagaaccccaaagtggaagtgtttggctaccctcccagcccccaggtcagtggtcactgcaagaacattcccactctggagtatggattcctcgttcagatcatgaagtatgcagaacagaggattccaacattgaatgagtactgtgtggtgtgtgatgagcagcatgtcttccaaaatggatctatgctgaagccagctgtctgtactcgtgaactatgcgttttctccttctacacactgggcgtcatgtctggagctgcagaggaggtggccactggagcagaggtggtggatctgctggtggccatgtgtagggcagctttagagtcccctagaaagagcatcatctttgagccttatccctctgtggtggaccccactgatcccaagactctggcctttaaccctaagaagaagaattatgagcggcttcagaaagctctggatagtgtgatgtctattcgggagatgacccagggctcatatttggaaatcaagaaacagatggacaagttggatcccctggcccatcctctcctgcagtggatcatctctagcaacaggtcacacattgtcaaactacctctcagcaggcagctgaagttcatgcacacctcacaccagttcctcctgctgagcagccctcctgccaaggaggctcggttccggaccgccaagaagctctatggcagcacctttgccttccagtgaggaggctgggggctgggcagtgggggtggtgagggggcggggatgagcaagaaggatgcccttgagatatgagtttgtgttacatgtgtccatcaaccagtcagcagatacttactaaatgctattgtggtaggtgctatagaggacaaaaaggtacatataatgtggtctttattctcaaactatttatgatgtagttgaggaaaaatgacatttacatgtgaaaagatgtggctgaagaaatagattggagagaacagatctgaaagctactttgatggaaaaa

SEQ ID NO: 299332 - DNA, 3765 bp, Homo sapiens
gaatttttaaaagcccgaggtgttcgacttccattgtcgaaccagagaatcctgcagtcagcaaggcctcaggacttccctcagtctctacctgccggccccaacctccggcgaggggactccctcccggcctacaggcaacctgggttgcccttcctgcttgttcctcccaaccactcggggcgctaaatgcaagtattctcctttggaaggctccccgcactcccccagagtccctgttccttctccactgcctcccctacccacggcgcaggcgccaccccccactccgcaccctttcccgactagcgaccgccgcgcaggcgtctcagggctggcgtcggctgctgaggcgcgcccaggagcaggccgtcaggctgttggtcaggagcgggccacgtgccatcgtgtcaccgcgcgagcgtgcgcagagtggctgagcgcgcccgtgacggaacgacgaggcgtggggtgcgcgacctcgcccgccaggcccggcccccgccccttggcctgccgctccgcccccgcggggcgtcccgggccgctcgtcccgtcggctgcggccgcgcgcggcccggggtcgccgtgagtactcgccaggctggcctgtgtggccgccaccacgggcacagggcggtgcggccgggccacgggaagggtgcggggctcgccccgtctccgcaggggtggacgaagtgagaggcttggaccgggaggttctgagggcccctcctaggctggacaggcttcactcaggcccggcggccgggcggcatagatcgggcccagagcgtctttcctggggaggcaggtgttgggtgtttttggggtcttcaggggagccccggagaacaggtgtaactgcttccccgggagaggcctcagggcctgtcctggaagcacgggtgccagagagtgttttcgcggggcagccgtatcctctctccctgcggggtgcccgagatagcgctaacctgcgggagtcgcccctcagtgattcttcctagtagtctttgtttagtggcctactcctgagaagggagcacacgggatggagtggagtaacctcctccaggaccacaaagccgggagcccaacccacaatttaaacattgagctctgaagctgctttgactagacgtgaagttgtcacacctagagaagcgcccatggacctagggaaagacctttgtgatccagacttgaggctcatttacatttgacttattctcgtggaaactcataaagcgttctatattagccgctgagttttaacaccttctctggacactcatcatatagtctatttttggcccaacttcttttgaaagggcccattctttacctcatttagataaatcagataggtctttcttgcttacttcattaacaactcaattaattataaccacatcacatgaagattagatgtaattaggacctgtccaatgtctttacatcccagtccttctgtactcctaaccttaagcaaattggtcgacctctgtaggtctaagtattctgtgtgtaacatgaaagctttgaattaggccacgtttccggctaattttttaaaaagtgtttgtgatcctgtgaattccataacccaccaccttccttttccaactcttcaccttttaaatccactttccatctctccagaggaaagggcattgagagtagaggaagcaagtccctttcactaaagcagcctggtttgaaaaagccggtaatctctgaactgtctcttgcttgaacaagaaaaactccctctgaaatacctttttctccttgtgatagcaacagaaaccaagcagcaacagcccttggaaagaggctaaatttttcttgacttctgcagcaacaaagaccgtgaaaagttggcacttctggcctaacgctgccgtcatcctacccctcaccccagggcaacccaggctggacatttagtgcctccctctttattcctctgtgatcatccagatcagcacttgactgtttattttcaaatctcacgaacctcaccccaagatcttcacattctggatctcagctgctcttgaaggacagtgacttgttaccaccgcaacagcagagcctgccatccccaacagatcaccagttgtccctgacatcgtgccctaccttgtctccctttgtggtctcctaaatgcccatctcgttggccttggttcggctagtggtatggaggggtgctgcctagcactgacctgagagtgtgtgtgacccactgacccaatggacatcaaaggccagttctggaatgatgacgactcggagggagataatgaatcagaggaatttctctatggcgttcaggggagctgtgcagctgacctgtatcgacacccacagcttgatgcagacattgaagccgtgaaggagatctacagtgagaactctgtatccatcagagaatatggaactatcgatgacgtggacattgacctccacatcaacatcagcttcctcgatgaggaagtctctacagcctggaaggtcctccggacagaacctattgtgttgaggctgcgattttctctctcccagtacctagatggaccagaaccatccattgaggttttccagccatcaaataaggaaggatttgggctgggtcttcagttgaaaaagatcctgggtatgtttacatcccaacaatggaaacatctgagcaatgatttcttgaagacccagcaggagaagaggcacagttggttcaaggcaagtggtaccatcaagaagttccgagctggcctcagcatcttttcacccatccccaagtctcccagtttccctatcatacaggactccatgctgaaaggcaaactaggtgtaccagagcttcgggttgggcgcctcatgaaccgttccatctcctgtaccatgaagaaccccaaagtggaagtgtttggctaccctcccagcccccaggtcagtggtcactgcaagaacattcccactctggagtatggattcctcgttcagatcatgaagtatgcagaacagaggattccaacattgaatgagtactgtgtggtgtgtgatgagcagcatgtcttccaaaatggatctatgctgaagccagctgtctgtactcgtgaactatgcgttttctccttctacacactgggcgtcatgtctggagctgcagaggaggtggccactggagcagaggtggtggatctgctggtggccatgtgtagggcagctttagagtcccctagaaagagcatcatctttgagccttatccctctgtggtggaccccactgatcccaagactctggcctttaaccctaagaagaagaattatgagcggcttcagaaagctctggatagtgtgatgtctattcgggagatgacccagggctcatatttggaaatcaagaaacagatggacaagttggatcccctggcccatcctctcctgcagtggatcatctctagcaacaggtcacacattgtcaaactacctctcagcaggtgggtcccaaatctagcctgttggtggagcagcacctgtatcaggcgttccaccttatccatccgagacaccacggcatgattcgggcccatggcaagatggcagcttctagcctcagtcacaggcttccgtttgccatcgaggcacagcagcgcaaagtctgccagcttcaaatccttagcccatgcctcattgttatttccatcagtgttctgcaagacagtgacatctttcacaaatgcaccgtctccagaa

SEQ ID NO: 299333 - DNA, 2458 bp, Homo sapiens
gaatttttaaaagcccgaggtgttcgacttccattgtcgaaccagagaatcctgcagtcagcaaggcctcaggacttccctcagtctctacctgccggccccaacctccggcgaggggactccctcccggcctacaggcaacctgggttgcccttcctgcttgttcctcccaaccactcggggcgctaaatgcaagtattctcctttggaaggctccccgcactcccccagagtccctgttccttctccactgcctcccctacccacggcgcaggcgccaccccccactccgcaccctttcccgactagcgaccgccgcgcaggcgtctcagggctggcgtcggctgctgaggcgcgcccaggagcaggccgtcaggctgttggtcaggagcgggccacgtgccatcgtgtcaccgcgcgagcgtgcgcagagtggctgagcgcgcccgtgacggaacgacgaggcgtggggtgcgcgacctcgcccgccaggcccggcccccgccccttggcctgccgctccgcccccgcggggcgtcccgggccgctcgtcccgtcggctgcggccgcgcgcggcccggggtcgccgtgagtactcgccaggctggcctgtgtggccgccaccacgggcacagggcggtgcggccgggccacgggaagggtgcggggctcgccccgtctccgcaggggtggacgaagtgagaggcttggaccgggaggttctgagggcccctcctaggctggacaggcttcactcaggcccggcggccgggcggcatagatcgggcccagagcgtctttcctggggaggcaggtgttgggtgtttttggggtcttcaggggagccccggagaacaggtgtaactgcttccccgggagaggcctcagggcctgtcctggaagcacgggtgccagagagtgttttcgcggggcagccgtatcctctctccctgcggggtgcccgagatagcgctaacctgcgggagtcgcccctcagtgattcttcctagtagtctttgtttagtggcctactcctgagaagggagcacacgggatggagtggagtaacctcctccaggaccacaaagccgggagcccaacccacaatttaaacattgagctctgaagctgctttgactagacgtgaagttgtcacacctagagaagcgcccatggacctagggaaagacctttgtgatccagacttgaggctcatttacatttgacttattctcgtggaaactcataaagcgttctatattagccgctgagttttaacaccttctctggacactcatcatatagtctatttttggcccaacttcttttgaaagggcccattctttacctcatttagataaatcagataggtctttcttgcttacttcattaacaactcaattaattataaccacatcacatgaagattagatgtaattaggacctgtccaatgtctttacatcccagtccttctgtactcctaaccttaagcaaattggtcgacctctgtaggtctaagtattctgtgtgtaacatgaaagctttgaattaggccacgtttccggctaattttttaaaaagtgtttgtgatcctgtgaattccataacccaccaccttccttttccaactcttcaccttttaaatccactttccatctctccagaggaaagggcattgagagtagaggaagcaagtccctttcactaaagcagcctggtttgaaaaagccggtaatctctgaactgtctcttgcttgaacaagaaaaactccctctgaaatacctttttctccttgtgatagcaacagaaaccaagcagcaacagcccttggaaagaggctaaatttttcttgacttctgcagcaacaaagaccgtgaaaagttggcacttctggcctaacgctgccgtcatcctacccctcaccccagggcaacccaggctggacatttagtgcctccctctttattcctctgtgatcatccagatcagcacttgactgtttattttcaaatctcacgaacctcaccccaagatcttcacattctggatctcagctgctcttgaaggacagtgacttgttaccaccgcaacagcagagcctgccatccccaacagatcaccagttgtccctgacatcgtgccctaccttgtctccctttgtggtctcctaaatgcccatctcgttggccttggttcggctagtggtatggaggggtgctgcctagcactgacctgagagtgtgtgtgacccactgacccaatggtgagaactgactgcccacctctccaactgattgttcaaagggtagaggagacaaagtgcagatctcaccctttcttggtattttcccttctacccttttggaagatagagtggctatttgaagttaaaggaaagggaaggggcacagaaacagtattacttggtgtgtttgtgtagtgggttttcttgggga

SEQ ID NO: 299334 - DNA, 375 bp, Homo sapiens
gctcatattactcatcctggtgtttccctgcaagctgcatggagcagcctatggcaaaggcatctacctgagccccatctccagtatttcctttggatactcaggtaagaaatattctgtggccaccttgactctatttacattgcctccatttgtgaatacatgatttgtgctgtctgttcctccctcattatggatacttggtctgtgtcagctctctccccgatcatggatacatattctctctctctctacattttcttattagaaatttagattctttacaaggtgaggccagttattgttaaaaatgatggttttattcatagcaggggcttggccctgggaatgggtggaggaataacagggacataa

SEQ ID NO: 299335 - DNA, 2609 bp, Homo sapiens
ccccagtgaggctggaccgactgtcggaggcagccaaggtgaacacagacgctatgcgctcagcgcaggaggagataactgagtaccggcgtcagctgcaggccaggaccacagagctggaggcactgaaaagcaccaaggactcactggagaggcagcgctctgagctggaggaccgtcatcaggccgacattgcctcctaccaggaagccattcagcagctggacgctgagctgaggaacaccaagtgggagatggccgcccagctgcgagaataccaggacctgctcaatgtcaagatggctctggatatagagatagccgcttacagaaaactcctggaaggtgaagagtgtcggattggctttggcccaattcctttctcgcttccagaaggactccccaaaattccctctgtgtccactcacataaaggtgaaaagcgaagagaagatcaaagtggtggagaagtctgagaaagaaactgtgattgtggaggaacagacagaggagacccaagtgactgaagaagtgactgaagaagaggagaaagaggccaaagaggaggagggcaaggaggaagaagggggtgaagaagaggaggcagaagggggagaagaagaaacaaagtctcccccagcagaagaggctgcatccccagagaaggaagccaagtcaccagtaaaggaagaggcaaagtcaccggctgaggccaagtccccagagaaggaggaagcaaaatccccagccgaagtcaagtcccctgagaaggccaagtctccagcaaaggaagaggcaaagtcaccgcctgaggccaagtccccagagaaggaggaagcaaaatctccagctgaggtcaagtcccccgagaaggccaagtccccagcaaaggaagaggcaaagtcaccggctgaggccaagtctccagagaaggccaagtccccagtgaaggaagaagcaaagtcaccggctgaggccaagtccccagtgaaggaagaagcaaaatctccagctgaggtcaagtccccggaaaaggccaagtctccaacgaaggaggaagcaaagtcccctgagaaggcagtcccctgagaaggccaagtccccagtgaaggaagaagcaaagtcccctgagaaggccaagtccccagtgaaggaagaagcaaagacccccgagaaggccaagtccccagtgaaggaagaagccaagtccccagagaaggccaagtccccagagaaggccaagactcttgatgtgaagtctccagaagccaagactccagcgaaggaggaagcaaggtcccctgcagacaaattccctgaaaaggccaaaagccctgtcaaggaggaggtcaagtccccagagaaggcgaaatctcccctgaaggaggatgccaaggcccctgagaaggagatcccaaaaaaggaagaggtgaagtccccagtgaaggaggaggagaagccccaggaggtgaaagtcaaagagcccccaaagaaggcagaggaagagaaagcccctgccacaccaaaaacagaggagaagaaggacagcaagaaagaggaggcacccaagaaggaggctccaaagcccaaggtggaggagaagaaggaacctgctgtcgaaaagcccaaagaatccaaagttgaagccaagaaggaagaggctgaagataagaaaaaagtccccaccccagagaaggaggctcctgccaaggtggaggtgaaggaagacgctaaacccaaagaaaagacagaggtggccaagaaggaaccagatgatgccaaggccaaggaacccagcaaaccagcagagaagaaggaggcagcaccggagaaaaaagacaccaaggaggagaaggccaagaagcctgaggagaaacccaagacagaggccaaagccaaggaagatgacaagaccctctcaaaagagcctagcaagcctaaggcagaaaaggctgaaaaatcctccagcacagaccaaaaagacagcaagcctccagagaaggccacagaagacaaggccgccaaggggaagtaaggcagggagaaaggaacatccggaacagccaaagaaactcagaagagtcccggagctcaaggatcagagtaacacaattttcactttttctgtctttatgtaagaagaaactgcttagatgacggggcctccttcttcaaacaggaatttctgttagcaatatgttagcaagagagggcactcccaggcccctgcccccatgccctccccaggcgatggacaattatgatagcttatgtagctgaatgtgatacatgccgaatgccacacgtaaacacttgactataaaaactgcccccctcctttccaaataagtgcatttattgcctctatgtgcaactgacagatgaccgcaataatgaatgagcagttagaaatacattatgcttgagatgtcttaacctattcccaaatgccttctgttttccaaaggagtggtcaagcccttgcccagagctctctattctggaagagcggtccaggtggggccgggcactggccactgaattatgccagggcgcactttccactggagttcactttcaattgcttctgtgcaataaaaccaagtgctt

SEQ ID NO: 299336 - DNA, 2425 bp, Homo sapiens
gtgtgtcacctctccttcccaggaagccattcagcagctggacgctgagctgaggaacaccaagtgggagatggccgcccagctgcgagaataccaggacctgctcaatgtcaagatggctctggatatagagatagccgcttacagaaaactcctggaaggtgaagagtgtcggattggctttggcccaattcctttctcgcttccagaaggactccccaaaattccctctgtgtccactcacataaaggtgaaaagcgaagagaagatcaaagtggtggagaagtctgagaaagaaactgtgattgtggaggaacagacagaggagacccaagtgactgaagaagtgactgaagaagaggagaaagaggccaaagaggaggagggcaaggaggaagaagggggtgaagaagaggaggcagaagggggagaagaagaaacaaagtctcccccagcagaagaggctgcatccccagagaaggaagccaagtcaccagtaaaggaagaggcaaagtcaccggctgaggccaagtccccagagaaggaggaagcaaaatccccagccgaagtcaagtcccctgagaaggccaagtctccagcaaaggaagaggcaaagtcaccgcctgaggccaagtccccagagaaggaggaagcaaaatctccagctgaggtcaagtcccccgagaaggccaagtccccagcaaaggaagaggcaaagtcaccggctgaggccaagtctccagagaaggccaagtccccagtgaaggaagaagcaaagtcaccggctgaggccaagtccccagtgaaggaagaagcaaaatctccagctgaggtcaagtccccggaaaaggccaagtctccaacgaaggaggaagcaaagtcccctgagaaggcagtcccctgagaaggccaagtccccagtgaaggaagaagcaaagtcccctgagaaggccaagtccccagtgaaggaagaagcaaagacccccgagaaggccaagtccccagtgaaggaagaagccaagtccccagagaaggccaagtccccagagaaggccaagactcttgatgtgaagtctccagaagccaagactccagcgaaggaggaagcaaggtcccctgcagacaaattccctgaaaaggccaaaagccctgtcaaggaggaggtcaagtccccagagaaggcgaaatctcccctgaaggaggatgccaaggcccctgagaaggagatcccaaaaaaggaagaggtgaagtccccagtgaaggaggaggagaagccccaggaggtgaaagtcaaagagcccccaaagaaggcagaggaagagaaagcccctgccacaccaaaaacagaggagaagaaggacagcaagaaagaggaggcacccaagaaggaggctccaaagcccaaggtggaggagaagaaggaacctgctgtcgaaaagcccaaagaatccaaagttgaagccaagaaggaagaggctgaagataagaaaaaagtccccaccccagagaaggaggctcctgccaaggtggaggtgaaggaagacgctaaacccaaagaaaagacagaggtggccaagaaggaaccagatgatgccaaggccaaggaacccagcaaaccagcagagaagaaggaggcagcaccggagaaaaaagacaccaaggaggagaaggccaagaagcctgaggagaaacccaagacagaggccaaagccaaggaagatgacaagaccctctcaaaagagcctagcaagcctaaggcagaaaaggctgaaaaatcctccagcacagaccaaaaagacagcaagcctccagagaaggccacagaagacaaggccgccaaggggaagtaaggcagggagaaaggaacatccggaacagccaaagaaactcagaagagtcccggagctcaaggatcagagtaacacaattttcactttttctgtctttatgtaagaagaaactgcttagatgacggggcctccttcttcaaacaggaatttctgttagcaatatgttagcaagagagggcactcccaggcccctgcccccatgccctccccaggcgatggacaattatgatagcttatgtagctgaatgtgatacatgccgaatgccacacgtaaacacttgactataaaaactgcccccctcctttccaaataagtgcatttattgcctctatgtgcaactgacagatgaccgcaataatgaatgagcagttagaaatacattatgcttgagatgtcttaacctattcccaaatgccttctgttttccaaaggagtggtcaagcccttgcccagagctctctattctggaagagcggtccaggtggggccgggcactggccactgaattatgccagggcgcactttccactggagttcactttcaattgcttctgtgcaataaaaccaagtgctt

SEQ ID NO: 299337 - DNA, 2045 bp, Homo sapiens
gcggccgcctactactactaaattcgcggccggtcgacgcagaagggggagaagaagaaacaaagtctcccccagcagaagaggctgcatccccagagaaggaagccaagtcaccagtaaaggaagaggcaaagtcaccggctgaggccaagtccccagagaaggaggaagcaaaatccccagccgaagtcaagtcccctgagaaggccaagtctccagcaaaggaagaggcaaagtcaccgcctgaggccaagtccccagagaaggaggaagcaaaatctccagctgaggtcaagtcccccgagaaggccaagtccccagcaaaggaagaggcaaagtcaccggctgaggccaagtctccagagaaggccaagtccccagtgaaggaagaagcaaagtcaccggctgaggccaagtccccagtgaaggaagaagcaaaatctccagctgaggtcaagtccccggaaaaggccaagtctccaacgaaggaggaagcaaagtcccctgagaaggcagtcccctgagaaggccaagtccccagtgaaggaagaagcaaagtcccctgagaaggccaagtccccagtgaaggaagaagcaaagacccccgagaaggccaagtccccagtgaaggaagaagccaagtccccagagaaggccaagtccccagagaaggccaagactcttgatgtgaagtctccagaagccaagactccagcgaaggaggaagcaaggtcccctgcagacaaattccctgaaaaggccaaaagccctgtcaaggaggaggtcaagtccccagagaaggcgaaatctcccctgaaggaggatgccaaggcccctgagaaggagatcccaaaaaaggaagaggtgaagtccccagtgaaggaggaggagaagccccaggaggtgaaagtcaaagagcccccaaagaaggcagaggaagagaaagcccctgccacaccaaaaacagaggagaagaaggacagcaagaaagaggaggcacccaagaaggaggctccaaagcccaaggtggaggagaagaaggaacctgctgtcgaaaagcccaaagaatccaaagttgaagccaagaaggaagaggctgaagataagaaaaaagtccccaccccagagaaggaggctcctgccaaggtggaggtgaaggaagacgctaaacccaaagaaaagacagaggtggccaagaaggaaccagatgatgccaaggccaaggaacccagcaaaccagcagagaagaaggaggcagcaccggagaaaaaagacaccaaggaggagaaggccaagaagcctgaggagaaacccaagacagaggccaaagccaaggaagatgacaagaccctctcaaaagagcctagcaagcctaaggcagaaaaggctgaaaaatcctccagcacagaccaaaaagacagcaagcctccagagaaggccacagaagacaaggccgccaaggggaagtaaggcagggagaaaggaacatccggaacagccaaagaaactcagaagagtcccggagctcaaggatcagagtaacacaattttcactttttctgtctttatgtaagaagaaactgcttagatgacggggcctccttcttcaaacaggaatttctgttagcaatatgttagcaagagagggcactcccaggcccctgcccccatgccctccccaggcgatggacaattatgatagcttatgtagctgaatgtgatacatgccgaatgccacacgtaaacacttgactataaaaactgcccccctcctttccaaataagtgcatttattgcctctatgtgcaactgacagatgaccgcaataatgaatgagcagttagaaatacattatgcttgagatgtcttaacctattcccaaatgccttctgttttccaaaggagtggtcaagcccttgcccagagctctctattctggaagagcggtccaggtggggccgggcactggccactgaattatgccagggcgcactttccactggagttcactttcaattgcttctgtgcaataaaaccaagtgctt

SEQ ID NO: 299338 - DNA, 1180 bp, Homo sapiens
gcggccgcctactactactaaattcgcggccggtcgacgtgaaagtcaaagagcccccaaagaaggcagaggaagagaaagcccctgccacaccaaaaacagaggagaagaaggacagcaagaaagaggaggcacccaagaaggaggctccaaagcccaaggtggaggagaagaaggaacctgctgtcgaaaagcccaaagaatccaaagttgaagccaagaaggaagaggctgaagataagaaaaaagtccccaccccagagaaggaggctcctgccaaggtggaggtgaaggaagacgctaaacccaaagaaaagacagaggtggccaagaaggaaccagatgatgccaaggccaaggaacccagcaaaccagcagagaagaaggaggcagcaccggagaaaaaagacaccaaggaggagaaggccaagaagcctgaggagaaacccaagacagaggccaaagccaaggaagatgacaagaccctctcaaaagagcctagcaagcctaaggcagaaaaggctgaaaaatcctccagcacagaccaaaaagacagcaagcctccagagaaggccacagaagacaaggccgccaaggggaagtaaggcagggagaaaggaacatccggaacagccaaagaaactcagaagagtcccggagctcaaggatcagagtaacacaattttcactttttctgtctttatgtaagaagaaactgcttagatgacggggcctccttcttcaaacaggaatttctgttagcaatatgttagcaagagagggcactcccaggcccctgcccccatgccctccccaggcgatggacaattatgatagcttatgtagctgaatgtgatacatgccgaatgccacacgtaaacacttgactataaaaactgcccccctcctttccaaataagtgcatttattgcctctatgtgcaactgacagatgaccgcaataatgaatgagcagttagaaatacattatgcttgagatgtcttaacctattcccaaatgccttctgttttccaaaggagtggtcaagcccttgcccagagctctctattctggaagagcggtccaggtggggccgggcactggccactgaattatgccagggcgcactttccactggagttcactttcaattgcttctgtgcaataaaaccaagtgctt

SEQ ID NO: 299339 - DNA, 1868 bp, Homo sapiens
ccccagtgaggctggaccgactgtcggaggcagccaaggtgaacacagacgctatgcgctcagcgcaggaggagataactgagtaccggcgtcagctgcaggccaggaccacagagctggaggcactgaaaagcaccaaggactcactggagaggcagcgctctgagctggaggaccgtcatcaggccgacattgcctcctaccaggaagccattcagcagctggacgctgagctgaggaacaccaagtgggagatggccgcccagctgcgagaataccaggacctgctcaatgtcaagatggctctggatatagagatagccgcttacagaaaactcctggaaggtgaagagtgtcggattggctttggcccaattcctttctcgcttccagaaggactccccaaaattccctctgtgtccactcacataaaggtgaaaagcgaagagaagatcaaagtggtggagaagtctgagaaagaaactgtgattgtggaggaacagacagaggagacccaagtgactgaagaagtgactgaagaagaggagaaagaggccaaagaggaggagggcaaggaggaagaagggggtgaagaagaggaggcagaagggggagaagaagaaacaaagtctcccccagcagaagaggctgcatccccagagaaggaagccaagtcaccagtaaaggaagaggcaaagtcaccggctgaggccaagtccccagagaaggaggaagcaaaatccccagccgaagtcaagtcccctgagaaggccaagtctccagcaaaggaagaggcaaagtcaccgcctgaggccaagtccccagagaaggaggaagcaaaatctccagctgaggtcaagtcccccgagaaggccaagtccccagcaaaggaagaggcaaagtcaccggctgaggccaagtctccagagaaggccaagtccccagtgaaggaagaagcaaagtcaccggctgaggccaagtccccagtgaaggaagaagcaaaatctccagctgaggtcaagtccccggaaaaggccaagtctccaacgaaggaggaagcaaagtcccctgagaaggcagtcccctgagaaggccaagtccccagtgaaggaagaagcaaagtcccctgagaaggccaagtccccagtgaaggaagaagcaaagacccccgagaaggccaagtccccagtgaaggaagaagccaagtccccagagaaggccaagtccccagagaaggccaagactcttgatgtgaagtctccagaagccaagactccagcgaaggaggaagcaaggtcccctgcagacaaattccctgaaaaggccaaaagccctgtcaaggaggaggtcaagtccccagagaaggcgaaatctcccctgaaggaggatgccaaggcccctgagaaggagatcccaaaaaaggaagaggtgaagtccccagtgaaggaggaggagaagccccaggaggtgaaagtcaaagagcccccaaagaaggcagaggaagagaaagcccctgccacaccaaaaacagaggagaagaaggacagcaagaaagaggaggcacccaagaaggaggctccaaagcccaaggtggaggagaagaaggaacctgctgtcgaaaagcccaaagaatccaaagttgaagccaagaaggaagaggctgaagataagaaaaaagtccccaccccagagaaggaggctcctgccaaggtggaggtgaaggaagacgctaaacccaaagaaaagacagaggtggccaagaaggaaccagatgatgccaaggccaaggaacccagcaaaccagcagagacaatccagcagcccaggaggtcgacgcggccgcgaatttagtagtagtaggcggccgc

SEQ ID NO: 299340 - DNA, 1141 bp, Homo sapiens
ccccagtgaggctggaccgactgtcggaggcagccaaggtgaacacagacgctatgcgctcagcgcaggaggagataactgagtaccggcgtcagctgcaggccaggaccacagagctggaggcactgaaaagcaccaaggactcactggagaggcagcgctctgagctggaggaccgtcatcaggccgacattgcctcctaccaggaagccattcagcagctggacgctgagctgaggaacaccaagtgggagatggccgcccagctgcgagaataccaggacctgctcaatgtcaagatggctctggatatagagatagccgcttacagaaaactcctggaaggtgaagagtgtcggattggctttggcccaattcctttctcgcttccagaaggactccccaaaattccctctgtgtccactcacataaaggtgaaaagcgaagagaagatcaaagtggtggagaagtctgagaaagaaactgtgattgtggaggaacagacagaggagacccaagtgactgaagaagtgactgaagaagaggagaaagaggccaaagaggaggagggcaaggaggaagaagggggtgaagaagaggaggcagaagggggagaagaagaaacaaagtctcccccagcagaagaggctgcatccccagagaaggaagccaagtcaccagtaaaggaagaggcaaagtcaccggctgaggccaagtccccagagaaggaggaagcaaaatccccagccgaagtcaagtcccctgagaaggccaagtctccagcaaaggaagaggcaaagtcaccgcctgaggccaagtccccagagaaggaggaagcaaaatctccagctgaggtcaagtcccccgagaaggccaagtccccagcaaaggaagaggcaaagtcaccggctgaggccaagtctccagagaaggccaagtccccagtgaaggaagaagcaaagtcaccggctgaggccaagtccccagtgaaggccaagtctccaacgaaggaggaagcaaagtcccctgagaaggcagccaagtcccctgagaaggccaagtccccagagaaggaagaggccaagtcccctgagaaggccaagtccccagtgaaggcagaagcaaagtccactgacaacgg

SEQ ID NO: 299341 - DNA, 1130 bp, Homo sapiens
ccccagtgaggctggaccgactgtcggaggcagccaaggtgaacacagacgctatgcgctcagcgcaggaggagataactgagtaccggcgtcagctgcaggccaggaccacagagctggaggcactgaaaagcaccaaggactcactggagaggcagcgctctgagctggaggaccgtcatcaggccgacattgcctcctaccaggaagccattcagcagctggacgctgagctgaggaacaccaagtgggagatggccgcccagctgcgagaataccaggacctgctcaatgtcaagatggctctggatatagagatagccgcttacagaaaactcctggaaggtgaagagtgtcggattggctttggcccaattcctttctcgcttccagaaggactccccaaaattccctctgtgtccactcacataaaggtgaaaagcgaagagaagatcaaagtggtggagaagtctgagaaagaaactgtgattgtggaggaacagacagaggagacccaagtgactgaagaagtgactgaagaagaggagaaagaggccaaagaggaggagggcaaggaggaagaagggggtgaagaagaggaggcagaagggggagaagaagaaacaaagtctcccccagcagaagaggctgcatccccagagaaggaagccaagtcaccagtaaaggaagaggcaaagtcaccggctgaggccaagtccccagagaaggaggaagcaaaatccccagccgaagtcaagtcccctgagaaggccaagtctccagcaaaggaagaggcaaagtcaccgcctgaggccaagtccccagagaaggaggaagcaaaatctccagctgaggtcaagtcccccgagaaggccaagtccccagcaaaggaagaggcaaagtcaccggctgaggccaagtctccagagaaggccaagtccccagtgaaggaagaagcaaagtcaccggctgaggccaagtccccagtgaaggaagaagcaaaatctccagctgaggtcaagtccccggaaaaggccaagtctccaacgaaggaggaagcaaagtcccctgagaaggcataatcactctgacacagccaactcgctatgagaatgactactcattagaga

SEQ ID NO: 299342 - DNA, 1534 bp, Homo sapiens
ttctaccaacaccccgccccctgcaggctctctccgagagcaccaagtccttttgctctccatccccggaagacccggctgaaaatccggaaaaagaatcgggaaacgccaggaggcatattgcgcttgcgcacggaggggccggaagtcgaggcgggagtgactctgcttccgtttctggttttgctctagtgtttgggtttcttcgcggctgctcaagatgaaccgactcttcgggaaagcgaaacccaaggctccgccgcccagcctgactgactgcattggcacggtggacagtagagcagaatccattgacaagaagatttctcgattggatgctgagctagtgaagtataaggatcagatcaagaagatgagagagggtcctgcaaagaatatggtcaagcagaaagccttgcgagttttaaagcaaaagaggatgtatgagcagcagcgggacaatcttgcccaacagtcattcaacatggaacaagccaattataccatccagtctttgaaggacaccaagaccacggttgatgctatgaaactgggagtaaaggaaatgaagaaggcatacaagcaagtgaagatcgaccagattgaggatttacaagaccagctagaggatatgatggaagatgcaaatgaaatccaagaagcactgagtcgcagttatggcaccccagaactggatgaagatgatttagaagcagagttggatgcactaggtgatgagcttctggctgatgaagacagttcttatttggatgaggcagcatctgcacctgcaattccagaaggtgttcccactgatacaaaaaacaaggatggagttctggtggatgaatttggattgccacagatccctgcttcatagatttgcatcattcaagcatatcttgtaaaacaaacacatattatgggactaggaaatatttatctttccaaatttgccataacagatttaggtttctttcctttctttgaaggaaagtttaattacattgctcttttattttttccattaagagactcattgcttgggaaatgctttcttcgtactaaaatttgattcctttttttcttatgaaaaacgaactcagtttaaaagtatttttagctcgtatgacttgttttcattcattaataataatttgaaataaaactaaggaaatggaatcttaaaagtctatgacagtgtaactctacagtctcaaaatgacctgataaattgataagacaaagatgagattattggggctgttcatattatgattcagaatcattttctattgtggtattataggttggttaaagtgatggcctttttgatgggttttgttgtgtcttgtgaacaagtcgttactgtgtccattattggaatggaattatcactactgtatcatgagtgggtattttgattctatggttccctcagtattacatcttgacttgtaatcaattatgaatatttcttgatatttaatgtataggacatttatttatactcaataaatatttttcaaaagga

SEQ ID NO: 299343 - DNA, 1034 bp, Homo sapiens
  misc_feature (965)..(965): n is a, c, g, or t
ttctaccaacaccccgccccctgcaggctctctccgagagcaccaagtccttttgctctccatccccggaagacccggctgaaaatccggaaaaagaatcgggaaacgccaggaggcatattgcgcttgcgcacggaggggccggaagtcgaggcgggagtgactctgcttccgtttctggttttgctctagtgtttgggtttcttcgcggctgctcaagatgaaccgactcttcgggaaagcgaaacccaaggctccgccgcccagcctgactgactgcattggcacggtggacagtagagcagaatccattgacaagaagatttctcgattggatgctgagctagtgaagtataaggatcagatcaagaagatgagagagggtcctgcaaagaatatggtcaagcagaaagccttgcgagttttaaagcaaaagaggatgtatgagcagcagcgggacaatcttgcccaacagtcattcaacatggaacaagccaattataccatccagtctttgaaggacaccaagaccacggttgatgctatgaaactgggagtaaaggaaatgaagaaggcatacaagcaagtgaagatcgaccagattgaggatttacaagaccagctagaggatatgatggaagatgcaaatgaaatccaagaagcactgagtcgcagttatggcaccccagaactggatgaagatgatttagaagcagagttggatgcactaggtgatgagcttctggctgatgaagacagttcttatttggatgaggcagcatctgcacctgcaattccagaaggtgttcccactgatacaaaaaacaagggatggggtctggtggatgaattgggttgccaagatcctggtcatagattggtcattcaagctttttgtgaacacacctttttggggtgagaattttttttcaattggcaaagattgggtttcttttgagggaganaaatggtttttcaaaaaggggggagagtgtgaaaagtctttttaaagcggaaagcggggtaaataaagg

SEQ ID NO: 299344 - DNA, 1192 bp, Homo sapiens
ttctaccaacaccccgccccctgcaggctctctccgagagcaccaagtccttttgctctccatccccggaagacccggctgaaaatccggaaaaagaatcgggaaacgccaggaggcatattgcgcttgcgcacggaggggccggaagtcgaggcgggagtgactctgcttccgtttctggttttgctctagtgtttgggtttcttcgcggctgctcaagatgaaccgactcttcgggaaagcgaaacccaaggctccgccgcccagcctgactgactgcattggcacggtggacagtagagcagaatccattgacaagaagatttctcgattggatgctgagctagtgaagtataaggatcagatcaagaagatgagagagggtcctgcaaagaatatggtcaagcagaaagccttgcgagttttaaagcaaaagaggatgtatgagcagcagcgggacaatcttgcccaacagtcattcaacatggaacaagccaattataccatccagtctttgaaggacaccaagaccacggttgatgctatgaaactgggagtaaaggaaatgaagaaggcatacaagcaagtgaagatcgaccagattgaggatttacaagaccagctagaggatatgatggaagatgcaaatgaaatccaagaagcactgagtcgcagttatggcaccccagaactggatgaagatgatttagaagcagagttggatgcactaggtgatgagcttctggctgatgaagacagttcttatttggatgaggcagcatctgcacctgcaattccagaaggtgttcccactgatacaaaaaacaagatggagtctggtgggtgaatttggattgtgaattgccagtttagcagcaattgtagcaagcataggatggaggtggggttaaattctggagcatctctgcttgtctatctggacttccaggctctgagcttggtggtgacgggagacagtaagtggcctgttgtgcaagacactgacttggcattgtgtatgtgcaagggggcctgccctggaattgtttcactgcagtctgcggaacagcacaggtgtgtgtgttacggcctgccatggcagctgacatagaacacattaagagtgtccattgctgctgtctgatatgcagaactgggcatatctagatccggtgtattcagtagctggtac

SEQ ID NO: 299345 - DNA, 1639 bp, Homo sapiens
caagcagtgtttgttaaaataccaggcattttattgcctctgcaaagatattctctcataaagctgatctttagtaagagtgaaggcaggctgggcatggtggctcacgcctgtaatcccaacactttgggaggctgaggtgggtggatcacctgatgtcaggagtttgagaccagcctgaccaacatggtgaaaccctgcctctactaaaaatacaaaaattagctgggtgtggtggcgtgcacctgtaatcccagctacctgggagtctgaggcaggagaatcacttgaacccaggaggcggaggttgcagtgagccattgcactccagcctgggcagcaagagtgcaactctgtctcaaataaataaataaataaataaagacaatttaaccaacatgacttactaaaacattgtgttttcttcttccttttcttaggttgatgctatgaaactgggagtaaaggaaatgaagaaggcatacaagcaagtgaagatcgaccagattgaggtgagacatatgctagtttctgcaagaatgtgcactagtttctgagagaatccaaacgagtgtgcatgtgataggaagagcacaggagaggaactgaatcttggggctgccatttactagtagagtaacttcgagaaagggtaccaaatgtctcagtttcctcagtgcaaggatcctaataccacatacagttacagacagtccccgatttaagacggttcaacttaacgatttttcagtttgatgatggtgcgaaaactatatgcattcagtagaaaccatactttgagtatccacgtaaccattctgtttttcagtttccatacaatatttaataaattacatgagatactcaacactttattatgaaataggctgttagatgattttgcccaactgtaggctaatgtaagtgttctgagcacaattaaggtaggctaggctaagtgatggttcagtaagttaggtgtattgaatgcactttctacttaagatattttgaacttaagatgggtttatcaggatgtaaccctatcataagtcaaggaacttctatattatgaggatgaaataaatgagctagtatctctacacacacaatgcctggcctatgataagcatccagtagttacttttaactaattcgatgatatttagtctgtttcttcgatggtagtggtgttgttgcctattcccaggattgtcatgagtgttaaatgaaggtatgtaggtaaagtgtatgtaaaatgtttaacccaactcctggcgtggtagacttggttcccttttctagtaattctctttagatttttaataataatgtcattagttccttaaagttagcatttcttattggaattgggttttgaccagggagatgagccctaagagcttggcagctctcagctgtcagatgaacagcccaggtggcaagaagagatagcagagggagtgagtggtgactggtcagaggagagaggcttcctttctgcatataaaatggcgctcttgacctttacccccctgactagaatgtccatttccttgaatgcagggacttgattttgttcactactgtgtccccagtgcccataacaatgccctgccatggttggtgctcagaaagt

SEQ ID NO: 299346 - DNA, 955 bp, Homo sapiens
ttctaccaacaccccgccccctgcaggctctctccgagagcaccaagtccttttgctctccatccccggaagacccggctgaaaatccggaaaaagaatcgggaaacgccaggaggcatattgcgcttgcgcacggaggggccggaagtcgaggcgggagtgactctgcttccgtttctggttttgctctagtgtttgggtttcttcgcggctgctcaagatgaaccgactcttcgggaaagcgaaacccaaggctccgccgcccagcctgactgactgcattggcacggtggacagtagagcagaatccattgacaagaagatttctcgattggatgctgagctagtgaagtataaggatcagatcaagaagatgagagagggtcctgcaaaggtaaggtgggcagcaactgctgcacaaggtgctggcagagcctagttttagcacctatagaaatagggcctagttcggctgggcgcagtggctcatgcatgtaatcccagcactttgggaggctgaggcgggtggatcacgaggtcaggcatttgagactagcctggccaacatagcgaaaccctgtctctactgaaaatacaaaaacttagctgggcatggtggcaggcgcctgtaatcccagctactcaggaggctgaggcaggagaatcgcttgaacctgggaggcggaggttgcagtgagcagagaccacaccgtagcactctagcccgagtgacagtgtgagactccgtctcaaaaaataagtgaaataggacctagtgcaggggctgtgagcatccctacagaagagatgcttacagtctggtaaggagaaaacatgtgagggtgtatcctttagggaggagagtttgcaatcaaatatggaagggaggctggggattgatctggtggaaagagatgctggtcacacgtctaaaagcatgtacatgagaattagc

SEQ ID NO: 299347 - DNA, 1187 bp, Homo sapiens
ttctaccaacaccccgccccctgcaggctctctccgagagcaccaagtccttttgctctccatccccggaagacccggctgaaaatccggaaaaagaatcgggaaacgccaggaggcatattgcgcttgcgcacggaggggccggaagtcgaggcgggagtgactctgcttccgtttctggttttgctctagtgtttgggtttcttcgcggctgctcaagatgaaccgactcttcgggaaagcgaaacccaaggctccgccgcccagcctgactgactgcattggcacggtggacagtagagcagaatccattgacaagaagatttctcgattggatgctgagctagtgaagtataaggatcagatcaagaagatgagagagggtcctgcaaagaatatggtcaagcagaaagccttgcgagttttaaagcaaaagaggatgtatgagcagcagcgggacaatcttgcccaacagtcattcaacatggaacaagccaattataccatccagtctttgaaggacaccaagaccacggttgatgctatgaaactgggagtaaaggaaatgaagaaggcatacaagcaagtgaagatcgaccagattgaggatttacaagaccagctagaggatatgatggaagatgcaaatgaaatccaagaagcactgagtcgcagttatggcaccccagaactggatgaagatgatttagaagcagagttggatgcactaggtgatgagcttctggctgatgaagacagttcttatttggatgaggcagcatctgcacctgcaattccagaaggtgttcccactgatacaaaaaacaaggatggagttctggtggatgaatttggattgccacagatccctgcttcatagatttgcatcattcaagcatatcttgtaaaacaaacacatattatgggactaggaaatatttatctttccaaatttgccataacagatttaggtttctttcctttctttgaaggaaagtttaattacattgctcttttattttttccattaagagactcattgcttgggaaatgctttcttcgtactaaaatttgattcctttttttcttatgaaaaacgaactcagtttaaaagtatttttagctcgtatgacttgttttcattcattaataataatttgaaataaaactaaggaaatggaatctta

SEQ ID NO: 299348 - DNA, 1490 bp, Homo sapiens
ttctaccaacaccccgccccctgcaggctctctccgagagcaccaagtccttttgctctccatccccggaagacccggctgaaaatccggaaaaagaatcgggaaacgccaggaggcatattgcgcttgcgcacggaggggccggaagtcgaggcgggagtgactctgcttccgtttctggttttgctctagtgtttgggtttcttcgcggctgctcaagatgaaccgactcttcgggaaagcgaaacccaaggctccgccgcccagcctgactgactgcattggcacggtggacagtagagcagaatccattgacaagaagatttctcgattggatgctgagctagtgaagtataaggatcagatcaagaagatgagagagggtcctgcaaagaatatggtcaagcagaaagccttgcgagttttaaagcaaaagaggatgtatgagcagcagcgggacaatcttgcccaacagtcattcaacatggaacaagccaattataccatccagtctttgaaggacaccaagaccacggttgatgctatgaaactgggagtaaaggaaatgaagaaggcatacaagcaagtgaagatcgaccagattgaggatttacaagaccagctagaggatatgatggaagatgcaaatgaaatccaagaagcactgagtcgcagttatggcaccccagaactggatgaagatgatttagaagcagagttggatgcactaggtgatgagcttctggctgatgaagacagttcttatttggatgaggcagcatctgcacctgcaattccagaaggtgttcccactgatacaaaaaacaaggatggagttctggtggatgaatttggattgccacagatccctgcttcatagatttgcatcattcaagcatatcttgtaaaacaaacacatattatgggactaggaaatatttatctttccaaatttgccataacagatttaggtttctttcctttctttgaaggaaagtttaattacattgctcttttattttttccattaagagactcattgcttgggaaatgctttcttcgtactaaaatttgattcctttttttcttatgaaaaacgaactcagtttaaaagtatttttagctcgtatgacttgttttcattcattaataataatttgaaataaaactaaggaaatggaatcttaaaagtctatgacagtgtaactctacagtctcaaaatgacctgataaattgataagacaaagatgagattattggggctgttcatattatgattcagaatcattttctattgtggtattataggtggcagaagcgtttaaattcccttggaaatttaactgttagtccaaagaggaacaactcttcggacactaggaaaaaaccttggagagagagtcacaaatctaacacccattgtaggcccttaagctgccaccattttagaatgcgttaagcctcaacacccactacctaaaaattccca

SEQ ID NO: 299349 - DNA, 1480 bp, Homo sapiens
ttctaccaacaccccgccccctgcaggctctctccgagagcaccaagtccttttgctctccatccccggaagacccggctgaaaatccggaaaaagaatcgggaaacgccaggaggcatattgcgcttgcgcacggaggggccggaagtcgaggcgggagtgactctgcttccgtttctggttttgctctagtgtttgggtttcttcgcggctgctcaagatgaaccgactcttcgggaaagcgaaacccaaggctccgccgcccagcctgactgactgcattggcacggtggacagtagagcagaatccattgacaagaagatttctcgattggatgctgagctagtgaagtataaggatcagatcaagaagatgagagagggtcctgcaaagaatatggtcaagcagaaagccttgcgagttttaaagcaaaagaggatgtatgagcagcagcgggacaatcttgcccaacagtcattcaacatggaacaagccaattataccatccagtctttgaaggacaccaagaccacggttgatgctatgaaactgggagtaaaggaaatgaagaaggcatacaagcaagtgaagatcgaccagattgaggatttacaagaccagctagaggatatgatggaagatgcaaatgaaatccaagaagcactgagtcgcagttatggcaccccagaactggatgaagatgatttagaagcagagttggatgcactaggtgatgagcttctggctgatgaagacagttcttatttggatgaggcagcatctgcacctgcaattccagaaggtgttcccactgatacaaaaaacaaggatggagttctggtggatgaatttggattgccacagatccctgcttcatagatttgcatcattcaagcatatcttgtaaaacaaacacatattatgggactaggaaatatttatctttccaaatttgccataacagatttaggtttctttcctttctttgaaggaaagtttaattacattgctcttttattttttccattaagagactcattgcttgggaaatgctttcttcgtactaaaatttgattcctttttttcttatgaaaaacgaactcagtttaaaagtatttttagctcgtatgacttgttttcattcattaataataatttgaaataaaactaaggaaatggaatcttaaaagtctatgacagtgtaactctacagtctcttatgattcagaatcattttctattgtggtattataggttggttaaagtgatggcctttttgatgggttttgttgtgtcttgtgaacaagtcgttactgtgtccattattggaatggaattatcactactgtatcatgagtgggtattttgattctatggttccctcagtattacatcttgacttgtaatcaattatgaatatttcttgatatttaatgtataggacatttatttatactcaataaatatttttcaaaagga

SEQ ID NO: 299350 - DNA, 1561 bp, Homo sapiens
ttctaccaacaccccgccccctgcaggctctctccgagagcaccaagtccttttgctctccatccccggaagacccggctgaaaatccggaaaaagaatcgggaaacgccaggaggcatattgcgcttgcgcacggaggggccggaagtcgaggcgggagtgactctgcttccgtttctggttttgctctagtgtttgggtttcttcgcggctgctcaagatgaaccgactcttcgggaaagcgaaacccaaggctccgccgcccagcctgactgactgcattggcacggtggacagtagagcagaatccattgacaagaagatttctcgattggatgctgagctagtgaagtataaggatcagatcaagaagatgagagagggtcctgcaaagaatatggtcaagcagaaagccttgcgagttttaaagcaaaagaggattttctttcctctgcttctgcatacgtggtatgagcagcagcgggacaatcttgcccaacagtcattcaacatggaacaagccaattataccatccagtctttgaaggacaccaagaccacggttgatgctatgaaactgggagtaaaggaaatgaagaaggcatacaagcaagtgaagatcgaccagattgaggatttacaagaccagctagaggatatgatggaagatgcaaatgaaatccaagaagcactgagtcgcagttatggcaccccagaactggatgaagatgatttagaagcagagttggatgcactaggtgatgagcttctggctgatgaagacagttcttatttggatgaggcagcatctgcacctgcaattccagaaggtgttcccactgatacaaaaaacaaggatggagttctggtggatgaatttggattgccacagatccctgcttcatagatttgcatcattcaagcatatcttgtaaaacaaacacatattatgggactaggaaatatttatctttccaaatttgccataacagatttaggtttctttcctttctttgaaggaaagtttaattacattgctcttttattttttccattaagagactcattgcttgggaaatgctttcttcgtactaaaatttgattcctttttttcttatgaaaaacgaactcagtttaaaagtatttttagctcgtatgacttgttttcattcattaataataatttgaaataaaactaaggaaatggaatcttaaaagtctatgacagtgtaactctacagtctcaaaatgacctgataaattgataagacaaagatgagattattggggctgttcatattatgattcagaatcattttctattgtggtattataggttggttaaagtgatggcctttttgatgggttttgttgtgtcttgtgaacaagtcgttactgtgtccattattggaatggaattatcactactgtatcatgagtgggtattttgattctatggttccctcagtattacatcttgacttgtaatcaattatgaatatttcttgatatttaatgtataggacatttatttatactcaataaatatttttcaaaagga

SEQ ID NO: 299351 - DNA, 1487 bp, Homo sapiens
gagctatctctgtttgtgggccctgggtcgctcatgtggtgttactgctgacagcgacttggcttccaataagactggatatctcgcatatgcgtatgcagtcgcatgaggtcgaatgaacctcaagatggcttcgcgattgctcctacgcacattgaaatagaactgccctgtgggggcgagccggaagccggttcgtagacaacgaagattccaatgtagtagcgaaggtactagtaggctcagtattacgtggagtagtcttgaatgccatacatggaaaggtcctaaaggcgatgcctgcagtctaatgcaagaattgacgacgcacgcggtcctgacaaaggaatatggtcaagcagaaagccttgcgagttttaaagcaaaagaggatgtatgagcagcagcgggacaatcttgcccaacagtcattcaacatggaacaagccaattataccatccagtctttgaaggacaccaagaccacggttgatgctatgaaactgggagtaaaggaaatgaagaaggcatacaagcaagtgaagatcgaccagattgaggatttacaagaccagctagaggatatgatggaagatgcaaatgaaatccaagaagcactgagtcgcagttatggcaccccagaactggatgaagatgatttagaagcagagttggatgcactaggtgatgagcttctggctgatgaagacagttcttatttggatgaggcagcatctgcacctgcaattccagaaggtgttcccactgatacaaaaaacaaggatggagttctggtggatgaatttggattgccacagatccctgcttcatagatttgcatcattcaagcatatcttgtaaaacaaacacatattatgggactaggaaatatttatctttccaaatttgccataacagatttaggtttctttcctttctttgaaggaaagtttaattacattgctcttttattttttccattaagagactcattgcttgggaaatgctttcttcgtactaaaatttgattcctttttttcttatgaaaaacgaactcagtttaaaagtatttttagctcgtatgacttgttttcattcattaataataatttgaaataaaactaaggaaatggaatcttaaaagtctatgacagtgtaactctacagtctcaaaatgacctgataaattgataagacaaagatgagattattggggctgttcatattatgattcagaatcattttctattgtggtattataggttggttaaagtgatggcctttttgatgggttttgttgtgtcttgtgaacaagtcgttactgtgtccattattggaatggaattatcactactgtatcatgagtgggtattttgattctatggttccctcagtattacatcttgacttgtaatcaattatgaatatttcttgatatttaatgtataggacatttatttatactcaataaatatttttcaaaagga

SEQ ID NO: 299352 - DNA, 1431 bp, Homo sapiens
gctttcctgtatctggcttttggtctagctgtctgggttatcttcgccggattgtgcgaacgatgaatcgcgactctttcgaggaaataacgggaaactcgcaaatggctgccgtgcgatcatcactgaatgactgacgttcgggacgggtgagacgagtcagtagcctgaaatccatctcgacataggaaggtatttgcctcgtaacttatggacgtgctagtaccgtcatacggatgcaggtagtaccggatcgagatcaagtatcatgatggagagggccctgcgaagaatatggtcaagcagaaagccttgcgagttttaaagcaaaagaggatgtatgagcagcagcgggacaatcttgcccaacagtcattcaacatggaacaagccaattataccatccagtctttgaaggacaccaagaccacggttgatgctatgaaactgggagtaaaggaaatgaagaaggcatacaagcaagtgaagatcgaccagattgaggatttacaagaccagctagaggatatgatggaagatgcaaatgaaatccaagaagcactgagtcgcagttatggcaccccagaactggatgaagatgatttagaagcagagttggatgcactaggtgatgagcttctggctgatgaagacagttcttatttggatgaggcagcatctgcacctgcaattccagaaggtgttcccactgatacaaaaaacaaggatggagttctggtggatgaatttggattgccacagatccctgcttcatagatttgcatcattcaagcatatcttgtaaaacaaacacatattatgggactaggaaatatttatctttccaaatttgccataacagatttaggtttctttcctttctttgaaggaaagtttaattacattgctcttttattttttccattaagagactcattgcttgggaaatgctttcttcgtactaaaatttgattcctttttttcttatgaaaaacgaactcagtttaaaagtatttttagctcgtatgacttgttttcattcattaataataatttgaaataaaactaaggaaatggaatcttaaaagtctatgacagtgtaactctacagtctcaaaatgacctgataaattgataagacaaagatgagattattggggctgttcatattatgattcagaatcattttctattgtggtattataggttggttaaagtgatggcctttttgatgggttttgttgtgtcttgtgaacaagtcgttactgtgtccattattggaatggaattatcactactgtatcatgagtgggtattttgattctatggttccctcagtattacatcttgacttgtaatcaattatgaatatttcttgatatttaatgtataggacatttatttatactcaataaatatttttcaaaagga

SEQ ID NO: 299353 - DNA, 1488 bp, Homo sapiens
ttctaccaacaccccgccccctgcaggctctctccgagagcaccaagtccttttgctctccatccccggaagacccggctgaaaatccggaaaaagaatcgggaaacgccaggaggcatattgcgcttgcgcacggaggggccggaagtcgaggcgggagtgactctgcttccgtttctggttttgctctagtgtttgggtttcttcgcggctgctcaagatgaaccgactcttcgggaaagcgaaacccaaggctccgccgcccagcctgactgactgcattggcacggtggacagtagagcagaatccattgacaagaagatttctcgattggatgctgagctagtgaagtataaggatcagatcaagaagatgagagagggtcctgcaaagaatatggtcaagcagaaagccttgcgagttttaaagcaaaagaggatgaacaagccaattataccatccagtctttgaaggacaccaagaccacggttgatgctatgaaactgggagtaaaggaaatgaagaaggcatacaagcaagtgaagatcgaccagattgaggatttacaagaccagctagaggatatgatggaagatgcaaatgaaatccaagaagcactgagtcgcagttatggcaccccagaactggatgaagatgatttagaagcagagttggatgcactaggtgatgagcttctggctgatgaagacagttcttatttggatgaggcagcatctgcacctgcaattccagaaggtgttcccactgatacaaaaaacaaggatggagttctggtggatgaatttggattgccacagatccctgcttcatagatttgcatcattcaagcatatcttgtaaaacaaacacatattatgggactaggaaatatttatctttccaaatttgccataacagatttaggtttctttcctttctttgaaggaaagtttaattacattgctcttttattttttccattaagagactcattgcttgggaaatgctttcttcgtactaaaatttgattcctttttttcttatgaaaaacgaactcagtttaaaagtatttttagctcgtatgacttgttttcattcattaataataatttgaaataaaactaaggaaatggaatcttaaaagtctatgacagtgtaactctacagtctcaaaatgacctgataaattgataagacaaagatgagattattggggctgttcatattatgattcagaatcattttctattgtggtattataggttggttaaagtgatggcctttttgatgggttttgttgtgtcttgtgaacaagtcgttactgtgtccattattggaatggaattatcactactgtatcatgagtgggtattttgattctatggttccctcagtattacatcttgacttgtaatcaattatgaatatttcttgatatttaatgtataggacatttatttatactcaataaatatttttcaaaagga

SEQ ID NO: 299354 - DNA, 1605 bp, Homo sapiens
  misc_feature (365)..(365): n is a, c, g, or t
ttctaccaacaccccgccccctgcaggctctctccgagagcaccaagtccttttgctctccatccccggaagacccggctgaaaatccggaaaaagaatcgggaaacgccaggaggcatattgcgcttgcgcacggaggggccggaagtcgaggcgggagtgactctgcttccgtttctggttttgctctagtgtttgggtttcttcgcggctgctcaagatgaaccgactcttcgggaaagcgaaacccaaggctccgccgcccagcctgactgactgcattggcacgctgggggacagcagtagccgaatatccattgaccgagagagaattccttcgtacttggcatgcctgaagtgctaantgaacgctatcatggactcatgaattcaaccaatgaatgacgtatgcagcgtgctcactctataattcaattattgcatcaagtcatgaaaatagcctcttgcagagattctcatagaagacaatacagcagggagtgtcttgagtcacgacagccgtggactaattcttgacccaataagttcaattctcatgaacaagccaattataccatccagtctttgaaggacaccaagaccacggttgatgctatgaaactgggagtaaaggaaatgaagaaggcatacaagcaagtgaagatcgaccagattgaggatttacaagaccagctagaggatatgatggaagatgcaaatgaaatccaagaagcactgagtcgcagttatggcaccccagaactggatgaagatgatttagaagcagagttggatgcactaggtgatgagcttctggctgatgaagacagttcttatttggatgaggcagcatctgcacctgcaattccagaaggtgttcccactgatacaaaaaacaaggatggagttctggtggatgaatttggattgccacagatccctgcttcatagatttgcatcattcaagcatatcttgtaaaacaaacacatattatgggactaggaaatatttatctttccaaatttgccataacagatttaggtttctttcctttctttgaaggaaagtttaattacattgctcttttattttttccattaagagactcattgcttgggaaatgctttcttcgtactaaaatttgattcctttttttcttatgaaaaacgaactcagtttaaaagtatttttagctcgtatgacttgttttcattcattaataataatttgaaataaaactaaggaaatggaatcttaaaagtctatgacagtgtaactctacagtctcaaaatgacctgataaattgataagacaaagatgagattattggggctgttcatattatgattcagaatcattttctattgtggtattataggttggttaaagtgatggcctttttgatgggttttgttgtgtcttgtgaacaagtcgttactgtgtccattattggaatggaattatcactactgtatcatgagtgggtattttgattctatggttccctcagtattacatcttgacttgtaatcaattatgaatatttcttgatatttaatgtataggacatttatttatactcaataaatatttttcaaaagga

SEQ ID NO: 299355 - DNA, 1611 bp, Homo sapiens
ttctaccaacaccccgccccctgcaggctctctccgagagcaccaagtccttttgctctccatccccggaagacccggctgaaaatccggaaaaagaatcgggaaacgccaggaggcatattgcgcttgcgcacggaggggccggaagtcgaggcgggagtgactctgcttccgtttctggttttgctctagtgtttgggtttcttcgcggctgctcaagatgaaccgactcttcgggaaagcgaaacccaaggctccgccgcccagcctgactgactgcattggcacggtggacagtagagcagaatccattgacaagaagatttctcgattggatgctgagctagtgaagtataaggatcagatcaagaagatgagagagggtcctgcaaagaatatggtcaagcagaaagccttgcgagttttaaagcaaaagaggatgtatgagcagcagcgggacaatcttgcccaacagtcattcaacatggaacaagccaattataccatccagtctttgaaggacaccaagaccacggttgatgctatgaaactgggagtaaaggaaatgaagaaggcatacaagcaagtgaagatcgaccagattgaggatttacaagaccagctagaggatatgatggaagatgcaaatgaaatccaagaagcactgagtcgcagttatggcaccccagaactggatgaagatgatttagaagcagaggactgtgggaaactttttttttttaaaaggggaaaaaaaggccaagaagatttgggaatggccaactaaagggggagttggatgcactaggtgatgagcttctggctgatgaagacagttcttatttggatgaggcagcatctgcacctgcaattccagaaggtgttcccactgatacaaaaaacaaggatggagttctggtggatgaatttggattgccacagatccctgcttcatagatttgcatcattcaagcatatcttgtaaaacaaacacatattatgggactaggaaatatttatctttccaaatttgccataacagatttaggtttctttcctttctttgaaggaaagtttaattacattgctcttttattttttccattaagagactcattgcttgggaaatgctttcttcgtactaaaatttgattcctttttttcttatgaaaaacgaactcagtttaaaagtatttttagctcgtatgacttgttttcattcattaataataatttgaaataaaactaaggaaatggaatcttaaaagtctatgacagtgtaactctacagtctcaaaatgacctgataaattgataagacaaagatgagattattggggctgttcatattatgattcagaatcattttctattgtggtattataggttggttaaagtgatggcctttttgatgggttttgttgtgtcttgtgaacaagtcgttactgtgtccattattggaatggaattatcactactgtatcatgagtgggtattttgattctatggttccctcagtattacatcttgacttgtaatcaattatgaatatttcttgatatttaatgtataggacatttatttatactcaataaatatttttcaaaagga

SEQ ID NO: 299356 - DNA, 1421 bp, Homo sapiens
ttctaccaacaccccgccccctgcaggctctctccgagagcaccaagtccttttgctctccatccccggaagacccggctgaaaatccggaaaaagaatcgggaaacgccaggaggcatattgcgcttgcgcacggaggggccggaagtcgaggcgggagtgactctgcttccgtttctggttttgctctagtgtttgggtttcttcgcggctgctcaagatgaaccgactcttcgggaaagcgaaacccaaggctccgccgcccagcctgactgactgcattggcacggtggacagtagagcagaatccattgacaagaagatttctcgattggatgctgagctagtgaagtataaggatcagatcaagaagatgagagagggtcctgcaaagaatatggtcaagcagaaagccttgcgagttttaaagcaaaagaggatgtatgagcagcagcgggacaatcttgcccaacagtcattcaacatggaacaagccaattataccatccagtctttgaaggacaccaagaccacggttgatgctatgaaactgggagtaaaggaaatgaagaaggcatacaagcaagtgaagatcgaccagattgaggatttacaagaccagctagaggatatgatggaagatgcaaatgaaatccaagaagcactgagtcgcagttatggcaccccagaactggatgaagatgatttagaagcaggatggagttctggtggatgaatttggattgccacagatccctgcttcatagatttgcatcattcaagcatatcttgtaaaacaaacacatattatgggactaggaaatatttatctttccaaatttgccataacagatttaggtttctttcctttctttgaaggaaagtttaattacattgctcttttattttttccattaagagactcattgcttgggaaatgctttcttcgtactaaaatttgattcctttttttcttatgaaaaacgaactcagtttaaaagtatttttagctcgtatgacttgttttcattcattaataataatttgaaataaaactaaggaaatggaatcttaaaagtctatgacagtgtaactctacagtctcaaaatgacctgataaattgataagacaaagatgagattattggggctgttcatattatgattcagaatcattttctattgtggtattataggttggttaaagtgatggcctttttgatgggttttgttgtgtcttgtgaacaagtcgttactgtgtccattattggaatggaattatcactactgtatcatgagtgggtattttgattctatggttccctcagtattacatcttgacttgtaatcaattatgaatatttcttgatatttaatgtataggacatttatttatactcaataaatatttttcaaaagga

SEQ ID NO: 299357 - DNA, 1366 bp, Homo sapiens
ttctaccaacaccccgccccctgcaggctctctccgagagcaccaagtccttttgctctccatccccggaagacccggctgaaaatccggaaaaagaatcgggaaacgccaggaggcatattgcgcttgcgcacggaggggccggaagtcgaggcgggagtgactctgcttccgtttctggttttgctctagtgtttgggtttcttcgcggctgctcaagatgaaccgactcttcgggaaagcgaaacccaaggctccgccgcccagcctgactgactgcattggcacggtggacagtagagcagaatccattgacaagaagatttctcgattggatgctgagctagtgaagtataaggatcagatcaagaagatgagagagggtcctgcaaagaatatggtcaagcagaaagccttgcgagttttaaagcaaaagaggatgtatgagcagcagcgggacaatcttgcccaacagtcattcaacatggaacaagccaattataccatccagtctttgaaggacaccaagaccacggttgatgctatgaaactgggagtaaaggaaatgaagaaggcatacaagcaagtgaagatcgaccagattgaggcagcatctgcacctgcaattccagaaggtgttcccactgatacaaaaaacaaggatggagttctggtggatgaatttggattgccacagatccctgcttcatagatttgcatcattcaagcatatcttgtaaaacaaacacatattatgggactaggaaatatttatctttccaaatttgccataacagatttaggtttctttcctttctttgaaggaaagtttaattacattgctcttttattttttccattaagagactcattgcttgggaaatgctttcttcgtactaaaatttgattcctttttttcttatgaaaaacgaactcagtttaaaagtatttttagctcgtatgacttgttttcattcattaataataatttgaaataaaactaaggaaatggaatcttaaaagtctatgacagtgtaactctacagtctcaaaatgacctgataaattgataagacaaagatgagattattggggctgttcatattatgattcagaatcattttctattgtggtattataggttggttaaagtgatggcctttttgatgggttttgttgtgtcttgtgaacaagtcgttactgtgtccattattggaatggaattatcactactgtatcatgagtgggtattttgattctatggttccctcagtattacatcttgacttgtaatcaattatgaatatttcttgatatttaatgtataggacatttatttatactcaataaatatttttcaaaagga

SEQ ID NO: 299358 - DNA, 1192 bp, Homo sapiens
ttctaccaacaccccgccccctgcaggctctctccgagagcaccaagtccttttgctctccatccccggaagacccggctgaaaatccggaaaaagaatcgggaaacgccaggaggcatattgcgcttgcgcacggaggggccggaagtcgaggcgggagtgactctgcttccgtttctggttttgctctagtgtttgggtttcttcgcggctgctcaagatgaaccgactcttcgggaaagcgaaacccaaggctccgccgcccagcctgactgactgcattggcacggtggacagtagagcagaatccattgacaagaagatttctcgattggatgctgagctagtgaagtataaggatcagatcaagaagatgagagagggtcctgcaaagaatatggtcaagcagaaagccttgcgagttttaaagcaaaagaggatgtatgagcagcagcgggacaatcttgcccaacagtcattcaacatggatggagttctggtggatgaatttggattgccacagatccctgcttcatagatttgcatcattcaagcatatcttgtaaaacaaacacatattatgggactaggaaatatttatctttccaaatttgccataacagatttaggtttctttcctttctttgaaggaaagtttaattacattgctcttttattttttccattaagagactcattgcttgggaaatgctttcttcgtactaaaatttgattcctttttttcttatgaaaaacgaactcagtttaaaagtatttttagctcgtatgacttgttttcattcattaataataatttgaaataaaactaaggaaatggaatcttaaaagtctatgacagtgtaactctacagtctcaaaatgacctgataaattgataagacaaagatgagattattggggctgttcatattatgattcagaatcattttctattgtggtattataggttggttaaagtgatggcctttttgatgggttttgttgtgtcttgtgaacaagtcgttactgtgtccattattggaatggaattatcactactgtatcatgagtgggtattttgattctatggttccctcagtattacatcttgacttgtaatcaattatgaatatttcttgatatttaatgtataggacatttatttatactcaataaatatttttcaaaagga

SEQ ID NO: 299359 - DNA, 1117 bp, Homo sapiens
ttctaccaacaccccgccccctgcaggctctctccgagagcaccaagtccttttgctctccatccccggaagacccggctgaaaatccggaaaaagaatcgggaaacgccaggaggcatattgcgcttgcgcacggaggggccggaagtcgaggcgggagtgactctgcttccgtttctggttttgctctagtgtttgggtttcttcgcggctgctcaagatgaaccgactcttcgggaaagcgaaacccaaggctccgccgcccagcctgactgactgcattggcacggtggacagtagagcagaatccattgacaagaagatttctcgattggatgctgagctagtgaagtataaggatcagatcaagaagatgagagagggtcctgcaaagaatatggtcaagcagaaagccttgcgagttttaaagcaaaagaggatgtatgagcagcagcgggacaatcttgcccaacagtcattcaacatggaacaagccaattataccatccagtctttgaaggacaccaagaccacggttgatgctatgaaactgggagtaaaggaaatgaagaaggcatacaagcaagtgaagatcgaccagattgaggatttacaagaccagctagaggatatgatggaagatgcaaatgaaatccaagaagcactgagtcgcagttatggcaccccagaactggatgaagatgatttagaagcaggatggagttctggtggatgaatttggattgccacagatccctgcttcatagatttgcatcattcaagcatatcttgtaaaacaaacacatattatgggactaggaaatatttatctttccaaatttgccataacagatttaggtttctttcctttctttgaaggaaagtttaattacattgctcttttattttttccattaagagactcattgcttgggaaatgctttcttcgtactaaaatttgattcctttttttcttatgaaaaacgaactcagtttaaaagtatttttagctcgtatgacttgttttcattcattaataataatttgaaataaaactaaggaaatggaatcttataaaaaaaaaagacaaaacaaaaaactggcctcgttggcctca

SEQ ID NO: 299360 - DNA, 1354 bp, Homo sapiens
ttctaccaacaccccgccccctgcaggctctctccgagagcaccaagtccttttgctctccatccccggaagacccggctgaaaatccggaaaaagaatcgggaaacgccaggaggcatattgcgcttgcgcacggaggggccggaagtcgaggcgggagtgactctgcttccgtttctggttttgctctagtgtttgggtttcttcgcggctgctcaagatgaaccgactcttcgggaaagcgaaacccaaggctccgccgcccagcctgactgactgcattggcacggtggacagtagagcagaatccattgacaagaagatttctcgattggatgctgagctagtgaagtataaggatcagatcaagaagatgagagagggtcctgcaaagaatatggtcaagcagaaagccttgcgagttttaaagcaaaagaggatgtatgagcagcagcgggacaatcttgcccaacagtcattcaacatggaacaagccaattataccatccagtctttgaaggacaccaagaccacggttgatgctatgaaactgggagtaaaggaaatgaagaaggcatacaagcaagtgaagatcgaccagattgaggatttacaagaccagctagaggatatgatggaagatgcaaatgaaatccaagaagcactgagtcgcagttatggcaccccagaactggatgaagatgatttagaagcagaggtaagttatgagaaaagtaatgtatatttagttttggagtccaaaagcaacagctgcctgggaccttttctcaaatgctagtgaaaatttctatcaggatttcctgaaggttagtttatggtactgtccctgggcaaagagcttgtgaggcagccacatcagattgcatactccaccaacaacagtgggatggatcaactctgaaggaagtccaggtacaggctgacctggtgcttggtatctgtaagtgtcctccacgtggcctttccttgctgtattccttttgattttgttctcactattttcctagttggagtcctctccctcagaacagcaaaaccaattaagaaacaataattagggccaggtgccctaatcccagcactttggaaggccaaggtaggcggatccactcaagcccaggagttcgagacctggctgagcaatatggcgtcaccccgtctctataaaaaatacaaaaattacccaggcatggtggtgtgcgcctgcggtcctagctactcgggaggctgaggtggaaggatcacttgatcccaggaggtagaggttccagtgagccgagattgccccactgcagcctgggcaacagagtgagaccttctctcaaaaaaaaaa

SEQ ID NO: 299361 - DNA, 1734 bp, Homo sapiens
ttctaccaacaccccgccccctgcaggctctctccgagagcaccaagtccttttgctctccatccccggaagacccggctgaaaatccggaaaaagaatcgggaaacgccaggaggcatattgcgcttgcgcacggaggggccggaagtcgaggcgggagtgactctgcttccgtttctggttttgctctagtgtttgggtttcttcgcggctgctcaagatgaaccgactcttcgggaaagcgaaacccaaggctccgccgcccagcctgactgactgcattggcacggtggacagtagagcagaatccattgacaagaagatttctcgattggatgctgagctagtgaagtataaggatcagatcaagaagatgagagagggtcctgcaaagaatatggtcaagcagaaagccttgcgagttttaaagcaaaagaggatgtatgagcagcagcgggacaatcttgcccaacagtcattcaacatggaacaagccaattataccatccagtctttgaaggacaccaagaccacggttgatgctatgaaactgggagtaaaggaaatgaagaaggcatacaagcaagtgaagatcgaccagattgaggtgagacatatgctagtttctgcaagaatgtgcactagtttctgagagaatccaaacgagtgtgcatgtgataggaagagcacaggagaggaactgaatcttggggctgccatttactagtagagtaacttcgagaaagggtaccaaatgtctcagtttcctcagtgcaaggatcctaataccacatacagttacagacagtccccgatttaagacggttcaacttaacgatttttcagtttgatgatggtgcgaaaactatatgcattcagtagaaaccatactttgagtatccacgtaaccattctgtttttcagtttccatacaatatttaataaattacatgagatactcaacactttattatgaaataggctgttagatgattttgcccaactgtaggctaatgtaagtgttctgagcacaattaaggtaggctaggctaagtgatggttcagtaagttaggtgtattgaatgcactttctacttaagatattttgaacttaagatgggtttatcaggatgtaaccctatcataagtcaaggaacttctatattatgaggatgaaataaatgagctagtatctctacacacacaatgcctggcctatgataagcatccagtagttacttttaactaattcgatgatatttagtctgtttcttcgatggtagtggtgttgttgcctattcccaggattgtcatgagtgttaaatgaaggtatgtaggtaaagtgtatgtaaaatgtttaacccaactcctggcgtggtagacttggttcccttttctagtaattctctttagatttttaataataatgtcattagttccttaaagttagcatttcttattggaattgggttttgaccagggagatgagccctaagagcttggcagctctcagctgtcagatgaacagcccaggtggcaagaagagatagcagagggagtgagtggtgactggtcagaggagagaggcttcctttctgcatataaaatggcgctcttgacctttacccccctgactagaatgtccatttccttgaatgcagggacttgattttgttcactactgtgtccccagtgcccataacaatgccctgccatggttggtgctcagaaagt

SEQ ID NO: 299362 - DNA, 758 bp, Homo sapiens
ttctaccaacaccccgccccctgcaggctctctccgagagcaccaagtccttttgctctccatccccggaagacccggctgaaaatccggaaaaagaatcgggaaacgccaggaggcatattgcgcttgcgcacggaggggccggaagtcgaggcgggagtgactctgcttccgtttctggttttgctctagtgtttgggtttcttcgcggctgctcaagatgaaccgactcttcgggaaagcgaaacccaaggctccgccgcccagcctgactgactgcattggcacggtggacagtagagcagaatccattgacaagaagatttctcgattggatgctgagctagtgaagtataaggatcagatcaagaagatgagagagggtcctgcaaagaatatggtcaagcagaaagccttgcgagttttaaagcaaaagaggatgtatgagcagcagcgggacaatcttgcccaacagtcattcaacatggaacaagccaattataccatccagtctttgaaggacaccaagaccacggttgatgctatgaaactgggagtaaaggaaatgaagaaggcatacaagcaatcgttactgtgtccattattggaatggaattatcactactgtatcatgagtgggtattttgattctatggttccctcagtattacatcttgacttgtaatcaattatgaatatttcttgatatttaatgtataggacatttatttatactcaataaatatttttcaaaagga

SEQ ID NO: 299363 - DNA, 1057 bp, Homo sapiens
  misc_feature (988)..(988): n is a, c, g, or t
ttctaccaacaccccgccccctgcaggctctctccgagagcaccaagtccttttgctctccatccccggaagacccggctgaaaatccggaaaaagaatcgggaaacgccaggaggcatattgcgcttgcgcacggaggggccggaagtcgaggcgggagtgactctgcttccgtttctggttttgctctagtgtttgggtttcttcgcggctgctcaagatgaaccgactcttcgggaaagcgaaacccaaggctccgccgcccagcctgactgactgcattggcacgggtgggcatttgatcatgcataagtggacagtagagcagaatccattgacaagaagatttctcgattggatgctgagctagtgaagtataaggatcagatcaagaagatgagagagggtcctgcaaagaatatggtcaagcagaaagccttgcgagttttaaagcaaaagaggatgtatgagcagcagcgggacaatcttgcccaacagtcattcaacatggaacaagccaattataccatccagtctttgaaggacaccaagaccacggttgatgctatgaaactgggagtaaaggaaatgaagaaggcatacaagcaagtgaagatcgaccagattgaggatttacaagaccagctagaggatatgatggaagatgcaaatgaaatccaagaagcactgagtcgcagttatggcaccccagaactggatgaagatgatttagaagcagagttggatgcactaggtgatgagcttctggctgatgaagacagttcttatttggatgaggcagcatctgcacctgcaattccagaaggtgttcccactgatacaaaaaacaagggatggggtctggtggatgaattgggttgccaagatcctggtcatagattggtcattcaagctttttgtgaacacacctttttggggtgagaattttttttcaattggcaaagattgggtttcttttgagggaganaaatggtttttcaaaaaggggggagagtgtgaaaagtctttttaaagcggaaagcggggtaaataaagg

SEQ ID NO: 299364 - DNA, 1713 bp, Homo sapiens
ggatgggcatactatctcggaatctggggcatgctgcattctggcccgatgacatgtggatagaagtcctcgccgacaggtagtggccctacttgtggtaggtttcgtgcccagaggtgttgtagatgaggccgattccctcccgctagtgtgttagccggtggggacagtcgctgagaggaaggtagggaacatgtcgctcagcggcaagagcgcaaggctatggcttgcggcggaattgagcgaacgcctttcagggcgttcttgaaagtcgggtacggtccttgtctacctgcggcggcccttgggaagttggcaacaacggacagtcgaaggtgttttgccgtgttaagcttgttctggtggaaactaggatagggggcccaaagggaccaacattgagcatggggccagtccgcgcgtgggcccgagagacgtgttcgccacaagctggaacaacggggggccgagcgtgttgcggccgctggcgcgctcaggaagacgtaagccagagggggatagacgaatgcccaggaaggggggaaagctcgggggtaggggcttcgttgccgtctggggacttgggaggaatgttaggagaagcttgcgtttcgaggcatagtgtttcgcaccgccaagcccacgggaagttgccccgcgcgtgggcgttgttgacaagttagtgtgaaggtgttgttgcggcacacgtttgcaagggtgtgtgccagaatgtgacaagttgaggttggcgtgttgtgggttaatacggatctccagtgtagcgagtccaggttgagtgtgtgaggtcggggtgaagccgttatcgggggagaagatggtaagtgggtgtaaggtgccgtttgtgccgccataagaattgttttggccgcaagttagtaggcatggaggtgttatagaggggtgtgtggcgtggtttgcgcgtgttgtgcagtggtgtggaagaagccgtatatgacgggtgtgtgttaggaggtgttagccaaggttgtgggacgtgccgtgtgtgtcagcttgtgtggtgttgtgccgcaggtttaagagggagggatggcgtgcagttgtggccgttttggttgggagagagttggcttgttgcggtgtgcggcttagctttagatagagtgtgtggagttgtgcgcgtgtgtgtgtgtgtgcgtgtagtcgaaaaagagaggcggagaggcgtgcgagggtttgtagagagaggtaggttggttgtagggcgtgcggtagtggagcgttggtgtgttgcagtgtgcagttaagtgaagtgaaggtgttggaagagtagaagagctagagggagaagttgggagagtgcgttagagaagggtcgtagtggaggcaggttgtaagctgctagcaggtgcgtcaagaaaatgacctgataaattgataagacaaagatgagattattggggctgttcatattatgattcagaatcattttctattgtggtattataggttggttaaagtgatggcctttttgatgggttttgttgtgtcttgtgaacaagtcgttactgtgtccattattggaatggaattatcactactgtatcatgagtgggtattttgattctatggttccctcagtattacatcttgacttgtaatcaattatgaatatttcttgatatttaatgtataggacatttatttatactcaataaatatttttcaaaagga

SEQ ID NO: 299365 - DNA, 1299 bp, Homo sapiens
taatcttggtgatgccttggacagcagcaactccatgcaaaccatccaaaagaccaccacccgccggatagtggatggcaaagtggtgtctgagaccaatgacaccaaagttctgaggcattaagccagcagaagcagggtaccctttggggagcaggaggccaataaaaagttcagagttcaaaaaaaaaaacccaaggctccgccagccagcctgactgactgcttggcacggtggacagtagagcagaatccattgacaagaagatttctcgattggatgctgagctagtgaagtataaggatcagatcaagaagatgagagagggtcctgcaaagaatatggtcaagcagaaagccttgcgagttttaaagcaaaagaggatgtatgagcagcagcgggacaatcttgcccaacagtcattcaacatggaacaagccaattataccatccagtctttgaaggacaccaagaccacggttgatgctatgaaactgggagtaaaggaaatgaagaaggcatacaagcaagtgaagatcgaccagattgaggatttacaagaccagctagaggatatgatggaagatgcaaatgaaatccaagaagcactgagtcgcagttatggcaccccagaactggatgaagatgatttagaagcagaggtaagttatgagaaaagtaatgtatatttagttttggagtccaaaagcaacagctgcctgggaccttttctcaaatgctagtgaaaatttctatcaggatttcctgaaggttagtttatggtactgtccctgggcaaagagcttgtgaggcagccacatcagattgcatactccaccaacaacagtgggatggatcaactctgaaggaagtccaggtacaggctgacctggtgcttggtatctgtaagtgtcctccacgtggcctttccttgctgtattccttttgattttgttctcactattttcctagttggagtcctctccctcagaacagcaaaaccaattaagaaacaataattagggccaggtgccctaatcccagcactttggaaggccaaggtaggcggatccactcaagcccaggagttcgagacctggctgagcaatatggcgtcaccccgtctctataaaaaatacaaaaattacccaggcatggtggtgtgcgcctgcggtcctagctactcgggaggctgaggtggaaggatcacttgatcccaggaggtagaggttccagtgagccgagattgccccactgcagcctgggcaacagagtgagaccttctctcaaaaaaaaaa

SEQ ID NO: 299366 - DNA, 794 bp, Homo sapiens
ttctaccaacaccccgccccctgcaggctctctccgagagcaccaagtccttttgctctccatccccggaagacccggctgaaaatccggaaaaagaatcgggaaacgccaggaggcatattgcgcttgcgcacggaggggccggaagtcgaggcgggagtgactctgcttccgtttctggttttgctctagtgtttgggtttcttcgcggctgctcaagatgaaccgactcttcgggaaagcgaaacccaaggctccgccgcccagcctgactgactgcattggcacggtggacagtagagcagaatccattgacaagaagatttctcgattggatgctgagctagtgaagtataaggatcagatcaagaagatgagagagggtcctgcaaagaatatggtcaagcagaaagccttgcgagttttaaagcaaaagaggattttctttcctctgcttctgcatacgtggtatgtgtgcatataactttttagaagaaatgaaattgtagtgtgtatatgtaggttttccttttccacttaatgttatatcatgagcatctccctgttcttttaaatattctttggaaactttacactttttaatgagattataatattctaccatttgcttgcaccatgaacggaccattctttttctagttggatagttagattgtttccaatattgtataaagaacatagtgacataagtctttgaggtagaggttccagtgagccgagattgccccactgcagcctgggcaacagagtgagaccttctctcaaaaaaaaaa

SEQ ID NO: 299367 - DNA, 367 bp, Homo sapiens
tgtttgggtttcttcgcggctgctcaagatgaaccgactcttcgggaaagcgaaacccaaggctccgccgcccagcctgactgactgcattggcacgggtgggcatttgatcatgcataagtaggctcaggacctctgacacacccgaccccgcccacccccagccccgggcccatattcttccacttcatttcgggtcctgggccccttacacgtcgtccctctctatctcaccttctccccttcatccctgttacccaagtcattcctaacgccacaaaccagggaacccctaaccccatcactgccttgccctgccagcacccaacccgttttgatgcccattgcccgtccactcgctctcgcc

SEQ ID NO: 299368 - DNA, 261 bp, Homo sapiens
ttatgattcagaatcattttctattgtggtattataggttggttaaagtgatggcctttttgatgggttttgttgtgtcttgtgaacaagtcgttactgtgtccattattggaatggaattatcactactgtatcatgagtgggtattttgattctatggttccctcagtattacatcttgacttgtaatcaattatgaatatttcttgatatttaatgtataggacatttatttatactcaataaatatttttcaaaagg

SEQ ID NO: 299369 - DNA, 1016 bp, Homo sapiens
actttggtggccactgaaagtcagcggcgcggactgccctgagggcgggaaagggtggtcactgggtcagcccgaagcacctgacatgagggcggggaccccgaaatgcacacgaagtccggaactggtcttctgtgattttcattcgccctggtctctgttccctttcgtactcaaagctcgtgcatccagggaggggaaaccggagatagggtcttcgggccccgggcagaccctctgtgccgctgcaaaccgttgcagcctgaggctgtcaggtcctcccccagacacctgcggaccctccctctcctggcttcccgtctggtcatggcgagattctgggtctgcgtagccggtgctggcttctttcttgcatttttggttttgcattcgcgtttttgtggctctccagttttgaggaactttacttttgcagtttcctggagaactgagaaaattctttaccggctggatgtgggttggcctaagcacccagaatattttaccggaacaacattttgtgttgcagttgactccctcaatggattggtttacataggtcaaagaggggataacatcccaaagatattagtgttcacagaggatggatatttcctacgagcctggaattatacagttgacacacctcatggtatatttgcagccagtactctatatgaacaatccgtctggatcacggatgtaggaagtggtatgtatagtaatatctattaaattatcttactggaaatcacatctttgcacatgtccttgtttgtattgtttaaaatcagagttgctgaatctaattgtaatttctttaacgattcatgaaatcacatgtttttaacaaactttattttgtacttctgtggaattaagaaatttaacaagggctggacgccgtggctcacgcctgtaatcccagcactttgggaggccgaggcgggcggatcacgaggtcaggagatcgagacgatcctggccaacacggtgaaacccccgtctccactaaa

SEQ ID NO: 299370 - DNA, 1681 bp, Homo sapiens
cgatctcttcattttttccattacagctaattttctacccagagatctgaagacagttttatattcccatttcccaaaggaataaatttcctctaatgaaaaatatggctacaaattagccttttttttttgagaaaattttttattggtagtcttttttgctagtttttagaaacttggaggcttatgtgttttttattgctatgaactttagctcaactgtctaaaagtgtaatagtaaataaattatttaacatagaattgtaatgcaagctgattcactttctttctggtaagctcaatgtatccagtttgtcttttgaatacctatcaattaatttggcatatgtaccttcaaattgatttctgttcactgctttatgatattcccttattagtagtctgctttatgctcttgcttgtaagataattttaacttaaagaaattttaacgtgagaaaataagatactcatgatttacaaagattattttcttcttagcaaagaaaagttgggttgaattttgaatgtctccacaaggtgaaaatgcagttaaaaaaaaaatctgtaccatagagaacgtttttgttgacttactgaaatttaaggtctgtatgtgagtgattgaaataacagtttcaaatataagttgttccctttacattttcttcttgatttcctttcataagcaatgcttattcaaggtcataagattaaaaaagaaaatggtgcaccaatactttgttagcattctgagtttcctgtataatgagtcaattatggggatgttatttatttgaatttagaatccgcttattttggactaatggagattttaattcgtgatcaaatttggctgtaatttacgaagaagctatagtgcttgtcaattatatgtaatttcctaagcctatcacctatttgttattatttacttctatcaaatttttgctcttagcttacttgaaaaatctgaatgtttgtatagtggttttatttgtgagatgtacatatctatctttataggattctttggtcatactgttaaaaaatacagttcttttggtgatcttgttcaagtcttgggtactccaggcaaaaaaggcactagtttgaatcctttgcagtttgataacccagcagaattatatgtagaggacacaggagatatttacattgtggatggagatggaggattgaataacagattgatcaaactgtcccaagatttcatgatcctttggctgcatggagaaaatgggacagggcctgctaagttcaacatacctcacagtgttacacttgattcagctggtcgggtacaaatacagcgtcattgtgtctgggactttgtgtctgaatatgtttgtggtgtgtgtgtgtgtgtgtgtgtgtgtgtgtgtgtgtcgtgggcatgtatatatagattggggtatacatgtgtgtctgggcatgtggatacatgtgtgttagtgggtatgtctgggtaattactctggggctgggtgtgcacacatactttttttgtttccctgcccattcaacaggaccaaggcacaactttggctctcgacataagttacctgagggaaagctcgactctcctcggaaaccgacttaatgggtgtcatatttttcacctcgagaatacgtggtgacttatcggcagggcgagggtacc

SEQ ID NO: 299371 - DNA, 4016 bp, Homo sapiens
acaatgaaatgtagtctatgctattgattcttaaagcaaaatggacttaggaggagaaactaaattgcctggagaaatagaacaagatatcatgaaggaagtagttattgaactaaactagttttggtgggaggagaggggaggatggatggaacattcatggagggtttatcatgcatggtctacaggcatttattagcaggaaagaaggtgaagatgcactttttcagcagcagaaaatacaatttgggatgtttctgaagtcttatttgaggattattaaagccatgtttttgcctataacatttttgaggttttcctagtagaaaagtgatgttacaacagcaggttttataagacattcttttaggatctacttcaagtgagctctgtcatttggaggctgtgtagtcaatttatcaattagtaactgaatttggttgataacagttgaaagggaaatgtagaataaggataaagcaagaatccaaaaaattgaatgaaagaaacaacgaaatctaggagacagattgaatataagtgtattagtttcctgtggttgccataacaaattgccacaaactgcgtggctttaaacaacataaatttattctcacagttttggaatccagaagttagaaatctggtagactgtgctcactctaaaggtcctgccttgccgcttctagtttctggtggctcaagcattccttggcttgtggcagcaaaactctgatgtctgtctccatattcacatggcggccccttcttctctgtgtgtttttgtgcctccagtctttcccttctttctcttaataaggatttagggcccaccctaaatccagggatgatctcatgagatccctaatttaattttatctgcaaaaactatttccaaatagcatcacattcccaggtatcaggagttaggacttggacatctttttaaaggaccacagttgaacccaccgtagtgcgtaataaaggagatagacggtaaaatcataatgtgaatttttaaggtctgtggaatactaatatcaagtaacagataagttgggaaggggaaccagttttagggagaggatggcataaaccctaaacaatgattttgaagcagtcatgaaaaattcaagtggagataataattaaagaagtagattaattccctaaagcagagaaggaactttaaaaaaaaaactgtaagaaatgggcaaatgggcatatagacaggaaagccgagaaagcatagtcaagtgaaccagcggtgtaattaaatagttctttgtaacctgtttcataaaatatgcaaatgcatgagacattctatatgttgctctgactatatatttttaccgtttatagatttcatgatcctttggctgcatggagaaaatgggacagggcctgctaagttcaacatacctcacagtgttacacttgattcagctggtcgggtgtgggttgctgaccgaggaaataaaagaatccaagtatttgataaagacactggggagtggttaggagcatggaataattgtttcacagaagagggaccttcttcagtcaggtttactcctgatgggaagtacttgattgtggcccagctgaatcttagcaggctctcagtcgtagcagcacccccagtgggaagcattggggagtgttctgtgatcagcacaatccaactagcagatcaagttttgccacatctcctagaagtcgacagaaagactggagcagtctatgtagcagaaattggagcaaaacaagtacaaaaatatgtccctttgaatagctatgttccttcatttggttcataatgtttctttcccgggaatatttcaagtggcagttcagattctcaattcactaagtgcttaaaaatgatgttcaagcacaagaatttatttttctagtataaaagatctagtatcagaaagatttgtttttgtatcattaagaatcttatattttgttgccctcttgggacttagttttatttgtaagtgcataaggatattttaatgaaaggaaagtaactaaaaaatggggttgggaagagggactaaggtggtaacctcattatttgccctggtagactgattctccctgggtaaaaaaaatgggaataaaaatgagcttgcatgataatttattaaatttcatgtgaagaactccagacctccagattgtgcaactaacataaaatgagctgcttgagagattgtaaataagatgaactattgattaatttgagtacccacagagtgctgtgtcttgacgacttaaaaatgaaaaagcaggattgccttttgagtagcttgcagtctagtggggagacaagcaggcaaacagtcacaacacagcaaaagcgaccttggagcatagtgggacttttggagtaggagtgctgcatttgactgagggaatcatggatacttcgcaggagaagtgaatttgagctcagacttgaaaactgaggaggagcttaccaagggacaaggaggagaaaacaataatttccaagtaaagaaggtataaaaagttagaagtgtactgtaaactttgataggcttttaggccttttttaaagcccaacttggcttctgtccattacctataagatatttaatgtcagtcagcctttaaatgtaggaataaaatggctggcatctaagcacttttagtaaaagaggtttttacaaataactaaggattgtagagcttccttctctttttttttctttttctttcttttgttttacatgaactcaacttattcctaacatttgtctacctcaaagaaatttcaagattatttagataacatggatatgtgccaaatcctttgagctgttaagatgataatttcctgctttcctcctacatcttctcctcccactccctcctttggtgtgaatattggcttcccaattaagacctttttttttttttttccagtttgttttagcttattataggttttggaggaactttgccattttgtaatctttcaaatcattcttcacccttcctcacatcagcttcctgcttttcccagtgttttactgtaaattgtgtagcatatgacaaatcttgagctgactttcctcttcacctgttatggctggagtattttccagacctgaagggactcacacttgttttgatacttggatcacatctccgtgaggttaggaaggtaaatctaccaacaggaagccctgtactctgtattccaaggccattggtaaatgtgttggtgccactgatcggactgtatgaccttaaacaagtcaccttagttttcagtgaaatgggaatatcattgtctcctctttcatgaatgctgtgagaatcagatgtgcaacaggtacagacttgccctttgaaatctatacctctggatacattagaggcattttattaacaaaggcccttctaaatgtgctatttatttgacaataactatcagatttgccttaattttgtgtttatagcatttatcaaaacgtatcctcatagactttatgcagattaatatggtcaattgatttggataaaagaaagtaatttcagggtttgtttttaagccaggacaagaagtgcaaatgcctctttgaagcaatttaggctaaactgattttgaaatttcaaaatgttttattttactttgttttattaagccaggacaagaagtgcaaatgcctctttgaagcaattcaggctaggtaaaccgattttgccatttcaaaacgttttattttactttgttttatatcagagtcttataaaacctgctgcaaatatttctgaatgtctttgtaaaagtgtttgttagtgtacctgtgattatagtacttcacttttttcctttggattaattggttaaatgaatgagaaatgtgttatgttttttactaaaaagtataaattaaaattttggaaagaaaaggcaatattatctggctccccaattaaagtttgattttattgtcacaaaaaagaaataa

SEQ ID NO: 299372 - DNA, 3564 bp, Homo sapiens
actttggtggccactgaaagtcagcggcgcggactgccctgagggcgggaaagggtggtcactgggtcagcccgaagcacctgacatgagggcggggaccccgaaatgcacacgaagtccggaactggtcttctgtgattttcattcgccctggtctctgttccctttcgtactcaaagctcgtgcatccagggaggggaaaccggagatagggtcttcgggccccgggcagaccctctgtgccgctgcaaaccgttgcagcctgaggctgtcaggtcctcccccagacacctgcggaccctccctctcctggcttcccgtctggtcatggcgagattctgggtctgcgtagccggtgctggcttctttcttgcatttttggttttgcattcgcgtttttgtggctctccagttttgaggaactttacttttgcagtttcctggagaactgagaaaattctttaccggctggatgtgggttggcctaagcacccagaatattttaccggaacaacattttgtgttgcagttgactccctcaatggattggtttacataggtcaaagaggggataacatcccaaagatattagtgttcacagaggatggatatttcctacgagcctggaattatacagttgacacacctcatggtatatttgcagccagtactctatatgaacaatccgtctggatcacggatgtaggaagtggattctttggtcatactgttaaaaaatacagttcttttggtgatcttgttcaagtcttgggtactccaggcaaaaaaggcactagtttgaatcctttgcagtttgataacccagcagaattatatgtagaggacacaggagatatttacattgtggatggagatggaggattgaataacagattgatcaaactgtcccaagatttcatgatcctttggctgcatggagaaaatgggacagggcctgctaagttcaacatacctcacagtgttacacttgattcagctggtcgggtgtgggttgctgaccgaggaaataaaagaatccaagtatttgataaagacactggggagtggttaggagcatggaataattgtttcacagaagagggaccttcttcagtcaggtttactcctgatgggaagtacttgattgtggcccagctgaatcttagcaggctctcagtcgtagcagcacccccagtgggaagcattggggagtgttctgtgatcagcacaatccaactagcagatcaagttttgccacatctcctagaagtcgacagaaagactggagcagtctatgtagcagaaattggagcaaaacaagtacaaaaatatgtccctttgaatagctatgttccttcatttggttcataatgtttctttcccgggaatatttcaagtggcagttcagattctcaattcactaagtgcttaaaaatgatgttcaagcacaagaatttatttttctagtataaaagatctagtatcagaaagatttgtttttgtatcattaagaatcttatattttgttgccctcttgggacttagttttatttgtaagtgcataaggatattttaatgaaaggaaagtaactaaaaaatggggttgggaagagggactaaggtggtaacctcattatttgccctggtagactgattctccctgggtaaaaaaaatgggaataaaaatgagcttgcatgataatttattaaatttcatgtgaagaactccagacctccagattgtgcaactaacataaaatgagctgcttgagagattgtaaataagatgaactattgattaatttgagtacccacagagtgctgtgtcttgacgacttaaaaatgaaaaagcaggattgccttttgagtagcttgcagtctagtggggagacaagcaggcaaacagtcacaacacagcaaaagcgaccttggagcatagtgggacttttggagtaggagtgctgcatttgactgagggaatcatggatacttcgcaggagaagtgaatttgagctcagacttgaaaactgaggaggagcttaccaagggacaaggaggagaaaacaataatttccaagtaaagaaggtataaaaagttagaagtgtactgtaaactttgataggcttttaggccttttttaaagcccaacttggcttctgtccattacctataagatatttaatgtcagtcagcctttaaatgtaggaataaaatggctggcatctaagcacttttagtaaaagaggtttttacaaataactaaggattgtagagcttccttctctttttttttctttttctttcttttgttttacatgaactcaacttattcctaacatttgtctacctcaaagaaatttcaagattatttagataacatggatatgtgccaaatcctttgagctgttaagatgataatttcctgctttcctcctacatcttctcctcccactccctcctttggtgtgaatattggcttcccaattaagacctttttttttttttttccagtttgttttagcttattataggttttggaggaactttgccattttgtaatctttcaaatcattcttcacccttcctcacatcagcttcctgcttttcccagtgttttactgtaaattgtgtagcatatgacaaatcttgagctgactttcctcttcacctgttatggctggagtattttccagacctgaagggactcacacttgttttgatacttggatcacatctccgtgaggttaggaaggtaaatctaccaacaggaagccctgtactctgtattccaaggccattggtaaatgtgttggtgccactgatcggactgtatgaccttaaacaagtcaccttagttttcagtgaaatgggaatatcattgtctcctctttcatgaatgctgtgagaatcagatgtgcaacaggtacagacttgccctttgaaatctatacctctggatacattagaggcattttattaacaaaggcccttctaaatgtgctatttatttgacaataactatcagatttgccttaattttgtgtttatagcatttatcaaaacgtatcctcatagactttatgcagattaatatggtcaattgatttggataaaagaaagtaatttcagggtttgtttttaagccaggacaagaagtgcaaatgcctctttgaagcaatttaggctaaactgattttgaaatttcaaaatgttttattttactttgttttattaagccaggacaagaagtgcaaatgcctctttgaagcaattcaggctaggtaaaccgattttgccatttcaaaacgttttattttactttgttttatatcagagtcttataaaacctgctgcaaatatttctgaatgtctttgtaaaagtgtttgttagtgtacctgtgattatagtacttcacttttttcctttggattaattggttaaatgaatgagaaatgtgttatgttttttactaaaaagtataaattaaaattttggaaagaaaaggcaatattatctggctccccaattaaagtttgattttattgtcacaaaaaagaaataa

SEQ ID NO: 299373 - DNA, 3878 bp, Homo sapiens
cgatctcttcattttttccattacagctaattttctacccagagatctgaagacagttttatattcccatttcccaaaggaataaatttcctctaatgaaaaatatggctacaaattagccttttttttttgagaaaattttttattggtagtcttttttgctagtttttagaaacttggaggcttatgtgttttttattgctatgaactttagctcaactgtctaaaagtgtaatagtaaataaattatttaacatagaattgtaatgcaagctgattcactttctttctggtaagctcaatgtatccagtttgtcttttgaatacctatcaattaatttggcatatgtaccttcaaattgatttctgttcactgctttatgatattcccttattagtagtctgctttatgctcttgcttgtaagataattttaacttaaagaaattttaacgtgagaaaataagatactcatgatttacaaagattattttcttcttagcaaagaaaagttgggttgaattttgaatgtctccacaaggtgaaaatgcagttaaaaaaaaaatctgtaccatagagaacgtttttgttgacttactgaaatttaaggtctgtatgtgagtgattgaaataacagtttcaaatataagttgttccctttacattttcttcttgatttcctttcataagcaatgcttattcaaggtcataagattaaaaaagaaaatggtgcaccaatactttgttagcattctgagtttcctgtataatgagtcaattatggggatgttatttatttgaatttagaatccgcttattttggactaatggagattttaattcgtgatcaaatttggctgtaatttacgaagaagctatagtgcttgtcaattatatgtaatttcctaagcctatcacctatttgttattatttacttctatcaaatttttgctcttagcttacttgaaaaatctgaatgtttgtatagtggttttatttgtgagatgtacatatctatctttataggattctttggtcatactgttaaaaaatacagttcttttggtgatcttgttcaagtcttgggtactccaggcaaaaaaggcactagtttgaatcctttgcagtttgataacccagcagaattatatgtagaggacacaggagatatttacattgtggatggagatggaggattgaataacagattgatcaaactgtcccaagatttcatgatcctttggctgcatggagaaaatgggacagggcctgctaagttcaacatacctcacagtgttacacttgattcagctggtcgggtgtgggttgctgaccgaggaaataaaagaatccaagtatttgataaagacactggggagtggttaggagcatggaataattgtttcacagaagagggaccttcttcagtcaggtttactcctgatgggaagtacttgattgtggcccagctgaatcttagcaggctctcagtcgtagcagcacccccagtgggaagcattggggagtgttctgtgatcagcacaatccaactagcagatcaagttttgccacatctcctagaagtcgacagaaagactggagcagtctatgtagcagaaattggagcaaaacaagtacaaaaatatgtccctttgaatagctatgttccttcatttggttcataatgtttctttcccgggaatatttcaagtggcagttcagattctcaattcactaagtgcttaaaaatgatgttcaagcacaagaatttatttttctagtataaaagatctagtatcagaaagatttgtttttgtatcattaagaatcttatattttgttgccctcttgggacttagttttatttgtaagtgcataaggatattttaatgaaaggaaagtaactaaaaaatggggttgggaagagggactaaggtggtaacctcattatttgccctggtagactgattctccctgggtaaaaaaaatgggaataaaaatgagcttgcatgataatttattaaatttcatgtgaagaactccagacctccagattgtgcaactaacataaaatgagctgcttgagagattgtaaataagatgaactattgattaatttgagtacccacagagtgctgtgtcttgacgacttaaaaatgaaaaagcaggattgccttttgagtagcttgcagtctagtggggagacaagcaggcaaacagtcacaacacagcaaaagcgaccttggagcatagtgggacttttggagtaggagtgctgcatttgactgagggaatcatggatacttcgcaggagaagtgaatttgagctcagacttgaaaactgaggaggagcttaccaagggacaaggaggagaaaacaataatttccaagtaaagaaggtataaaaagttagaagtgtactgtaaactttgataggcttttaggccttttttaaagcccaacttggcttctgtccattacctataagatatttaatgtcagtcagcctttaaatgtaggaataaaatggctggcatctaagcacttttagtaaaagaggtttttacaaataactaaggattgtagagcttccttctctttttttttctttttctttcttttgttttacatgaactcaacttattcctaacatttgtctacctcaaagaaatttcaagattatttagataacatggatatgtgccaaatcctttgagctgttaagatgataatttcctgctttcctcctacatcttctcctcccactccctcctttggtgtgaatattggcttcccaattaagacctttttttttttttttccagtttgttttagcttattataggttttggaggaactttgccattttgtaatctttcaaatcattcttcacccttcctcacatcagcttcctgcttttcccagtgttttactgtaaattgtgtagcatatgacaaatcttgagctgactttcctcttcacctgttatggctggagtattttccagacctgaagggactcacacttgttttgatacttggatcacatctccgtgaggttaggaaggtaaatctaccaacaggaagccctgtactctgtattccaaggccattggtaaatgtgttggtgccactgatcggactgtatgaccttaaacaagtcaccttagttttcagtgaaatgggaatatcattgtctcctctttcatgaatgctgtgagaatcagatgtgcaacaggtacagacttgccctttgaaatctatacctctggatacattagaggcattttattaacaaaggcccttctaaatgtgctatttatttgacaataactatcagatttgccttaattttgtgtttatagcatttatcaaaacgtatcctcatagactttatgcagattaatatggtcaattgatttggataaaagaaagtaatttcagggtttgtttttaagccaggacaagaagtgcaaatgcctctttgaagcaatttaggctaaactgattttgaaatttcaaaatgttttattttactttgttttattaagccaggacaagaagtgcaaatgcctctttgaagcaattcaggctaggtaaaccgattttgccatttcaaaacgttttattttactttgttttatatcagagtcttataaaacctgctgcaaatatttctgaatgtctttgtaaaagtgtttgttagtgtacctgtgattatagtacttcacttttttcctttggattaattggttaaatgaatgagaaatgtgttatgttttttactaaaaagtataaattaaaattttggaaagaaaaggcaatattatctggctccccaattaaagtttgattttattgtcacaaaaaagaaataa

SEQ ID NO: 299374 - DNA, 3306 bp, Homo sapiens
actttggtggccactgaaagtcagcggcgcggactgccctgagggcgggaaagggtggtcactgggtcagcccgaagcacctgacatgagggcggggaccccgaaatgcacacgaagtccggaactggtcttctgtgattttcattcgccctggttttgaggaactttacttttgcagtttcctggagaactgagaaaattctttaccggctggatgtgggttggcctaagcacccagaatattttaccggaacaacattttgtgttgcagttgactccctcaatggattggtttacataggtcaaagaggggataacatcccaaagatattagtgttcacagaggatggatatttcctacgagcctggaattatacagttgacacacctcatggtatatttgcagccagtactctatatgaacaatccgtctggatcacggatgtaggaagtggattctttggtcatactgttaaaaaatacagttcttttggtgatcttgttcaagtcttgggtactccaggcaaaaaaggcactagtttgaatcctttgcagtttgataacccagcagaattatatgtagaggacacaggagatatttacattgtggatggagatggaggattgaataacagattgatcaaactgtcccaagatttcatgatcctttggctgcatggagaaaatgggacagggcctgctaagttcaacatacctcacagtgttacacttgattcagctggtcgggtgtgggttgctgaccgaggaaataaaagaatccaagtatttgataaagacactggggagtggttaggagcatggaataattgtttcacagaagagggaccttcttcagtcaggtttactcctgatgggaagtacttgattgtggcccagctgaatcttagcaggctctcagtcgtagcagcacccccagtgggaagcattggggagtgttctgtgatcagcacaatccaactagcagatcaagttttgccacatctcctagaagtcgacagaaagactggagcagtctatgtagcagaaattggagcaaaacaagtacaaaaatatgtccctttgaatagctatgttccttcatttggttcataatgtttctttcccgggaatatttcaagtggcagttcagattctcaattcactaagtgcttaaaaatgatgttcaagcacaagaatttatttttctagtataaaagatctagtatcagaaagatttgtttttgtatcattaagaatcttatattttgttgccctcttgggacttagttttatttgtaagtgcataaggatattttaatgaaaggaaagtaactaaaaaatggggttgggaagagggactaaggtggtaacctcattatttgccctggtagactgattctccctgggtaaaaaaaatgggaataaaaatgagcttgcatgataatttattaaatttcatgtgaagaactccagacctccagattgtgcaactaacataaaatgagctgcttgagagattgtaaataagatgaactattgattaatttgagtacccacagagtgctgtgtcttgacgacttaaaaatgaaaaagcaggattgccttttgagtagcttgcagtctagtggggagacaagcaggcaaacagtcacaacacagcaaaagcgaccttggagcatagtgggacttttggagtaggagtgctgcatttgactgagggaatcatggatacttcgcaggagaagtgaatttgagctcagacttgaaaactgaggaggagcttaccaagggacaaggaggagaaaacaataatttccaagtaaagaaggtataaaaagttagaagtgtactgtaaactttgataggcttttaggccttttttaaagcccaacttggcttctgtccattacctataagatatttaatgtcagtcagcctttaaatgtaggaataaaatggctggcatctaagcacttttagtaaaagaggtttttacaaataactaaggattgtagagcttccttctctttttttttctttttctttcttttgttttacatgaactcaacttattcctaacatttgtctacctcaaagaaatttcaagattatttagataacatggatatgtgccaaatcctttgagctgttaagatgataatttcctgctttcctcctacatcttctcctcccactccctcctttggtgtgaatattggcttcccaattaagacctttttttttttttttccagtttgttttagcttattataggttttggaggaactttgccattttgtaatctttcaaatcattcttcacccttcctcacatcagcttcctgcttttcccagtgttttactgtaaattgtgtagcatatgacaaatcttgagctgactttcctcttcacctgttatggctggagtattttccagacctgaagggactcacacttgttttgatacttggatcacatctccgtgaggttaggaaggtaaatctaccaacaggaagccctgtactctgtattccaaggccattggtaaatgtgttggtgccactgatcggactgtatgaccttaaacaagtcaccttagttttcagtgaaatgggaatatcattgtctcctctttcatgaatgctgtgagaatcagatgtgcaacaggtacagacttgccctttgaaatctatacctctggatacattagaggcattttattaacaaaggcccttctaaatgtgctatttatttgacaataactatcagatttgccttaattttgtgtttatagcatttatcaaaacgtatcctcatagactttatgcagattaatatggtcaattgatttggataaaagaaagtaatttcagggtttgtttttaagccaggacaagaagtgcaaatgcctctttgaagcaatttaggctaaactgattttgaaatttcaaaatgttttattttactttgttttattaagccaggacaagaagtgcaaatgcctctttgaagcaattcaggctaggtaaaccgattttgccatttcaaaacgttttattttactttgttttatatcagagtcttataaaacctgctgcaaatatttctgaatgtctttgtaaaagtgtttgttagtgtacctgtgattatagtacttcacttttttcctttggattaattggttaaatgaatgagaaatgtgttatgttttttactaaaaagtataaattaaaattttggaaagaaaaggcaatattatctggctccccaattaaagtttgattttattgtcacaaaaaagaaataa

SEQ ID NO: 299375 - DNA, 1819 bp, Homo sapiens
acaatgaaatgtagtctatgctattgattcttaaagcaaaatggacttaggaggagaaactaaattgcctggagaaatagaacaagatatcatgaaggaagtagttattgaactaaactagttttggtgggaggagaggggaggatggatggaacattcatggagggtttatcatgcatggtctacaggcatttattagcaggaaagaaggtgaagatgcactttttcagcagcagaaaatacaatttgggatgtttctgaagtcttatttgaggattattaaagccatgtttttgcctataacatttttgaggttttcctagtagaaaagtgatgttacaacagcaggttttataagacattcttttaggatctacttcaagtgagctctgtcatttggaggctgtgtagtcaatttatcaattagtaactgaatttggttgataacagttgaaagggaaatgtagaataaggataaagcaagaatccaaaaaattgaatgaaagaaacaacgaaatctaggagacagattgaatataagtgtattagtttcctgtggttgccataacaaattgccacaaactgcgtggctttaaacaacataaatttattctcacagttttggaatccagaagttagaaatctggtagactgtgctcactctaaaggtcctgccttgccgcttctagtttctggtggctcaagcattccttggcttgtggcagcaaaactctgatgtctgtctccatattcacatggcggccccttcttctctgtgtgtttttgtgcctccagtctttcccttctttctcttaataaggatttagggcccaccctaaatccagggatgatctcatgagatccctaatttaattttatctgcaaaaactatttccaaatagcatcacattcccaggtatcaggagttaggacttggacatctttttaaaggaccacagttgaacccaccgtagtgcgtaataaaggagatagacggtaaaatcataatgtgaatttttaaggtctgtggaatactaatatcaagtaacagataagttgggaaggggaaccagttttagggagaggatggcataaaccctaaacaatgattttgaagcagtcatgaaaaattcaagtggagataataattaaagaagtagattaattccctaaagcagagaaggaactttaaaaaaaaaactgtaagaaatgggcaaatgggcatatagacaggaaagccgagaaagcatagtcaagtgaaccagcggtgtaattaaatagttctttgtaacctgtttcataaaatatgcaaatgcatgagacattctatatgttgctctgactatatatttttaccgtttatagatttcatgatcctttggctgcatggagaaaatgggacagggcctgctaagttcaacatacctcacagtgttacacttgattcagctggtcgggtacaaatacagcgtcattgtgtctgggactttgtgtctgaatatgtttgtggtgtgtgtgtgtgtgtgtgtgtgtgtgtgtgtgtgtcgtgggcatgtatatatagattggggtatacatgtgtgtctgggcatgtggatacatgtgtgttagtgggtatgtctgggtaattactctggggctgggtgtgcacacatactttttttgtttccctgcccattcaacaggaccaaggcacaactttggctctcgacataagttacctgagggaaagctcgactctcctcggaaaccgacttaatgggtgtcatatttttcacctcgagaatacgtggtgacttatcggcagggcgagggtacc

SEQ ID NO: 299376 - DNA, 1034 bp, Homo sapiens
actttggtggccactgaaagtcagcggcgcggactgccctgagggcgggaaagggtggtcactgggtcagcccgaagcacctgacatgagggcggggaccccgaaatgcacacgaagtccggaactggtcttctgtgattttcattcgccctggtctctgttccctttcgtactcaaagctcgtgcatccagggaggggaaaccggagatagggtcttcgggccccgggcagaccctctgtgccgctgcaaaccgttgcagcctgaggctgtcaggtcctcccccagacacctgcggaccctccctctcctggcttcccgtctggtcatggcgagattctgggtctgcgtagccggtgctggcttctttcttgcatttttggttttgcattcgcgtttttgtggctctccagttttgaggaactttacttttgcagtttcctggagaactgagaaaattctttaccggctggatgtgggttggcctaagcacccagaatattttaccggaacaacattttgtgttgcagttgactccctcaatggattggtttacataggtcaaagaggggataacatcccaaagatattagtgttcacagaggatggatatttcctacgagcctggaattatacagttgacacacctcatggtatatttgcagccagtactctatatgaacaatccgtctggatcacggatgtaggaagtggattctttggtcatactgttaaaaaatacagttcttttggtgatcttgttcaagtcttgggtactccaggcaaaaaaggcactagtttgaatcctttgcagtttgataacccagcagaattatatgtagaggacacaggagatatttacattgtggatggagatggaggattgaataacagattgatcaaactgtcccaagatttcatgatcctttggctgcatggagaaaatgggacagggcctgctaagttcaacatacctcacagtgttacacttgattcagctggtcgggtacaaatacagcgtcattgtgtctggga

SEQ ID NO: 299377 - DNA, 1152 bp, Homo sapiens
actttggtggccactgaaagtcagcggcgcggactgccctgagggcgggaaagggtggtcactgggtcagcccgaagcacctgacatgagggcggggaccccgaaatgcacacgaagtccggaactggtcttctgtgattttcattcgccctggtctctgttccctttcgtactcaaagctcgtgcatccagggaggggaaaccggagatagggtcttcgggccccgggcagaccctctgtgccgctgcaaaccgttgcagcctgaggctgtcaggtcctcccccagacacctgcggaccctccctctcctggcttcccgtctggtcatggcgagattctgggtctgcgtagccggtgctggcttctttcttgcatttttggttttgcattcgcgtttttgtggctctccagttttgaggaactttacttttgcagtttcctggagaactgagaaaattctttaccggctggatgtgggttggcctaagcacccagaatattttaccggaacaacattttgtgttgcagttgactccctcaatggattggtttacataggtcaaagaggggataacatcccaaagatattagtgttcacagaggatggatatttcctacgagcctggaattatacagttgacacacctcatggtatatttgcagccagtactctatatgaacaatccgtctggatcacggatgtaggaagtggtatgtatagtaatatctattaaattatcttactggaaatcacatctttgcacatgtccttgtttgtattgtttaaaatcagagttgctgaatctaattgtaatttctttaacgattcatgaaatcacatgtttttaacaaactttattttgtacttctgtggaattaagaaatttaacaagggctggacgccgtggctcacgcctgtaatcccaaagtgctaggactttgttcttaggtcacttaacagattaaaagactgcttcaagcaatgtagtgtaaggctacggcaataaagtcctattttgttttgcctttgctgtttttaagcacttttgcatttgaaaacaggacagattggatagtcagcattaaaatggaaactcaaatttttgctttttaggcttaccaaaataaatgagagtttttaaaagtcctaa

SEQ ID NO: 299378 - DNA, 1367 bp, Homo sapiens
actttggtggccactgaaagtcagcggcgcggactgccctgagggcgggaaagggtggtcactgggtcagcccgaagcacctgacatgagggcggggaccccgaaatgcacacgaagtccggaactggtcttctgtgattttcattcgccctggtctctgttccctttcgtactcaaagctcgtgcatccagggaggggaaaccggagatagggtcttcgggccccgggcagaccctctgtgccgctgcaaaccgttgcagcctgaggctgtcaggtcctcccccagacacctgcggaccctccctctcctggcttcccgtctggtcatggcgagattctgggtctgcgtagccggtgctggcttctttcttgcatttttggttttgcattcgcgtttttgtggctctccagttttgaggaactttacttttgcagtttcctggagaactgagaaaattctttaccggctggatgtgggttggcctaagcacccagaatattttaccggaacaacattttgtgttgcagttgactccctcaatggattggtttacataggtcaaagaggggataacatcccaaagatattagtgttcacagaggatggatatttcctacgagcctggaattatacagttgacacacctcatggtatatttgcagccagtactctatatgaacaatccgtctggatcacggatgtaggaagtggattctttggtcatactgttaaaaaatacagttcttttggtgatcttgttcaagtcttgggtactccaggcaaaaaaggcactagtttgaatcctttgcagtttgataacccagcagaattatatgtagaggacacaggagatatttacattgtggatggagatggaggattgaataacagattgatcaaactgtcccaagatttcatgatcctttggctgcatggagaaaatgggacagggcctgctaagttcaacatacctcacagtgttacacttgattcagctggtcgggtacaaatacagcgtcattgtgtctgggactttgtgtctgaatatgtttgtggtgtgtgtgtgtgtgtgtgtgtgtgtgtgtgtgtgtcgtgggcatgtatatatagattggggtatacatgtgtgtctgggcatgtggatacatgtgtgttagtgggtatgtctgggtaattactctggggctgggtgtgcacacatactttttttgtttccctgcccattcaacaggaccaaggcacaactttggctctcgacataagttacctgagggaaagctcgactctcctcggaaaccgacttaatgggtgtcatatttttcacctcgagaatacgtggtgacttatcggcagggcgagggtacc

SEQ ID NO: 299379 - DNA, 303 bp, Homo sapiens
tgagttggtctcaagtattttggtttcgaatgtgaaagatatgttagattttgaaagtggtttttgtagtaaaattctcagttattttttttcttcgccaagatacagattacctttcctttaagctgatcctaagaagttattttttgtataccttcagagaggggataacatcccaaagatattagtgttcacagaggatggatatttcctacgagcctggaattatacagttgacacacctcatggtatatttgcagccagtactctatatgaacaatccgtctggatcacggatgtagg

SEQ ID NO: 299380 - DNA, 398 bp, Homo sapiens
ggaattatacagttgacacacctcatggtatatttgcagccagtactctatatgaacaatccgtctggatcacggatgtaggaagtggtatgtatagtaatatctattaaattatcttactggaaatcacatctttgcacatgtccttgtttgtattgtttaaaatcagagttgctgaatctaattgtaatttctttaacgattcatgaaatcacatgtttttaacaaactttattttgtacttctgtggaattaagaaatttaacaagggctggacgccgtggctcacgcctgtaatcccagcactttgggaggccgaggcgggcggatcacgaggtcaggagatcgagacgatcctggccaacacggtgaaacccccgtctccactaaaaatacaa

SEQ ID NO: 299381 - DNA, 5660 bp, Homo sapiens
ctgaagttcctggccgtgctgctggccgcgggcatgctggcgttcctcggtgccgtcatctgcatcatcgccagcgtgcccctggcggccagcccggcgcgggcgctgcccggcggcgccgacaatgcttcggtcgcctcgggcgccgccgcgtccccgggcccgcagcggagcctgagcgcgctgcacggcgcgggcggttcagccgggccccccgcgctgcccggggcacccgcggccagcgcgcacccgctgccgcccgggcccctgttcagccgcttcctgtgcacgccgctggctgctgcctgcccgtcgggggcccagcagggggacgcggcgggcgctgcgccgggcgagcgcgaagagctgctgctgctgcagagcacggccgagcagctgcgccagacggcgctgcagcaggaggcgcgcatccgcgccgaccaggacaccatccgtgagctcaccggcaagctgggccgctgcgagagcggcctgccgcgcggcctccagggcgccgggccccgccgcgacaccatggccgacgggccctgggactcgcctgcgctcattctggagctggaggacgccgtgcgcgccctgcgggaccgcatcgaccgcctggagcaggagcttccagcccgtgtgaacctctcagctgccccagccccagtctctgctgtgcccaccggcctacactccaagatggaccagctggaggggcagctgctggcccaggtgctggcactggagaaggagcgtgtggccctcagccacagcagccgccggcagaggcaggaagtggaaaaggagttggacgtcctgcagggtcgtgtggctgagctggagcacgggtcctcagcctacagtcctccagatgccttcaagatcagcatccccatccgtaacaactacatgtacgcccgcgtgcggaaggctctgcccgagctctacgcattcaccgcctgcatgtggctgcggtccaggtccagcggcaccggccagggcacccccttctcctactcagtgcccgggcaggccaacgagattgtactgctagaggcgggccatgagcccatggagctgctgatcaacgacaaggtggcccagctgcccctgagcctgaaggacaatggctggcaccacatctgcatcgcctggaccacaagggatggcctatggtctgcctaccaggacggggagctgcagggctccggtgagaacctggctgcctggcaccccatcaagcctcatgggatccttatcttgggccaggagcaggataccctgggtggccggtttgatgccacccaggcctttgtcggtgacattgcccagtttaacctgtgggaccacgccctgacaccagcccaggtcctgggcattgccaactgcactgcgccactgctgggcaacgtccttccctgggaagacaagttggtggaggcctttgggggtgcaacaaaggctgccttcgatgtctgcaaggggagggccaaggcatgaggggccacctcatccagggcccctcccttgcctgccactttggggacttgaggggggtcatattccctcctcagcctgcccacgcactggccttccctcctgccccactcctggctgtgcctcccatttcccctcacctgtacccacacctccagaatgccctgccctgcgagtgtgtcccctgtccccacctgagtggggaggagcgtctcaagtgaacagtgggagcctgcccacctggcactgcactggagttgtctcttaccccaccctccctgcccatcaactgtatctgatttcactaattttgacagcacccccagtagggtaggattgtgtatgagggggaccccactatctcagtggtgggggtggccgcccgcccccttgtcccccatgcaacaggcccagtggcttccccttcagggccacaacaggctgtagaaggggatgacgaggacatcagaggttagacttaccctcctccctctttccaccagctgccagtcaagggcagtgggatctcgatggagcctccccccccccccacccatgcctccctcttcctcctctttcctcctctctttgtgtgtagcggtttgaatgttggttccatgcctggcccagccccacctcagtctccaggacattcctttcccagctccagcctggagggaaggggacaaagaccccaggaggccaaagggctgcagtcaccccttgtgctcacccatagtgatggccactggtatagtcatcgctctccctccatgccaaggacaggacttggaccgcttcagcctgggctgggagcagccctaaggtagaggcctcatggcccaggagaccccacctctggcagagccacattacctaccctgtgcatggtcctggggcagcaaggaagaagctcagagggtggggagaagcatgaagcagtgagcagagcactgggtgagagggagaagaccttggttcctagccagccctgctaatgtgctgtgtggccttctgtaagtccctgccctctctgggcctggccttcctcattcgtgagctgaggccctcgctttggtcatttgctctccagattgggtgtgagcttctctgtgattccaggtggatatgtggggaaagctctggtgaccctgggcttcgcaggggtagatcccaggactcggcagtggatgggatgcagccagtcatgggttagggtcagcagagactcagagtccagggcaaggttcaaggcagactaacctcatgcatggattgtaaaaaaccagctccctttggatcaacccagcctggcacccttgcctgtctgagagtgtctcaaagggctgatggcttcctggtccccttgagtcatcaccagcttccccaagagagtgtcagaatcttaagagctgagaggccgggcacggtggctcacgcctgtaatcccagcactttgggaggctgagacaggcagatcacttgaggtcaggagttcgaggtcagcctggccaacgtggtgaaaccccatcttcactaaaaatacaaaacttagctggttaggtggtgcatgcctgtagtcccagctactcgggaggccgaggcagaagaatctcttgaactgaggaggtggaggttgcagtgagccgagatcacgccattgcactccagcctgggcaacagagcaagactccatctcaaaaaaataataataatcttaaagatgagaaaagccaccccatctggcaccacagctgcatcttgcttgtgagaaatggggaagagttcagggaggacacgtgacctgcacaggatcacagagcatggggcagagccaggactagagctcagggcatctgactccctcttcagtgttcttccccctccatgttgcctgcccctgaagacctttgagttcagtctacacctaagcaggtagacatccgcgaggtcagatgctttccaacatgacacctgaacatcttcctttatgcaacacccaaacatcttggcatccccaccccaggaagtgcggggaggaggttatgatccctgggcgcttcggcagaatggagagctgaggtgtccctcccctgctagtcacctaccaggtgtctgagcagctgcatgctccctggctcaagtgggcactgtaccttttgcctgcctttttgttccctatctccactccctgaggccacttagcctgagacatgatgcaagagctgcaggccggggggctcagtgccatggaagctactccaagttgcattgcctcccgcgcccagatcctgctttccatttcgagaacataaatagattgcccagcccctccagtacaatcccactggaagaaaaggcaatggcgggcttcagccagacctgctgagacctaggttgccacggtaacagccaaagacatcaacccaagtgctgggtcaagtgtctcatcatactggcactgttgctggggtgacggcagaattcagaacttcaatttcagtgacgccaagcttgatgtgtttctgttattgttttgaagaaggtagctcttgtggaggacttgggagaaggatggggtcttaggaaggaggtgacagcacttgcatggtcacttgagcccacacacacgctcaaccccaagtcctttatgctttgtcacagtgaagatgagacctctgacgtccaagccttgttcctgtgctgcatcacccactcagccttccaaagggaacaggaacaaatttccccagcaccactgtttgggtcccgcttttcctatcttctgctgcccctgagcacatccaagcagacagggaaagaggagtcagacatggcccagtcacatcctgagctgctcctggctgataaccacgatggagcccgtgtttgtcctgccatctggcactgcactgagtgtggcacaggcaccgtcctgttgatctcacaacacagttctaagttaggacgttcttggctccgttagacaggtgaggaaactggggcacagagaggtgatgtcatctgcctggtgtcaatcagctagcaagtgatggagcccagatttcaaaccaaagggggttacgtccaggggctgagttcccactcacctgtgtagagtgccatctgggcaccattgctccagacgtgttccgacccctttcccagcccacagggcttgaagtgaaggaacagaggcagggggtgggccagccccagggccagggtccccttggtgaagccgtgccagggggctcagctgcttcagggaatgtgtccctcccaccatgggccagagcttcagcccttctttagctcagctagagttcacaggagagccaaaaaagaaaaggaagctgagcatctcccgagtcctgggcagggaaggggagggaaattgctgcttctccaactcttgcttggggccaagccctgcaccagttgcttcccagctgttatctgccagatcttcccatcttgtggcatgtggtgcccccaccaacatcccaaggggaccaatccccttgccaccactttgcatcacctgggaccacagatttggacaggaagggctctgagaagaggccaaagccctcattttacagatgaggaagctgaagcccggggaggggagcgaccctcaaggccacccagctggacacgggagacttgagcccagccttctgactgcattcagccctctctaggacgcagcagcctctccccagcactgagtcccccctcctttgtgtgtcccagcacccttggcctgagtaaacttggaaaggggctccctcccagagaagggactactctcttcacccctttattccagctgcctgccaccccagacccccacctcccaccctgacccccgacccctgggtggggaaggggctcacatgggcccaggctgagtgtgagtgagcatgtcaagttgtctgacactgtgacattagtgcaccctactgacaacccctccccagccttgcccctttctcctctccctgttttgtacataaattgacatgagctgcaacatgtgtgcgtgtgtgtgcgtgtgtgtgtgtgtgtatgtgtgtgtgatctgtgtcatggttttgttacctttttgtttttgtaaacttgaatgttcaaaataaacatgctgtttactctga

SEQ ID NO: 299382 - DNA, 4455 bp, Homo sapiens
ctgagccagcctgcctgtcttttctgctccctcactccatgcctctcctttctctgctgctgtcttggcccaggataccctgggtggccggtttgatgccacccaggcctttgtcggtgacattgcccagtttaacctgtgggaccacgccctgacaccagcccaggtcctgggcattgccaactgcactgcgccactgctgggcaacgtccttccctgggaagacaagttggtggaggcctttgggggtgcaacaaaggctgccttcgatgtctgcaaggggagggccaaggcatgaggggccacctcatccagggcccctcccttgcctgccactttggggacttgaggggggtcatattccctcctcagcctgcccacgcactggccttccctcctgccccactcctggctgtgcctcccatttcccctcacctgtacccacacctccagaatgccctgccctgcgagtgtgtcccctgtccccacctgagtggggaggagcgtctcaagtgaacagtgggagcctgcccacctggcactgcactggagttgtctcttaccccaccctccctgcccatcaactgtatctgatttcactaattttgacagcacccccagtagggtaggattgtgtatgagggggaccccactatctcagtggtgggggtggccgcccgcccccttgtcccccatgcaacaggcccagtggcttccccttcagggccacaacaggctgtagaaggggatgacgaggacatcagaggttagacttaccctcctccctctttccaccagctgccagtcaagggcagtgggatctcgatggagcctccccccccccccacccatgcctccctcttcctcctctttcctcctctctttgtgtgtagcggtttgaatgttggttccatgcctggcccagccccacctcagtctccaggacattcctttcccagctccagcctggagggaaggggacaaagaccccaggaggccaaagggctgcagtcaccccttgtgctcacccatagtgatggccactggtatagtcatcgctctccctccatgccaaggacaggacttggaccgcttcagcctgggctgggagcagccctaaggtagaggcctcatggcccaggagaccccacctctggcagagccacattacctaccctgtgcatggtcctggggcagcaaggaagaagctcagagggtggggagaagcatgaagcagtgagcagagcactgggtgagagggagaagaccttggttcctagccagccctgctaatgtgctgtgtggccttctgtaagtccctgccctctctgggcctggccttcctcattcgtgagctgaggccctcgctttggtcatttgctctccagattgggtgtgagcttctctgtgattccaggtggatatgtggggaaagctctggtgaccctgggcttcgcaggggtagatcccaggactcggcagtggatgggatgcagccagtcatgggttagggtcagcagagactcagagtccagggcaaggttcaaggcagactaacctcatgcatggattgtaaaaaaccagctccctttggatcaacccagcctggcacccttgcctgtctgagagtgtctcaaagggctgatggcttcctggtccccttgagtcatcaccagcttccccaagagagtgtcagaatcttaagagctgagaggccgggcacggtggctcacgcctgtaatcccagcactttgggaggctgagacaggcagatcacttgaggtcaggagttcgaggtcagcctggccaacgtggtgaaaccccatcttcactaaaaatacaaaacttagctggttaggtggtgcatgcctgtagtcccagctactcgggaggccgaggcagaagaatctcttgaactgaggaggtggaggttgcagtgagccgagatcacgccattgcactccagcctgggcaacagagcaagactccatctcaaaaaaataataataatcttaaagatgagaaaagccaccccatctggcaccacagctgcatcttgcttgtgagaaatggggaagagttcagggaggacacgtgacctgcacaggatcacagagcatggggcagagccaggactagagctcagggcatctgactccctcttcagtgttcttccccctccatgttgcctgcccctgaagacctttgagttcagtctacacctaagcaggtagacatccgcgaggtcagatgctttccaacatgacacctgaacatcttcctttatgcaacacccaaacatcttggcatccccaccccaggaagtgcggggaggaggttatgatccctgggcgcttcggcagaatggagagctgaggtgtccctcccctgctagtcacctaccaggtgtctgagcagctgcatgctccctggctcaagtgggcactgtaccttttgcctgcctttttgttccctatctccactccctgaggccacttagcctgagacatgatgcaagagctgcaggccggggggctcagtgccatggaagctactccaagttgcattgcctcccgcgcccagatcctgctttccatttcgagaacataaatagattgcccagcccctccagtacaatcccactggaagaaaaggcaatggcgggcttcagccagacctgctgagacctaggttgccacggtaacagccaaagacatcaacccaagtgctgggtcaagtgtctcatcatactggcactgttgctggggtgacggcagaattcagaacttcaatttcagtgacgccaagcttgatgtgtttctgttattgttttgaagaaggtagctcttgtggaggacttgggagaaggatggggtcttaggaaggaggtgacagcacttgcatggtcacttgagcccacacacacgctcaaccccaagtcctttatgctttgtcacagtgaagatgagacctctgacgtccaagccttgttcctgtgctgcatcacccactcagccttccaaagggaacaggaacaaatttccccagcaccactgtttgggtcccgcttttcctatcttctgctgcccctgagcacatccaagcagacagggaaagaggagtcagacatggcccagtcacatcctgagctgctcctggctgataaccacgatggagcccgtgtttgtcctgccatctggcactgcactgagtgtggcacaggcaccgtcctgttgatctcacaacacagttctaagttaggacgttcttggctccgttagacaggtgaggaaactggggcacagagaggtgatgtcatctgcctggtgtcaatcagctagcaagtgatggagcccagatttcaaaccaaagggggttacgtccaggggctgagttcccactcacctgtgtagagtgccatctgggcaccattgctccagacgtgttccgacccctttcccagcccacagggcttgaagtgaaggaacagaggcagggggtgggccagccccagggccagggtccccttggtgaagccgtgccagggggctcagctgcttcagggaatgtgtccctcccaccatgggccagagcttcagcccttctttagctcagctagagttcacaggagagccaaaaaagaaaaggaagctgagcatctcccgagtcctgggcagggaaggggagggaaattgctgcttctccaactcttgcttggggccaagccctgcaccagttgcttcccagctgttatctgccagatcttcccatcttgtggcatgtggtgcccccaccaacatcccaaggggaccaatccccttgccaccactttgcatcacctgggaccacagatttggacaggaagggctctgagaagaggccaaagccctcattttacagatgaggaagctgaagcccggggaggggagcgaccctcaaggccacccagctggacacgggagacttgagcccagccttctgactgcattcagccctctctaggacgcagcagcctctccccagcactgagtcccccctcctttgtgtgtcccagcacccttggcctgagtaaacttggaaaggggctccctcccagagaagggactactctcttcacccctttattccagctgcctgccaccccagacccccacctcccaccctgacccccgacccctgggtggggaaggggctcacatgggcccaggctgagtgtgagtgagcatgtcaagttgtctgacactgtgacattagtgcaccctactgacaacccctccccagccttgcccctttctcctctccctgttttgtacataaattgacatgagctgcaacatgtgtgcgtgtgtgtgcgtgtgtgtgtgtgtgtatgtgtgtgtgatctgtgtcatggttttgttacctttttgtttttgtaaacttgaatgttcaaaataaacatgctgtttactctga

SEQ ID NO: 299383 - DNA, 663 bp, Homo sapiens
gctcaaggccacccagctggacacgggagacttgagcccagccttctgactgcattcagccctctctaggacgcagcagcctctccccagcactgagtcccccctcctttgtgtgtcccagcacccttggcctgagtgctggggagaggccacccagctggacacgggagacttgagcccagccttctgactgcattcagccctctctaggacgcagcagcctctccccagcactgagtcccccctcctttgtgtgtcccagcacccttggcctgagtaaacttggaaaggggctccctcccagagaagggactactctcttcacccctttattccagctgcctgccaccccagacccccacctcccaccctgacccccgacccctgggtggggaaggggctcacatgggcccaggctgagtgtgagtgagcatgtcaagttgtctgacactgtgacattagtgcaccctactgacaacccctccccagccttgcccctttctcctctccctgttttgtacataaattgacatgagctgcaacatgtgtgcgtgtgtgtgcgtgtgtgtgtgtgtgtatgtgtgtgtgatctgtgtcatggttttgttacctttttgtttttgtaaacttgaatgttcaaaataaacatgctgtttactctga

SEQ ID NO: 299384 - DNA, 4992 bp, Homo sapiens
ccagagcccctgcactttaatcacacccctcaacacagaggtggagcagagagagccctgaaggcactgggcatgcagcaggtgcctgggagctgttagccatctttctgaagtgtgccctgtccaccccacccttttcggtgtccaccgacctccaccatgtctgccttgcccaccctcagggtcctcagcctacagtcctccagatgccttcaagatcagcatccccatccgtaacaactacatgtacgcccgcgtgcggaaggctctgcccgagctctacgcattcaccgcctgcatgtggctgcggtccaggtccagcggcaccggccagggcacccccttctcctactcagtgcccgggcaggccaacgagattgtactgctagaggcgggccatgagcccatggagctgctgatcaacgacaaggtggcccagctgcccctgagcctgaaggacaatggctggcaccacatctgcatcgcctggaccacaagggatggcctatggtctgcctaccaggacggggagctgcagggctccggtgagaacctggctgcctggcaccccatcaagcctcatgggatccttatcttgggccaggagcaggataccctgggtggccggtttgatgccacccaggcctttgtcggtgacattgcccagtttaacctgtgggaccacgccctgacaccagcccaggtcctgggcattgccaactgcactgcgccactgctgggcaacgtccttccctgggaagacaagttggtggaggcctttgggggtgcaacaaaggctgccttcgatgtctgcaaggggagggccaaggcatgaggggccacctcatccagggcccctcccttgcctgccactttggggacttgaggggggtcatattccctcctcagcctgcccacgcactggccttccctcctgccccactcctggctgtgcctcccatttcccctcacctgtacccacacctccagaatgccctgccctgcgagtgtgtcccctgtccccacctgagtggggaggagcgtctcaagtgaacagtgggagcctgcccacctggcactgcactggagttgtctcttaccccaccctccctgcccatcaactgtatctgatttcactaattttgacagcacccccagtagggtaggattgtgtatgagggggaccccactatctcagtggtgggggtggccgcccgcccccttgtcccccatgcaacaggcccagtggcttccccttcagggccacaacaggctgtagaaggggatgacgaggacatcagaggttagacttaccctcctccctctttccaccagctgccagtcaagggcagtgggatctcgatggagcctccccccccccccacccatgcctccctcttcctcctctttcctcctctctttgtgtgtagcggtttgaatgttggttccatgcctggcccagccccacctcagtctccaggacattcctttcccagctccagcctggagggaaggggacaaagaccccaggaggccaaagggctgcagtcaccccttgtgctcacccatagtgatggccactggtatagtcatcgctctccctccatgccaaggacaggacttggaccgcttcagcctgggctgggagcagccctaaggtagaggcctcatggcccaggagaccccacctctggcagagccacattacctaccctgtgcatggtcctggggcagcaaggaagaagctcagagggtggggagaagcatgaagcagtgagcagagcactgggtgagagggagaagaccttggttcctagccagccctgctaatgtgctgtgtggccttctgtaagtccctgccctctctgggcctggccttcctcattcgtgagctgaggccctcgctttggtcatttgctctccagattgggtgtgagcttctctgtgattccaggtggatatgtggggaaagctctggtgaccctgggcttcgcaggggtagatcccaggactcggcagtggatgggatgcagccagtcatgggttagggtcagcagagactcagagtccagggcaaggttcaaggcagactaacctcatgcatggattgtaaaaaaccagctccctttggatcaacccagcctggcacccttgcctgtctgagagtgtctcaaagggctgatggcttcctggtccccttgagtcatcaccagcttccccaagagagtgtcagaatcttaagagctgagaggccgggcacggtggctcacgcctgtaatcccagcactttgggaggctgagacaggcagatcacttgaggtcaggagttcgaggtcagcctggccaacgtggtgaaaccccatcttcactaaaaatacaaaacttagctggttaggtggtgcatgcctgtagtcccagctactcgggaggccgaggcagaagaatctcttgaactgaggaggtggaggttgcagtgagccgagatcacgccattgcactccagcctgggcaacagagcaagactccatctcaaaaaaataataataatcttaaagatgagaaaagccaccccatctggcaccacagctgcatcttgcttgtgagaaatggggaagagttcagggaggacacgtgacctgcacaggatcacagagcatggggcagagccaggactagagctcagggcatctgactccctcttcagtgttcttccccctccatgttgcctgcccctgaagacctttgagttcagtctacacctaagcaggtagacatccgcgaggtcagatgctttccaacatgacacctgaacatcttcctttatgcaacacccaaacatcttggcatccccaccccaggaagtgcggggaggaggttatgatccctgggcgcttcggcagaatggagagctgaggtgtccctcccctgctagtcacctaccaggtgtctgagcagctgcatgctccctggctcaagtgggcactgtaccttttgcctgcctttttgttccctatctccactccctgaggccacttagcctgagacatgatgcaagagctgcaggccggggggctcagtgccatggaagctactccaagttgcattgcctcccgcgcccagatcctgctttccatttcgagaacataaatagattgcccagcccctccagtacaatcccactggaagaaaaggcaatggcgggcttcagccagacctgctgagacctaggttgccacggtaacagccaaagacatcaacccaagtgctgggtcaagtgtctcatcatactggcactgttgctggggtgacggcagaattcagaacttcaatttcagtgacgccaagcttgatgtgtttctgttattgttttgaagaaggtagctcttgtggaggacttgggagaaggatggggtcttaggaaggaggtgacagcacttgcatggtcacttgagcccacacacacgctcaaccccaagtcctttatgctttgtcacagtgaagatgagacctctgacgtccaagccttgttcctgtgctgcatcacccactcagccttccaaagggaacaggaacaaatttccccagcaccactgtttgggtcccgcttttcctatcttctgctgcccctgagcacatccaagcagacagggaaagaggagtcagacatggcccagtcacatcctgagctgctcctggctgataaccacgatggagcccgtgtttgtcctgccatctggcactgcactgagtgtggcacaggcaccgtcctgttgatctcacaacacagttctaagttaggacgttcttggctccgttagacaggtgaggaaactggggcacagagaggtgatgtcatctgcctggtgtcaatcagctagcaagtgatggagcccagatttcaaaccaaagggggttacgtccaggggctgagttcccactcacctgtgtagagtgccatctgggcaccattgctccagacgtgttccgacccctttcccagcccacagggcttgaagtgaaggaacagaggcagggggtgggccagccccagggccagggtccccttggtgaagccgtgccagggggctcagctgcttcagggaatgtgtccctcccaccatgggccagagcttcagcccttctttagctcagctagagttcacaggagagccaaaaaagaaaaggaagctgagcatctcccgagtcctgggcagggaaggggagggaaattgctgcttctccaactcttgcttggggccaagccctgcaccagttgcttcccagctgttatctgccagatcttcccatcttgtggcatgtggtgcccccaccaacatcccaaggggaccaatccccttgccaccactttgcatcacctgggaccacagatttggacaggaagggctctgagaagaggccaaagccctcattttacagatgaggaagctgaagcccggggaggggagcgaccctcaaggccacccagctggacacgggagacttgagcccagccttctgactgcattcagccctctctaggacgcagcagcctctccccagcactgagtcccccctcctttgtgtgtcccagcacccttggcctgagtaaacttggaaaggggctccctcccagagaagggactactctcttcacccctttattccagctgcctgccaccccagacccccacctcccaccctgacccccgacccctgggtggggaaggggctcacatgggcccaggctgagtgtgagtgagcatgtcaagttgtctgacactgtgacattagtgcaccctactgacaacccctccccagccttgcccctttctcctctccctgttttgtacataaattgacatgagctgcaacatgtgtgcgtgtgtgtgcgtgtgtgtgtgtgtgtatgtgtgtgtgatctgtgtcatggttttgttacctttttgtttttgtaaacttgaatgttcaaaataaacatgctgtttactctga

SEQ ID NO: 299385 - DNA, 1975 bp, Homo sapiens
ctgaagttcctggccgtgctgctggccgcgggcatgctggcgttcctcggtgccgtcatctgcatcatcgccagcgtgcccctggcggccagcccggcgcgggcgctgcccggcggcgccgacaatgcttcggtcgcctcgggcgccgccgcgtccccgggcccgcagcggagcctgagcgcgctgcacggcgcgggcggttcagccgggccccccgcgctgcccggggcacccgcggccagcgcgcacccgctgccgcccgggcccctgttcagccgcttcctgtgcacgccgctggctgctgcctgcccgtcgggggcccagcagggggacgcggcgggcgctgcgccgggcgagcgcgaagagctgctgctgctgcagagcacggccgagcagctgcgccagacggcgctgcagcaggaggcgcgcatccgcgccgaccaggacaccatccgtgagctcaccggcaagctgggccgctgcgagagcggcctgccgcgcggcctccagggcgccgggccccgccgcgacaccatggccgacgggccctgggactcgcctgcgctcattctggagctggaggacgccgtgcgcgccctgcgggaccgcatcgaccgcctggagcaggagcttccagcccgtgtgaacctctcagctgccccagccccagtctctgctgtgcccaccggcctacactccaagatggaccagctggaggggcagctgctggcccaggtgctggcactggagaaggagcgtgtggccctcagccacagcagccgccggcagaggcaggaagtggaaaaggagttggacgtcctgcagggtcgtgtggctgagctggagcacgggtcctcagcctacagtcctccagatgccttcaagatcagcatccccatccgtaacaactacatgtacgcccgcgtgcggaaggctctgcccgagctctacgcattcaccgcctgcatgtggctgcggtccaggtccagcggcaccggccagggcacccccttctcctactcagtgcccgggcaggccaacgagattgtactgctagaggcgggccatgagcccatggagctgctgatcaacgacaaggtggcccagctgcccctgagcctgaaggacaatggctggcaccacatctgcatcgcctggaccacaagggatggcctatggtctgcctaccaggacggggagctgcagggctccggtgagaacctggctgcctggcaccccatcaagcctcatgggatccttatcttgggccaggagcaggataccctgggtggccggtttgatgccacccaggcctttgtcggtgacattgcccagtttaacctgtgggaccacgccctgacaccagcccaggtcctgggcattgccaactgcactgcgccactgctgggcaacgtccttccctgggaagacaagttggtggaggcctttgggggtgcaacaaaggctgccttcgatgtctgcaaggggagggccaaggcatgaggggccacctcatccagggcccctcccttgcctgccactttggggacttgaggggggtcatattccctcctcagcctgcccacgcactggccttccctcctgccccactcctggctgtgcctcccatttcccctcacctgtacccacacctccagaatgccctgccctgcgagtgtgtcccctgtccccacctgagtggggaggagcgtctcaagtgaacagtgggagcctgcccacctggcactgcactggagttgtctcttaccccaccctccctgcccatcaactgtatctgatttcactaattttgacagcacccccagtagggtaggattgtgtatgagggggacacctttatatgggcggtggcaccctgaaccctaactattgttctgtatgaatggcatcttattgtcctgaaattgaactgcgccctgctctcgaggagacccgttcggattcctacatactt

SEQ ID NO: 299386 - DNA, 743 bp, Homo sapiens
cagagcccctgcactttaatcacacccctcaacacagaggtggagcagagagagccctgaaggcactgggcatgcagcaggtgcctgggagctgttagccatctttctgaagtgtgccctgtccaccccacccttttcggtgtccaccgacctccaccatgtctgccttgcccaccctcagggtcctcagcctacagtcctccagatgccttcaagatcagcatccccatccgtaacaactacatgtacgcccgcgtgcggaaggctctgcccgagctctacgcattcaccgcctgcatgtggctgcggtccaggtccagcggcaccggccagggcacccccttctcctactcagtgcccgggcaggccaacgagattgtactgctagaggcgggccatgagcccatggagctgctgatcaacgacaaggtaggcagggctggcagggagggctggctgggggagggccacccttccagaagcacccactccacactgggctctttcattctcctgctcattctcctgctctgcatattcagcacacattaagtacctaccgtgtgctaggctgggctctgggaatataaagacaagccagacatggagctgccggaagagaggctgtgtccaatagaggctctaagtgttgttccattttacagaggaggcaagtgaagctcttggggatccagtgacttccccagtgacccagctatgggacagggctgaggtgtctgccc

SEQ ID NO: 299387 - DNA, 3606 bp, Homo sapiens
cgcgccctccttgatggacgagagctggtttgttacccctcccgcctgttttacggcagaggggcctggactcggtcccgcccgcctccagagcagtcccctggaggacctcctcatcgagcaccccagcatgtccgtttacgtcaccggcagcaccatagtgctagagcccgggtccccttccccgctcccggacgcggccctgcctgacggcgacctcagcgaaggggaattgacgcccgcccgccgcgagccgcgggccgcgcgccacgccgctcctctcccagcgcgggcggcgctgctggagaaggcgggccaggtgcggcggctgcagcgggcccggcagcgggcagagcgccacgcgctgagcgccaaggcggtgcagcggcagaaccgagcccgcgagagccgtccgcgccggtccaagaaccagagcagcttcatctaccagccgtgccagcgccagttcaactactgagcgtccaccggccgcgccacgaaccccttgccgatcccgatccctgtcgggctcctccgactcctcgggctggacaccgaaacctcccttcttaaagcgtgtgaggttgggtgatagccgttccttccccgacaccctcaatttccccatctctgatcctctaatctgcctctgaacccattcacccttcaccctcactcctggtccccatacccagcatctaatcatccatgccccctactcctggcccctccatcctttcttctctggtccccatccctgtctctccctttcacccttgccctccagtcctctacctctggcctgcccctatttctgaaagcttcttccagtccctgatctggctcattccccaccttcaactcccaccttacatgtctcacactatcccatggttggcattacactcactcctgttcccttattcttcattcccagtaattccctaccaaatggtggggaccctgagcccagctctgaccaggtagagcctgtgcagcctgggctgctgtcattgccctccagtaagggctcagggttttgcttttagtctccccttccttctgccttgggggcggtactctgtggagctgcttaggcctggaaaggtacagtatgtagaagaggactgtgagacgtgagttagagggagaagatggagggaatctagggaacgaggcagcctattggagatgcggacaggacagacacgttgagaagctgcagggagcagggcaccaagggagtgtgcactgtgcttgctcagagaggccaaaccctgctcccaggctgaagcctggagtctgcccccacttcccttttctataatccacccttctgcaggccctgaaatctgaagggcttagttagtaccttgccactctacccccaacacgtcacccgagtagaagctgggcaaggccctaccatcctggccgtctgttcacaagcccaaggtgctagaactagcttaggagacatgcaggccacagggcttctaggcagggaaagggcacacaccctaggtcagcgtgcagagcagtgatgctggaggacacaccatggggtgaagccatcccaaggctgacagctcagtcttcaccttgcctctggccttgtatttcacaccctgctcagtatggctagccagcagtcctgagtaggagtccaggactcccactgtctcaatctgcaaattgttcctatccaggttcagggccttcagggggcctcttttcattttctcccacaggcctctctttctttctaggttgctggggagaaatgggtaccctatgatccccctccccttctcctccagtaaatacctggaagagggaacctgaatccctgggggagacagaaggggcaggggccaccagcctccccttcttgtggtgagactgaattttgggctcagacaccagcaacagcctcttgggatgccctgagttgcttcccatttcctctttctagccgtccttttctagtgtgtgctcactcttcctaggaacttttaagacttcttggtacctatgaacataggtcctcccctcaccccaactctaggtttccaggcctcacagccaagctgaagcttggagaaaactctgcattcccatgagggcaaaggcagctgccctccctgaccctatagccccaggcctcatggggggtatgtggggaagggatggggtatccccatggatgctgggatgaggacagaggaagacctgatggggtctcctattccagggaataagccaaattaacactaaaaacggatcaaagctcccacgccagtccactagggccccagtagttgacagccttgctcctctcccaagttctccttcagaacctagttgcttttattcttccagctaccacttgggcacttcacagccagcctagggtcttcggcacctccaagagctgaatctccctccaacccttcttgcctactcctcactgccagctgggacctaggctcagtcctgtgtggtgcccatgatccttctggtgggggaagagtttaagttatagggcatttggctcaaattttaaaaggccttttgtttacctatatttctggaggctcctgtattctagaacccaatctctcacctgcttggttgcaaggctcatatttttttgtacctttcctatagattctgtagcatttgagtgtggcaatattttaattgtgtatagatttctaagaaccaacactactcagtctcctgctagtctgactcctgaagcatcagcccttgtcatactgtattgactgtgtacgtgcctttcaccttgagcatgcttcaggatttttttttaaaccacagaacttgaatacatgagggaaccagagttcaaagtcctatgcaaccttaggagggggttagagagtctgttttgattgatgttttctgaggccctagaggagtttgtatcaatttgtgagtattaatgtcagtactaccagcactttgccaaaactgtcagagggacccgtttctagagtgagtcccagttacatcaaacagtgacttccagttattccccagtaagtctgagtggttccttcaagctgggtgtctttccagcctttgccagtctagccccagcagggcaccgtgtatgaatgcagtttggtgctgttttagagtatgcctgctccccagccccctgcctggaaccctctgagcaacttgctctgacctataatgtcttaggtgcaacacggaccccaccagagctcttggatacccccctagatccatgtggctttatgtgaggggactgaatgcagacacaccatagcccccttctactactttccctctcgccctgccacctagttccacatggaaccaacaagttgagtgcatccctgttgggtgttttgtgttgagactggctgaaatgaggagactttgaccatgtgacgtgtcaacagactcaaggagacaaccacctcaactgggtcatgtggcatgcctgtgtatgtgtgtaacagaattctgattgttagactgtaatgctattcctctatgggagaaaaaaattaatataaagaaaaacaaataaaaatatatttaaagcac

SEQ ID NO: 299388 - DNA, 3230 bp, Homo sapiens
cgcgccctccttgatggacgagagctggtttgttacccctcccgcctgttttacggcagaggggcctggactcggtcccgcccgcctccagagcagtcccctggaggacctcctcatcgagcaccccagcatgtccgtttacgtcaccggcagcaccatagtgctagagcccgggtccccttccccgctcccggacgcggccctgcctgacggcgacctcagcgaaggggaattgacgcccgcccgccgcgagccgcgggccgcgcgccacgccgctcctctcccagcgcgggcggcgctgctggagaaggcgggccaggtgcggcggctgcagcgggcccggcagcgggcagagcgccacgcgctgagcgccaaggcggtgcagcggcagaaccgagcccgcgagagccgtccgcgccggtccaagaaccagagcagcttcatctaccagccgtgccagcgccagttcaactactgagcgtccaccggccgcgccacgaaccccttgccgatcccgatccctgtcgggctcctccgactcctcgggctggacaccgaaacctcccttcttaaagcgtgtgaggttgggtgatagccgttccttccccgacaccctcaatttccccatctctgatcctctaatctgcctctgaacccattcacccttcaccctcactcctggtccccatacccagcatctaatcatccatgccccctactcctggcccctccatcctttcttctctggtccccatccctgtctctccctttcacccttgccctccagtcctctacctctggcctgcccctatttctgaaagcttcttccagtccctgatctggctcattccccaccttcaactcccaccttacatgtctcacactatcccatggttggcattacactcactcctgttcccttattcttcattcccagtaattccctaccaaatggtggggaccctgagcccagctctgaccaggtagagcctgtgcagcctgggctgctgtcattgccctccagtaagggctcagggttttgcttttagtctccccttccttctgccttgggggcggtactctgtggagctgcttaggcctggaaaggtacagtatgtagaagaggactgtgagacgtgagttagagggagaagatggagggaatctagggaacgaggcagcctattggagatgcggacaggacagacacgttgagaagctgcagggagcagggcaccaagggagtgtgcactgtgcttgctcagagaggccaaaccctgctcccaggctgaagcctggagtctgcccccacttcccttttctataatccaccgttcagggccttcagggggcctcttttcattttctcccacaggcctctctttctttctaggttgctggggagaaatgggtaccctatgatccccctccccttctcctccagtaaatacctggaagagggaacctgaatccctgggggagacagaaggggcaggggccaccagcctccccttcttgtggtgagactgaattttgggctcagacaccagcaacagcctcttgggatgccctgagttgcttcccatttcctctttctagccgtccttttctagtgtgtgctcactcttcctaggaacttttaagacttcttggtacctatgaacataggtcctcccctcaccccaactctaggtttccaggcctcacagccaagctgaagcttggagaaaactctgcattcccatgagggcaaaggcagctgccctccctgaccctatagccccaggcctcatggggggtatgtggggaagggatggggtatccccatggatgctgggatgaggacagaggaagacctgatggggtctcctattccagggaataagccaaattaacactaaaaacggatcaaagctcccacgccagtccactagggccccagtagttgacagccttgctcctctcccaagttctccttcagaacctagttgcttttattcttccagctaccacttgggcacttcacagccagcctagggtcttcggcacctccaagagctgaatctccctccaacccttcttgcctactcctcactgccagctgggacctaggctcagtcctgtgtggtgcccatgatccttctggtgggggaagagtttaagttatagggcatttggctcaaattttaaaaggccttttgtttacctatatttctggaggctcctgtattctagaacccaatctctcacctgcttggttgcaaggctcatatttttttgtacctttcctatagattctgtagcatttgagtgtggcaatattttaattgtgtatagatttctaagaaccaacactactcagtctcctgctagtctgactcctgaagcatcagcccttgtcatactgtattgactgtgtacgtgcctttcaccttgagcatgcttcaggatttttttttaaaccacagaacttgaatacatgagggaaccagagttcaaagtcctatgcaaccttaggagggggttagagagtctgttttgattgatgttttctgaggccctagaggagtttgtatcaatttgtgagtattaatgtcagtactaccagcactttgccaaaactgtcagagggacccgtttctagagtgagtcccagttacatcaaacagtgacttccagttattccccagtaagtctgagtggttccttcaagctgggtgtctttccagcctttgccagtctagccccagcagggcaccgtgtatgaatgcagtttggtgctgttttagagtatgcctgctccccagccccctgcctggaaccctctgagcaacttgctctgacctataatgtcttaggtgcaacacggaccccaccagagctcttggatacccccctagatccatgtggctttatgtgaggggactgaatgcagacacaccatagcccccttctactactttccctctcgccctgccacctagttccacatggaaccaacaagttgagtgcatccctgttgggtgttttgtgttgagactggctgaaatgaggagactttgaccatgtgacgtgtcaacagactcaaggagacaaccacctcaactgggtcatgtggcatgcctgtgtatgtgtgtaacagaattctgattgttagactgtaatgctattcctctatgggagaaaaaaattaatataaagaaaaacaaataaaaatatatttaaagcac

SEQ ID NO: 299389 - DNA, 3549 bp, Homo sapiens
cgcgccctccttgatggacgagagctggtttgttacccctcccgcctgttttacggcagaggggcctggactcggtcccgcccgcctccagagcagtcccctggaggacctcctcatcgagcaccccagcatgtccgtttacgtcaccggcagcaccatagtgctagagcccgggtccccttccccgctcccggacgcggccctgcctgacggcgacctcagcgaaggggaattgacgcccgcccgccgcgagccgcgggccgcgcgccacgccgctcctctcccagcgcgggcggcgctgctggagaaggcgggccaggtgcggcggctgcagcgggcccggcagcgggcagagcgccacgcgctgagcgccaaggcggtgcagcggcagaaccgagcccgcgagagccgtccgcgccggtccaagaaccagagcagcttcatctaccagccgtgccagcgccagttcaactactgagcgtccaccggccgcgccacgaaccccttgccgatcccgatccctgtcgggctcctccgactcctcgggctggacaccgaaacctcccttcttaaagcgtgtgaggttgggtgatagccgttccttccccgacaccctcaatttccccatctctgatcctctaatctgcctctgaacccattcacccttcaccctcactcctggtccccatacccagcatctaatcatccatgccccctactcctggcccctccatcctttcttctctggtccccatccctgtctctccctttcacccttgccctccagtcctctacctctggcctgcccctatttctgaaagcttcttccagtccctgatctggctcattccccaccttcaactcccaccttacatgtctcacactatcccatggttggcattacactcactcctgttcccttattcttcattcccagtaattccctaccaaatggtggggaccctgagcccagctctgaccaggtagagcctgtgcagcctgggctgctgtcattgccctccagtaagggctcagggttttgcttttagtctccccttccttctgccttgggggcggtactctgtggagctgcttaggcctggaaaggtacagtatgtagaagaggactgtgagacgtgagttagagggagaagatggagggaatctagggaacgaggcagcctattggagatgcggacaggacagacacgttgagaagctgcagggagcagggcaccaagggagtgtgcactgtgcttgctcagagaggccaaaccctgctcccaggctgaagcctggagtctgcccccacttcccttttctataatccacccttctgcaggccctgaaatctgaagggcttagttagtaccttgccactctacccccaacacgtcacccgagtagaagctgggcaaggccctaccatcctggccgtctgttcacaagcccaaggtgctagaactagcttaggagacatgcaggccacagggcttctaggcagggaaagggcacacaccctaggtcagcgtgcagagcagtgatgctggaggacacaccatggggtgaagccatcccaaggctgacagctcagtcttcaccttgcctctggccttgtatttcacaccctgctcagtatggctagccagcagtcctgagtaggagtccaggactcccactgtctcaatctgcaaattgttcctatccaggttcagggccttcagggggcctcttttcattttctcccacaggcctctctttctttctaggttgctggggagaaatgggtaccctatgatccccctccccttctcctccagtaaatacctggaagagggaacctgaatccctgggggagacagaaggggcaggggccaccagcctccccttcttgtggtgagactgaattttgggctcagacaccagcaacagcctcttgggatgccctgagttgcttcccatttcctctttctagccgtccttttctagtgtgtgctcactcttcctaggaacttttaagacttcttggtacctatgaacataggtcctcccctcaccccaactctaggtttccaggcctcacagccaagctgaagcttggagaaaactctgcattcccatgagggcaaaggcagctgccctccctgaccctatagccccaggcctcatggggggtatgtggggaagggatggggtatccccatggatgctgggatgaggacagaggaagacctgatggggtctcctattccagggaataagccaaattaacactaaaaacggatcaaagctcccacgccagtccactagggccccagtagttgacagccttgctcctctcccaagttctccttcagaacctagttgcttttattcttccagctaccacttgggcacttcacagccagcctagggtcttcggcacctccaagagctgaatctccctccaacccttcttgcctactcctcactgccagctgggacctaggctcagtcctgtgtggtgcccatgatccttctggtgggggaagagtttaagttatagggcatttggctcccaatctctcacctgcttggttgcaaggctcatatttttttgtacctttcctatagattctgtagcatttgagtgtggcaatattttaattgtgtatagatttctaagaaccaacactactcagtctcctgctagtctgactcctgaagcatcagcccttgtcatactgtattgactgtgtacgtgcctttcaccttgagcatgcttcaggatttttttttaaaccacagaacttgaatacatgagggaaccagagttcaaagtcctatgcaaccttaggagggggttagagagtctgttttgattgatgttttctgaggccctagaggagtttgtatcaatttgtgagtattaatgtcagtactaccagcactttgccaaaactgtcagagggacccgtttctagagtgagtcccagttacatcaaacagtgacttccagttattccccagtaagtctgagtggttccttcaagctgggtgtctttccagcctttgccagtctagccccagcagggcaccgtgtatgaatgcagtttggtgctgttttagagtatgcctgctccccagccccctgcctggaaccctctgagcaacttgctctgacctataatgtcttaggtgcaacacggaccccaccagagctcttggatacccccctagatccatgtggctttatgtgaggggactgaatgcagacacaccatagcccccttctactactttccctctcgccctgccacctagttccacatggaaccaacaagttgagtgcatccctgttgggtgttttgtgttgagactggctgaaatgaggagactttgaccatgtgacgtgtcaacagactcaaggagacaaccacctcaactgggtcatgtggcatgcctgtgtatgtgtgtaacagaattctgattgttagactgtaatgctattcctctatgggagaaaaaaattaatataaagaaaaacaaataaaaatatatttaaagcac

SEQ ID NO: 299390 - DNA, 3865 bp, Homo sapiens
cgcgccctccttgatggacgagagctggtttgttacccctcccgcctgttttacggcagaggggcctggactcggtcccgcccgcctccagagcagtcccctggaggacctcctcatcgagcaccccagcatgtccgtttacgtcaccggcagcaccatagtgctagagcccgggtccccttccccgctcccggacgcggccctgcctgacggcgacctcagcgaaggggaattgacgcccgcccgccgcgagccgcgggccgcgcgccacgccgctcctctcccagcgcgggcggcgctgctggagaaggcgggccaggtgcggcggctgcagcgggcccggcagcgggcagagcgccacgcgctgagcgccaaggcggtgcagcggcagaaccgagcccgcgagagccgtccgcgccggtccaagaaccagagcagcttcatctaccagccgtgccagcgccagttcaactactgagcgtccaccggccgcgccacgaaccccttgccgatcccgatccctgtcgggctcctccgactcctcgggctggacaccgaaacctcccttcttaaagcgtgtgaggttgggtgatagccgttccttccccgacaccctcaatttccccatctctgatcctctaatctgcctctgaacccattcacccttcaccctcactcctggtccccatacccagcatctaatcatccatgccccctactcctggcccctccatcctttcttctctggtccccatccctgtctctccctttcacccttgccctccagtcctctacctctggcctgcccctatttctgaaagcttcttccagtccctgatctggctcattccccaccttcaactcccaccttacatgtctcacactatcccatggttggcattacactcactcctgttcccttattcttcattcccagtaattccctaccaaatggtggggaccctgagcccagctctgaccaggtagagcctgtgcagcctgggctgctgtcattgccctccagtaagggctcagggttttgcttttagtctccccttccttctgccttgggggcggtactctgtggagctgcttaggcctggaaaggtacagtatgtagaagaggactgtgagacgtgagttagagggagaagatggagggaatctagggaacgaggcagcctattggagatgcggacaggacagacacgttgagaagctgcagggagcagggcaccaagggagtgtgcactgtgcttgctcagagaggccaaaccctgctcccaggctgaagcctggagtctgcccccacttcccttttctataatccacccttctgcaggccctgaaatctgaagggcttagttagtaccttgccactctacccccaacacgtcacccgagtagaagctgggcaaggccctaccatcctggccgtctgttcacaagcccaaggtgctagaactagcttaggagacatgcaggccacagggcttctaggcagggaaagggcacacaccctaggtcagcgtgcagagcagtgatgctggaggacacaccatggggtgaagccatcccaaggctgacagctcagtcttcaccttgcctctggccttgtatttcacaccctgctcagtatggctagccagcagtcctgagtaggagtccaggactcccactgtctcaatctgcaaattgttcctatccaggttcagggccttcagggggcctcttttcattttctcccacaggcctctctttctttctaggttgctggggagaaatgggtaccctatgatccccctccccttctcctccagtaaatacctggaagagggaacctgaatccctgggggagacagaaggggcaggggccaccagcctccccttcttgtggtgagactgaattttgggctcagacaccagcaacagcctcttgggatgccctgagttgcttcccatttcctctttctagccgtccttttctagtgtgtgctcactcttcctaggaacttttaagacttcttggtacctatgaacataggtcctcccctcaccccaactctaggtttccaggcctcacagccaagctgaagcttggagaaaactctgcattcccatgagggcaaaggcagctgccctccctgaccctatagccccaggcctcatggggggtatgtggggaagggatggggtatccccatggatgctgggatgaggacagaggaagacctgatggggtctcctattccagggaataagccaaattaacactaaaaacggatcaaagctcccacgccagtccactagggccccagtagttgacagccttgctcctctcccaagttctccttcagaacctagttgcttttattcttccagctaccacttgggcacttcacagccagcctagggtcttcggcacctccaagagctgaatctccctccaacccttcttgcctactcctcactgccagctgggacctaggctcagtcctgtgtggtgcccatgatccttctggtgggggaagagtttaagttatagggcatttggctcaaattttaaaaggccttttgtttacctatatttctggaggctcctgtattctagaacccaatctctcacctgcttggttgcaaggctcatatttttttgtacctttcctatagattctgtagcatttgagtgtggcaatattttaattgtgtatagatttctaagaaccaacactactcagtctcctgctagtctgactcctgaagcatcagcccttgtcatactgtattgactgtgtacgtgcctttcaccttgagcatgcttcaggatttttttttaaaccacagaacttgaatacatgagggaaccagagttcaaagtcctatgcaaccttaggagggggttagagagtctgttttgattgatgttttctgaggccctagaggagtttgtatcaatttgtgagtattaatgtcagtactaccagcactttgccaaaactgtcagagggacccgtttctagagtgagtcccagttacatcaaacagtgacttccagttattccccagtaagtctgagtggttccttcaagctgggtgtctttccagcctttgccagtctagccccagcagggcaccgtgtatgaatgcagtttggtgctgttttagagtatgcctgctccccagccccctgcctggaaccctctgagcaacttgctctgacctataatgtcttaggtgcaacacggaccccaccagagctcttggatacccccctagatccatgtggctttatgtgaggggactgaatgcagacacaccatagcccccttctactactttccctctcgccctgccacctagttccacatggaaccaacaagttgagtgcatccctgttgggtgttttgtgttgagactggctgaaatgaggagactttgaccatgtgacgtgtcaacagactcaaggagacaaccacctcaactgggtcatgtggcatgcctgtgtatgtgtgtaacagaattctgattgttagactgtaatgctattcctctatgggagaaaaaaattaatataaagaaaaacaaataaaaatatatttaaagcactaaacaacacacaccaacaacagcacaaaagcagaagcgcgtcaggccgcccagcggacccccaagagagtctcgccacacacccaacgggcgcagagggccccactgcggcacccggcacaacagggcccacacgtggtcccccggcgacaccccggggcccgaggcacacgccgccgggacctctcgcagagcacaacagaccgggcggagccaaaccagcgacggccccgaaccaacccccactggccccccggga

SEQ ID NO: 299391 - DNA, 3444 bp, Homo sapiens
cgcgccctccttgatggacgagagctggtttgttacccctcccgcctgttttacggcagaggggcctggactcggtcccgcccgcctccagagcagtcccctggaggacctcctcatcgagcaccccagcatgtccgtttacgtcaccggcagcaccatagtgctagagcccgggtccccttccccgctcccggacgcggccctgcctgacggcgacctcagcgaaggggaattgacgcccgcccgccgcgagccgcgggccgcgcgccacgccgctcctctcccagcgcgggcggcgctgctggagaaggcgggccaggtgcggcggctgcagcgggcccggcagcgggcagagcgccacgcgctgagcgccaaggcggtgcagcggcagaaccgagcccgcgagagccgtccgcgccggtccaagaaccagagcagcttcatctaccagccgtgccagcgccagttcaactactgagcgtccaccggccgcgccacgaaccccttgccgatcccgatccctgtcgggctcctccgactcctcgggctggacaccgaaacctcccttcttaaagcgtgtgaggttgggtgatagccgttccttccccgacaccctcaatttccccatctctgatcctctaatctgcctctgaacccattcacccttcaccctcactcctggtccccatacccagcatctaatcatccatgccccctactcctggcccctccatcctttcttctctggtccccatccctgtctctccctttcacccttgccctccagtcctctacctctggcctgcccctatttctgaaagcttcttccagtccctgatctggctcattccccaccttcaactcccaccttacatgtctcacactatcccatggttggcattacactcactcctgttcccttattcttcattcccagtaattccctaccaaatggtggggaccctgagcccagctctgaccaggtagagcctgtgcagcctgggctgctgtcattgccctccagtaagggctcagggttttgcttttagtctccccttccttctgccttgggggcggtactctgtggagctgcttaggcctggaaaggtacagtatgtagaagaggactgtgagacgtgagttagagggagaagatggagggaatctagggaacgaggcagcctattggagatgcggacaggacagacacgttgagaagctgcagggagcagggcaccaagggagtgtgcactgtgcttgctcagagaggccaaaccctgctcccaggctgaagcctggagtctgcccccacttcccttttctataatccacccttctgcaggccctgaaatctgaagggcttagttagtaccttgccactctacccccaacacgtcacccgagtagaagctgggcaaggccctaccatcctggccgtctgttcacaagcccaaggtgctagaactagcttaggagacatgcaggccacagggcttctaggcagggaaagggcacacaccctaggtcagcgtgcagagcagtgatgctggaggacacaccatggggtgaagccatcccaaggctgacagctcagtcttcaccttgcctctggccttgtatttcacaccctgctcagtatggctagccagcagtcctgagtaggagtccaggactcccactgtctcaatctgcaaattgttcctatccaggttcagggccttcagggggcctcttttcattttctcccacaggcctctctttctttctaggttgctggggagaaatgggtaccctatgatccccctccccttctcctccagtaaatacctggaagagggaacctgaatccctgggggagacagaaggggcaggggccaccagcctccccttcttgtggtgagactgaattttgggctcagacaccagcaacagcctcttgggatgccctgagttgcttcccatttcctctttctagccgtccttttctagtgtgtgctcactcttcctaggaacttttaagacttcttggtacctatgaacataggtcctcccctcaccccaactctaggtttccaggcctcacagccaagctgaagcttggagaaaactctgcattcccatgagggcaaaggcagctgccctccctgaccctatagccccaggcctcatggggggtatgtggggaagggatggggtatccccatggatgctgggatgaggacagaggaagacctgatggggtctcctattccagggaataagccaaattaacactaaaaacggatcaaagctcccacgccagtccactagggccccagtagttgacagccttgctcctctcccaagttctccttcagaacctagttgcttttattcttccagctaccacttgggcacttcacagccagcctagggtcttcggcacctccaagagctgaatctccctccaacccttcttgcctactcctcactgccagctgggacctaggctcagtcctgtgtggtgcccatgatccttctggtgggggaagagtttaagttatagggcatttggctcaaattttaaaaggccttttgtttacctatatttctggaggctcctgtattctagaacccaatctctcacctgcttggttgcaaggctcatatttttttgtacctttcctatagattctgtagcatttgagtgtggcaatattttaattgtgtatagatttctaagaaccaacactactcagtctcctgctagtctgactcctgaagcatcagcccttgtcatactgtattgactgtgtacgtgcctttcaccttgagcatgcttcaggatttttttttaaaccacagaacttgaatacatgagggaaccagagttcaaagtcctatgcaaccttaggagggggttagagagtctgttttgattgatgttttctgaggccctagaggagtttgtatcaatttgtgagtattaatgtcagtactaccagcactttgccaaaactgtcagagggacccgtttctagagtgagtcccagttacatcaaacagtgacttccagttattccccagtaagtctgagtggttccttcaagctgggtgtctttccagcctttgccagtctagccccagcagggcaccgtgtatgaatgcagtttggtgctgttttagagtatgcctgctccccagccccctgccacctagttccacatggaaccaacaagttgagtgcatccctgttgggtgttttgtgttgagactggctgaaatgaggagactttgaccatgtgacgtgtcaacagactcaaggagacaaccacctcaactgggtcatgtggcatgcctgtgtatgtgtgtaacagaattctgattgttagactgtaatgctattcctctatgggagaaaaaaattaatataaagaaaaacaaataaaaatatatttaaagcac

SEQ ID NO: 299392 - DNA, 3405 bp, Homo sapiens
cgcgccctccttgatggacgagagctggtttgttacccctcccgcctgttttacggcagaggggcctggactcggtcccgcccgcctccagagcagtcccctggaggacctcctcatcgagcaccccagcatgtccgtttacgtcaccggcagcaccatagtgctagagcccgggtccccttccccgctcccggacgcggccctgcctgacggcgacctcagcgaaggggaattgacgcccgcccgccgcgagccgcgggccgcgcgccacgccgctcctctcccagcgcgggcggcgctgctggagaaggcgggccaggtgcggcggctgcagcgggcccggcagcgggcagagcgccacgcgctgagcgccaaggcggtgcagcggcagaaccgagcccgcgagagccgtccgcgccggtccaagaaccagagcagcttcatctaccagccgtgccagcgccagttcaactactgagcgtccaccggccgcgccacgaaccccttgccgatcccgatccctgtcgggctcctccgactcctcgggctggacaccgaaacctcccttcttaaagcgtgtgaggttgggtgatagccgttccttccccgacaccctcaatttccccatctctgatcctctaatctgcctctgaacccattcacccttcaccctcactcctggtccccatacccagcatctaatcatccatgccccctactcctggcccctccatcctttcttctctggtccccatccctgtctctccctttcacccttgccctccagtcctctacctctggcctgcccctatttctgaaagcttcttccagtccctgatctggctcattccccaccttcaactcccaccttacatgtctcacactatcccatggttggcattacactcactcctgttcccttattcttcattcccagtaattccctaccaaatggtggggaccctgagcccagctctgaccaggtagagcctgtgcagcctgggctgctgtcattgccctccagtaagggctcagggttttgcttttagtctccccttccttctgccttgggggcggtactctgtggagctgcttaggcctggaaaggtacagtatgtagaagaggactgtgagacgtgagttagagggagaagatggagggaatctagggaacgaggcagcctattggagatgcggacaggacagacacgttgagaagctgcagggagcagggcaccaagggagtgtgcactgtgcttgctcagagaggccaaaccctgctcccaggctgaagcctggagtctgcccccacttcccttttctataatccacccttctgcaggccctgaaatctgaagggcttagttagtaccttgccactctacccccaacacgtcacccgagtagaagctgggcaaggccctaccatcctggccgtctgttcacaagcccaaggtgctagaactagcttaggagacatgcaggccacagggcttctaggcagggaaagggcacacaccctaggtcagcgtgcagagcagtgatgctggaggacacaccatggggtgaagccatcccaaggctgacagctcagtcttcaccttgcctctggccttgtatttcacaccctgctcagtatggctagccagcagtcctgagtaggagtccaggactcccactgtctcaatctgcaaattgttcctatccaggttcagggccttcagggggcctcttttcattttctcccacaggcctctctttctttctaggttgctggggagaaatgggtaccctatgatccccctccccttctcctccagtaaatacctggaagagggaacctgaatccctgggggagacagaaggggcaggggccaccagcctccccttcttgtggtgagactgaattttgggctcagacaccagcaacagcctcttgggatgccctgagttgcttcccatttcctctttctagccgtccttttctagtgtgtgctcactcttcctaggaacttttaagacttcttggtacctatgaacataggtcctcccctcaccccaactctaggtttccaggcctcacagccaagctgaagcttggagaaaactctgcattcccatgagggcaaaggcagctgccctccctgaccctatagccccaggcctcatggggggtatgtggggaagggatggggtatccccatggatgctgggatgaggacagaggaagacctgatggggtctcctattccagggaataagccaaattaacactaaaaacggatcaaagctcccacgccagtccactagggccccagtagttgacagccttgctcctctcccaagttctccttcagaacctagttgcttttattcttccagctaccacttgggcacttcacagccagcctagggtcttcggcacctccaagagctgaatctccctccaacccttcttgcctactcctcactgccagctgggacctaggctcagtcctgtgtggtgcccatgatccttctggtgggggaagagtttaagttatagggcatttggctcaaattttaaaaggccttttgtttacctatatttctggaggctcctgtattctagaacccaatctctcacctgcttggttgcaaggctcatatttttttgtacctttcctatagattctgtagcatttgagtgtggcaatattttaattgtgtatagatttctaagaaccaacactactcagtctcctgctagtctgactcctgaagcatcagcccttgtcatactgtattgactgtgtacgtgcctttcaccttgagcatgcttcaggatttttttttaaaccacagaacttgaatacatgagggaaccagagttcaaagtcctatgcaaccttaggagggggttagagagtctgttttgattgatgttttctgaggccctagaggagtttgtatcaatttgtgagtattaatgtcagtactaccagcactttgccaaaactgtcagagggacccgtttctagagtgagtcccagttacatcaaacagtgacttccagttattccccagtaagtctgagtggttccttcaagctgggtgtctttccagcctttgccagtcatagcccccttctactactttccctctcgccctgccacctagttccacatggaaccaacaagttgagtgcatccctgttgggtgttttgtgttgagactggctgaaatgaggagactttgaccatgtgacgtgtcaacagactcaaggagacaaccacctcaactgggtcatgtggcatgcctgtgtatgtgtgtaacagaattctgattgttagactgtaatgctattcctctatgggagaaaaaaattaatataaagaaaaacaaataaaaatatatttaaagcac

SEQ ID NO: 299393 - DNA, 946 bp, Homo sapiens
ttgttaatttatcagaatctatttcagatttataataactttattacagtgagttatttagttactactaaatagctctgaactctcttctccctttttgtgctattattgttatacatattacatctatacatgctgtaagcccaacaatacattgttatatttttcctgtaattgtatgtatattaagcaagcagagacttgagaacaaattatatttatagagtttcttctagtaagcttttaatttaccatttctggttatgttcattttgtcttgtaaatttgagtcaccatctggtgtgatttcttactccagtactactttgttcttatttacctcctttgtgttgtcattgtcaaatatgtcacatttgtatatgttctgggtctaaagcataattacatgatattttatacaattgctctttaagagaaggaagaaatgcatttatactgtctttcataattacataattacatttaccagtgcccttttttttttggaatggattcaaattagtatctggggtcacttcattccaggcagaagtcctttttttaatatatttttatataaggcaaatctgatagggacaaatctttagtttttgtttatatgggctatctttattttaccttctttgagatagttttgctaaatataaaactcctggtgaaaagtttctgtttctgtttttgttttctcagcatctgctgagatgccagctataaagcttaatgaggtttccttctacaagacaaatcgtttttctgtttctgctttcaaaaacaaatggtttcccccctgccccagatttcgtactatgatgtatctgggtgtgagtctgtatttattctgcttggaatttgttgagcttcttgggtatgtagatgaatgattttttttaagaaaaatattaaatttgggatgtttgagccatta

SEQ ID NO: 299394 - DNA, 9764 bp, Homo sapiens
  misc_feature (2424)..(2424): n is a, c, g, or t
  misc_feature (2554)..(2554): n is a, c, g, or t
gcggccgccaggtgctcctggagtgcagcgcctatcgccggggcgtgtgggggccacaccgagcaccagcttctccgacgccgggaagccgctgtcgccgccgctacctctccctgttgccgccgcctcagatctcttcatgccgctgtaagctcggaggccaaggatgcggagtaggcttcccccagcgcttgccgccctgggcgcggccctactcctgtcttccattgaggcagaagttgacccaccttcagacttgaattttaaaattatagatgaaaatactgttcatatgtcatgggcaaaaccagttgatccaattgtgggttacagaataacggtggaccctacaacggatgggcctactaaagaatttaccctttcagctagtaccactgaaactttattgtcagaacttgtacctgaaacagagtatgtggtgacaataacttcatatgatgaagtagaagaaagtgtaccagttataggacaactaacaattcaaacaggtagttcgacaaagccagtggagaagaaacctggaaaaaccgagatacaaaaatgctctgtcagtgcctggactgatttggttttcctcgtggatggctcttggagtgtgggaagaaataatttcaagtacattttagacttcattgctgctcttgtgtctgcttttgacattggggaagagaagacaagagttggagttgttcaatacagctctgacaccaggactgaatttaacttaaatcagtactaccaaagggatgaacttcttgctgcaataaaaaaaattccatataaaggtggcaacacaatgacaggggatgccattgattatttagttaaaaatactttcacggaatctgctggggcaagagttggctttcctaaagtggcaattattattacggatggaaaatcccaggatgaagtggaaattccagcaagagagcttcgtaatgttggagttgaagttttctccttgggcattaaagctgcagatgcaaaagaactcaaacaaattgcctccacaccttcactgaaccatgttttcaatgtggccaactttgatgcaattgtggatattcagaatgagatcatctcccaggtgtgctcaggtgttgatgaacaacttggtgaattggttagtggagaagaagttgttgagcctccttcaaatttgattgccatggaagtctcttcaaaatatgttaagctaaattggaatccatctcctagtccagtgactggctacaaagtcatcctcacaccaatgactgcaggaagccgacagcacgctctgagtgtggggcctcagacaaccacgctcagtgttcgcgacctctcagcagacacagaataccagatcagtgtttccgccatgaagggaatgacatccagtgaacccatttcaataatggagaagactcagccaatgaaagttcaagtggaatgctcacgtggtgtggatataaaagccgatattgtgtttttggttgatggctcctatagcattgggattgcaaactttgttaaagttagagcctttttggaagttcttgtaaaaagttttgaaatttcaccaaatagggtccagattagtcttgtgcaatacagccgggatcctcatactgagttcactttgaaaaaattcaccaaagttgaagatataattgaagcaataaacaccttcccttacagaggaggatctacaaatactggcaaagcaatgacttatgtcagagagaaaatatttgtgcctagcaagggatcaagaagcaatgtgccaaaggtcatgattcttatcacggatgggaaatcatcagatgctttcagagatcctgcgataaaactgaggaattcagatgttgaaatctttgcagttggtgtgaaggatgccgttcgctcagaattggaagctattgcctctcctcctgcagagacccatgtgttcacagtggaagattttgatgcttttcagaggatatcttttgaactcacacagtctatctgccttagaattgagcaagaattggcagctataaagaagaaagcttacgtccctccaaaggatcttagtttttcagaagtgacttcttatggtttcaaaaccaactggtctccagctggagaaaatgttttttcatatcacatcacctacaaggaagcggctggggatgatgaggtcactgtggtggagccagcatcgagcaccagtgttgttctcagcagcctgaagccagagaccttgtatttggtcaatgtgactgcggagtatgaggatggcttcagcattcccttagctggagaggagaccaccgaagaagtaaaaggagcacctcgaaacctaaaggtgacagatgagactacagatagtttcaaaattacttggactcaagctccagggagagttttaagatntcgaattatatatagaccagttgctggtggagagagcagagaagttaccaccccacccaatcagaggaggagaacactggagaacttgattccagacacgaaatatgaagtatctgtaattcctgaatanttctcaggacctggtactccattaactggaaatgcagccactgaagaagttagagggaatccaagagacttaagagtttctgaccctacgacgtctactatgaaattatcttggagtggggcaccaggaaaagtgaaacagtatctcgtcacatataccccagtggcagggggtgaaactcaagaggtcactgtgaggggagatacaaccaatacggtgctgcagggattgaaggaagggacacaatacgccttatctgtgacagcactgtatgcgtctggggctggcgacgccctctttggtgaaggaacaacacttgaagaacgtggttctcctcaagatttagttactaaagacatcactgacacatcaattggggcttattggacatctgctccaggaatggttcgcggttacagggtctcatggaaatcactttatgatgatgttgacactggagagaaaaatctgcctgaagatgcaattcatacgatgatagaaaatctgcagccagagaccaaatacagaatttcagtatttgccacttacagcagtggagaaggagaacctttgactggagatgccacaactgaattatctcaagattccaaaaccctgaaagtagatgaagaaacagaaaacacaatgagagttacatggaaaccagcaccagggaaagtcgtcaactaccgtgttgtctatcgccctcatgggagagggaagcaaatggttgctaaggtgccccccacagtcacttcgacagtgttaaagcgacttcagccacagaccacatatgacatcacagttcttcctatttacaagatgggagaaggaaagcttaggcaaggatcaggaacaacagcttctcggtttaagtctcctagaaacctcaaaacatctgacccaaccatgtcaagcttccgagtgacttgggagcctgcccctggggaagtgaagggttataaagtcacattccaccctacgggggatgacagaagactgggggagttagtggttggaccctatgacaacacagttgttttggaggaacttagggctggtaccacctataaagtaaatgtttttggaatgtttgatggaggagaaagctcaccacttgttggacaagaaatgacaaccctttccgacacaactgttatgccaattttatcttctgggatggagtgtctcaccagagctgaggcagacattgtgttgctggtggatggatcatggagcatcggccgggcaaattttagaaccgtgaggagtttcatttctcgtattgtggaagtctttgacattggccccaaaagagtacaaattgctcttgctcagtatagtggggatcccagaacagagtggcagttaaatgcacacagagacaagaagagcttgttgcaagctgtggcaaacttgccgtacaaaggaggcaatactctcacaggcatggctttgaatttcattcgccaacagaacttcaggacccaagctggcatgagacctcgagctcgaaaaattggtgtgctcattactgatggaaaatcacaagacgatgttgaagcaccttcaaagaaactcaaggatgagggagtggagctgtttgctattggtattaaaaatgctgatgaagtcgaattaaagatgattgcaactgatcctgatgatacccatgactacaatgtggcagattttgagtcactctccaggatagtggatgatctcaccattaatttgtgtaacagtgtcaaaggtccaggtgatttggaagcaccttctaacttagttatttctgagcgaacccatcgttcttttagagtgagctggacaccaccttctgacagtgtggatcgatataaggtggaatactatccagtttctggagggaaacgtcaagaattttatgtgagtcgaatggaaactagcacagtgctgaaagatctgaaacctgaaactgaatatgttgtcaatgtgtattctgtggtagaagatgaatatagtgagcctctgaaggggacagaaaaaaccttgccagtgcctgtagtcagcctgaatatttatgatgttggccctaccaccatgcatgtgcagtggcagcctgtgggaggagctactggctacatcttgtcatacaaacctgttaaggacacagagccaacaagacccaaagaggtgcgtttggggccaacagtgaatgacatgcagctgactgaccttgttcccaacacggagtatgcagtcacagtccaggctgtcctgcacgacctcactagtgaacctgtcactgttcgggaagtcaccttgcctttacccagacctcaggatctgaaactcagagatgtgactcacagcactatgaatgtcttttgggaacctgtgcctggaaaagtgcgtaaatatattgttcgatacaaaacaccagaagaggatgtcaaagaggtagaggtggacagatcagagaccagcacttccctcaaagacctcttctcacagaccttgtacacagtcagcgtttctgcagtacatgacgagggggagtctcctccagtgactgctcaagaaactacccgacccgtgccagccccaacaaacttaaagattactgaagtaacatcagagggtttcagagggacttgggatcatggagcttcagatgtgtctctctacagaataacttggggaccttttggaagctcagataagatggagaccatcttaaatggagatgaaaacactttggtgttcgaaaacctgaaccccaacaccatctatgaagtttccattactgccatctatcctgatgagtcagaaagtgatgacctgattggcagtgagcgcacactgcctatcttaacaacacaagctcccaaaagtgggccacgaaaccttcaagtgtacaatgcaacatctaacagcctgactgttaagtgggatcctgctagtggtcgtgtgcagaaatataggatcacttatcagccttccacaggggaaggcaatgagcaaacgaccacaataggaggacggcagaacagtgtggtcctgcagaaactgaagccagacactccttacactatcaccgtatcctctctgtatcctgatggtgaaggaggtcggatgacgggaagaggcaagaccaaacctctaaacactgtaaggaacctgagagtgtatgacccttctaccagcacctctgaatgtccgctgggaccatgcagagggaaatcctcgtcagtacaagctcttctatgcaccagcagcaggtggtccagaggaactggtaccaatccccgggaataccaattatgccattcttaggaatctgcagccagatacctcatacactgtgactgtagttcccgtttatactgaaggtgatgggggacgcacatcagatactggaaggacattgatgagaggactggcaagaaatgtccaagtatacaatcctacacctaacaggctcggtgttcgctgggaccctgcaccaggacctgtgctgcaatatcgcgttgtgtattctcctgtggatggcacaagaccctcagaatctatagtagtgccaggaaacacgcgcatggtgcatctggagcggctgattccggacacactctattccgtgaaccttgtggctctgtactcggatggagagggaaatcccagccctgcccagggccgaacgctaccacgcagtggaccaaggaacctgagagtctttggtgaaacaaccaatagcctctcggtagcctgggatcatgctgatgggccagttcagcagtacaggatcatctattctcccactgttggtgatccaattgatgaatataccacagtcccaggcagaagaaacaatgtaatactgcagcccctgcaacctgacactccatataaaattactgttattgctgtttatgaagatggagatggtggccatctaacaggaaatggaagaactgtgggactccttcctcctcagaacatacacatctctgacgaatggtatacaagattcagggtgtcctgggatccttcaccttctccagttcttggatataaaatagtatataagccagtgggttccaatgagcccatggaagcctttgttggagaaatgacatcatataccttacacaatctcaatcccagcaccacctacgatgtgaatgtttatgctcaatatgattctggactcagtgtccccttgacagatcaaggcactacattatatttaaatgtaacagatctgaaaacttaccagattgggtgggatacattctgtgtcaaatggtcacctcaccgggcagccacctcctacaggctaaaactaagccctgcagatggaacaaggggacaagaaattacagtgcgtggatcagaaaccagtcactgcttcactggcctttcaccagacactgattatggtgtcactgtttttgtgcagacaccaaatctcgagggaccaggagtctctgttaaagaacataccactgtgaaaccaacagaagcccctacagagccacccacacctcctccccctcccaccattccaccagcccgggatgtatgcaaaggggccaaggcagatattgtgttcttgactgatgcctcctggagcattggggacgataattttaacaaagttgtaaaattcatcttcaatactgtgggaggctttgatgaaatcagtcctgctgggattcaggtttcatttgtgcaatacagcgatgaggtcaagtctgagttcaagctgaacacgtacaatgacaaggccctagcccttggggccctccagaatattaggtacagaggaggaaacacaagaacaggcaaggccctcacgtttatcaaggagaaagtcttgacttgggagagcggcatgaggaagaatgtccctaaggtgttggttgtggtcacggacggtcggtcccaggatgaggtcaagaaggcggctttggtcatccagcagtcagggttcagtgtctttgtagttggtgtggctgatgtcgactacaatgagcttgccaacattgccagcaaaccaagtgaacggcacgtgttcattgtggacgactttgaatcttttgagaagatcgaagacaatcttattacatttgtttgtgaaactgccacttcaagttgtcctctcatttatttggatggctacacctcaccaggttttaaaatgcttgaagcatacaacctgacagaaaagaattttgcttctgtacaaggagtatctttggagtcagggtctttccccagctactcagcatacaggattcagaagaatgcgtttgtgaatcagcctacagcagacctacacccaaatggactccctccttcatacacgattatattattattcagacttctcccagaaactcccagtgacccttttgcaatttggcaaatcacagacagagactacaaaccacaagttggagtgattgcagatccttctagcaagacgttatcattctttaacaaggatacaagaggcgaggtgcaaactgttacatttgacacagaagaagtaaagacattattttatggaagttttcacaaggttcatattgtagtgacctcaaaaagtgttaagatttacattgactgctatgaaattatagaaaaagacatcaaggaagctggaaatataacaactgatggttatgaaattcttggaaaactccttaaaggggaaaggaaatcagccgcattccaaatccagagttttgacattgtctgcagtccagtgtggaccagtagagacagatgctgtgatattccctctaggagagatgagggaaaatgccctgcttttccaaattcttgcacatgtacacaggacagcgttggacctccaggacctccaggccctgcaggaggacctggtgctaaaggtcccagaggtgaaagaggtatcagtggggcaattgggccccctggtcctcgtggagacataggtcctccaggcccccagggtcctccaggccctcagggacccaatggactctctattccgggagagcaaggtcgccaagggatgaaaggtgatgctggagagccaggacttccaggccgaacaggaaccccaggattacctggcccaccaggaccaatgggacctccaggagacagaggcttcactggaaaagacggtgcaatgggacccaggggcccaccagggcggccgggaagcccaggctccccaggagtcacaggaccaagtgggaagccaggaaaacctggagatcatggcagaccaggtccatctgggttgaaaggagaaaaaggtgataggggagacattgcttcccagaacatgatgcgagcagttgcaagacaagtctgtgaacaattgataagtggtcagatgaacagattcaatcagatgctgaatcagattccaaatgattaccagtccagtcgcaaccagccaggcccgccgggtccaccgggacctcctggtagcgcaggagccagaggagaacctgggcctggggggcggccaggcttcccgggcacaccagggatgcagggaccccctggggaacgaggtttgccaggagagaaaggtgaaaggggtactggatcttcaggacctcgggggctgcctgggcccccaggtccacaaggagaatccagaacaggtccaccagggtccacaggttcaagaggtccccctggcccccctggccgtcctggaaactcaggtatccgaggacccccaggtcctcctggatactgtgattcttctcagtgtgccagcatcccatacaacgggcaaagctatccaggttccggctaacacattttctaagtcgccagtgctgcttacagtttgaatacatgaaaatcctgtttctgagatgtttgcgcacgtgcttattaggaaatgagtctgtatggaaatctcaccacagataatggttaacgaaccgggtcgacatcacaaaggagggtggagactctttttactaacttgaatgagacaaaagcagtggtgtcagtttataatcctgatgcatttcagtaataatgtagaaaaacattattttaaaaaagttccaacacacagccatgaggagcctcagttttgaaagaggtgcataataaaactactaaccagaggagtctatgccattttaagaaaaacaattaacctggttaaagagaaatgtcttatgtaaataataaactaattgtggcttgt

SEQ ID NO: 299395 - DNA, 2289 bp, Homo sapiens
  misc_feature (980)..(980): n is a, c, g, or t
  misc_feature (1125)..(1125): n is a, c, g, or t
atgctatataaaattttcttgaaatataattggtgatgacactggcattttcctttgttgtcataatcaggaacaaggggacaagaaattacagtgcgtggatcagaaaccagtcactgcttcactggcctttcaccagacactgattatggtgtcactgtttttgtgcagacaccaaatctcgagggaccaggagtctctgttaaagaacataccagtaagtttttgaggaatctggaaagctttcataaggctttagaatagaatgctctaggtaaggaagacttaagtgaatcctgtgcaggtacctctccgtaggggtagcaataatgatgggatgatggcagattcctgaatgtggagtctaaagctggttcaggacctttttctgtagcaatttgcaagttgtccctgttattgagttggtgctactttgaggaagggctaaaggagggagagatggctctcgctgagaaggtgaattcatattagtgacttttactcatttgaccctatctgaaggccttacattttccctttagatctttattttctgtagctgtagtggatgttgaatgactaccagtgacatcaatttggatggaataaaatccccagcatgtcagtaccgatgacaatggtgtctcattttgtacaacttgatttggtatccaggatttaaattgctcttaaaatttactttctgggatatcaaatgtgcacatggtgtgtttttataattattatttttaaattttagctgtgaaaccaacagaagcccctacagagccacccacacctcctccccctcccaccattccaccagcccgggatggtaagtacagctaaataggcaatacgttcagctgatagggagttacagacttcttatttacgctgcatgtgcatcatttacaattaatatagaacatttctgatctattattgctgctgaagagtttttagattgaaagaaaagntaaccagtaatttgtttctctccatctctgggcacattttggtgtgaataaaatcagtcataaattattccagatcttcagctggaagtctgtttcctcagttttacagatttaggtcttccatggtccatagttacatggtggncatttctttctgctagctgctggcatcagtaagcgctgtgaacccttttggctatatttgcgaccgaagccctgaggctgttggctttaaaattcctggtgtccaacctgagaagttccctggattatacaatgctaaaaaattttccattcaccaaaatttgaaagataattgtaacttgcagtgaactggtgaaacgacatactgatttattaaggttgatctctcagcatttgagggcaattctctagcactttgtcaaattaaatttagttaaataactactgtattattcttttctcatatgctgtttccagcatttaatagaaagcatttcagatatttttattttatcttagaaggatgtcgaacgttacaacttcgttaaacctattatataagtaaaattaaaaattaaaagtgtattattgtggggtaaaataataatggattcctttaaattagatacagaaagaaattcagtaaataatcttggtttaaaaacaagttttttctttttaaataggctttattttctagagtagttttaggttcatagcaacattgcagggatgatgcagagatttttcatctcccagacagactgcccttccccacacatgcccagcctcctccactattaacatcccacatctgagtggtacgtttgttacaaccgatgaacctacattgacacatcatcaccacccaaagtccacagtttgcgttagggttcactcttggtgttatacttctatatgctaagtttttataaactaaaattttgttaattgtttttggaattttttcttagcctctaagtctagatattccaataaaaatcttctcctttcctgcatatgattctagtggcttaatttaaattttacaaaggacttggccaggtgcggtggctcacgcctgtaatcccagcactttgggaggccgggacaggtggatcgagaccatcatggccaacatggttaaacccgtctctgctaaaaatagagaaattagctgggcgtggtggcacatgcctgtagtcccagctactcaggaggctgaggcaggagaatcacttgaacctgggaggtggagtttgcagtgagccaagatcatcacaccactgcactccagcctgaagacagagcaagaccctgtcta

SEQ ID NO: 299396 - DNA, 506 bp, Homo sapiens
gtggaatgaaaggaactagactgatggtctgcttttctgttttggaagtgccagtgcctgtagtcagcctgaatatttatgatgttggccctaccaccatgcatgtgcagtggcagcctgtgggaggagctactggctacatcttgtcatacaaacctgttaaggacacagagccaacaagacccaaagaggtgcgtttggggccaacagtgaatgacatgcagctgactgaccttgttcccaacacggagtatgcagtcacagtccaggctgtcctgcacgacctcactagtgaacctgtcactgttcgggaagtcaccttgcctttacccagacctcaggatctgaaactcagagatgtgactcacagcactatgaatgtcttttgggaacctgtgcctggaaaagtgcgtaaatatattgttcgatacaaaacaccagaagaggatgtcaaagaggtaggttgaagatgatagtagatatgaaaatatttgttttcctagtag

SEQ ID NO: 299397 - DNA, 129 bp, Homo sapiens
gcacgagccaactacttttgataactaagaaattttatattttaactgcagattgtgaatttcactgccttatattatttatttctgaaacaaaagaggcatttttcaataaaactactgaaaatttga

SEQ ID NO: 299398 - DNA, 11581 bp, Homo sapiens
  misc_feature (2424)..(2424): n is a, c, g, or t
  misc_feature (2554)..(2554): n is a, c, g, or t
gcggccgccaggtgctcctggagtgcagcgcctatcgccggggcgtgtgggggccacaccgagcaccagcttctccgacgccgggaagccgctgtcgccgccgctacctctccctgttgccgccgcctcagatctcttcatgccgctgtaagctcggaggccaaggatgcggagtaggcttcccccagcgcttgccgccctgggcgcggccctactcctgtcttccattgaggcagaagttgacccaccttcagacttgaattttaaaattatagatgaaaatactgttcatatgtcatgggcaaaaccagttgatccaattgtgggttacagaataacggtggaccctacaacggatgggcctactaaagaatttaccctttcagctagtaccactgaaactttattgtcagaacttgtacctgaaacagagtatgtggtgacaataacttcatatgatgaagtagaagaaagtgtaccagttataggacaactaacaattcaaacaggtagttcgacaaagccagtggagaagaaacctggaaaaaccgagatacaaaaatgctctgtcagtgcctggactgatttggttttcctcgtggatggctcttggagtgtgggaagaaataatttcaagtacattttagacttcattgctgctcttgtgtctgcttttgacattggggaagagaagacaagagttggagttgttcaatacagctctgacaccaggactgaatttaacttaaatcagtactaccaaagggatgaacttcttgctgcaataaaaaaaattccatataaaggtggcaacacaatgacaggggatgccattgattatttagttaaaaatactttcacggaatctgctggggcaagagttggctttcctaaagtggcaattattattacggatggaaaatcccaggatgaagtggaaattccagcaagagagcttcgtaatgttggagttgaagttttctccttgggcattaaagctgcagatgcaaaagaactcaaacaaattgcctccacaccttcactgaaccatgttttcaatgtggccaactttgatgcaattgtggatattcagaatgagatcatctcccaggtgtgctcaggtgttgatgaacaacttggtgaattggttagtggagaagaagttgttgagcctccttcaaatttgattgccatggaagtctcttcaaaatatgttaagctaaattggaatccatctcctagtccagtgactggctacaaagtcatcctcacaccaatgactgcaggaagccgacagcacgctctgagtgtggggcctcagacaaccacgctcagtgttcgcgacctctcagcagacacagaataccagatcagtgtttccgccatgaagggaatgacatccagtgaacccatttcaataatggagaagactcagccaatgaaagttcaagtggaatgctcacgtggtgtggatataaaagccgatattgtgtttttggttgatggctcctatagcattgggattgcaaactttgttaaagttagagcctttttggaagttcttgtaaaaagttttgaaatttcaccaaatagggtccagattagtcttgtgcaatacagccgggatcctcatactgagttcactttgaaaaaattcaccaaagttgaagatataattgaagcaataaacaccttcccttacagaggaggatctacaaatactggcaaagcaatgacttatgtcagagagaaaatatttgtgcctagcaagggatcaagaagcaatgtgccaaaggtcatgattcttatcacggatgggaaatcatcagatgctttcagagatcctgcgataaaactgaggaattcagatgttgaaatctttgcagttggtgtgaaggatgccgttcgctcagaattggaagctattgcctctcctcctgcagagacccatgtgttcacagtggaagattttgatgcttttcagaggatatcttttgaactcacacagtctatctgccttagaattgagcaagaattggcagctataaagaagaaagcttacgtccctccaaaggatcttagtttttcagaagtgacttcttatggtttcaaaaccaactggtctccagctggagaaaatgttttttcatatcacatcacctacaaggaagcggctggggatgatgaggtcactgtggtggagccagcatcgagcaccagtgttgttctcagcagcctgaagccagagaccttgtatttggtcaatgtgactgcggagtatgaggatggcttcagcattcccttagctggagaggagaccaccgaagaagtaaaaggagcacctcgaaacctaaaggtgacagatgagactacagatagtttcaaaattacttggactcaagctccagggagagttttaagatntcgaattatatatagaccagttgctggtggagagagcagagaagttaccaccccacccaatcagaggaggagaacactggagaacttgattccagacacgaaatatgaagtatctgtaattcctgaatanttctcaggacctggtactccattaactggaaatgcagccactgaagaagttagagggaatccaagagacttaagagtttctgaccctacgacgtctactatgaaattatcttggagtggggcaccaggaaaagtgaaacagtatctcgtcacatataccccagtggcagggggtgaaactcaagaggtcactgtgaggggagatacaaccaatacggtgctgcagggattgaaggaagggacacaatacgccttatctgtgacagcactgtatgcgtctggggctggcgacgccctctttggtgaaggaacaacacttgaagaacgtggttctcctcaagatttagttactaaagacatcactgacacatcaattggggcttattggacatctgctccaggaatggttcgcggttacagggtctcatggaaatcactttatgatgatgttgacactggagagaaaaatctgcctgaagatgcaattcatacgatgatagaaaatctgcagccagagaccaaatacagaatttcagtatttgccacttacagcagtggagaaggagaacctttgactggagatgccacaactgaattatctcaagattccaaaaccctgaaagtagatgaagaaacagaaaacacaatgagagttacatggaaaccagcaccagggaaagtcgtcaactaccgtgttgtctatcgccctcatgggagagggaagcaaatggttgctaaggtgccccccacagtcacttcgacagtgttaaagcgacttcagccacagaccacatatgacatcacagttcttcctatttacaagatgggagaaggaaagcttaggcaaggatcaggaacaacagcttctcggtttaagtctcctagaaacctcaaaacatctgacccaaccatgtcaagcttccgagtgacttgggagcctgcccctggggaagtgaagggttataaagtcacattccaccctacgggggatgacagaagactgggggagttagtggttggaccctatgacaacacagttgttttggaggaacttagggctggtaccacctataaagtaaatgtttttggaatgtttgatggaggagaaagctcaccacttgttggacaagaaatgacaaccctttccgacacaactgttatgccaattttatcttctgggatggagtgtctcaccagagctgaggcagacattgtgttgctggtggatggatcatggagcatcggccgggcaaattttagaaccgtgaggagtttcatttctcgtattgtggaagtctttgacattggccccaaaagagtacaaattgctcttgctcagtatagtggggatcccagaacagagtggcagttaaatgcacacagagacaagaagagcttgttgcaagctgtggcaaacttgccgtacaaaggaggcaatactctcacaggcatggctttgaatttcattcgccaacagaacttcaggacccaagctggcatgagacctcgagctcgaaaaattggtgtgctcattactgatggaaaatcacaagacgatgttgaagcaccttcaaagaaactcaaggatgagggagtggagctgtttgctattggtattaaaaatgctgatgaagtcgaattaaagatgattgcaactgatcctgatgatacccatgactacaatgtggcagattttgagtcactctccaggatagtggatgatctcaccattaatttgtgtaacagtgtcaaaggtccaggtgatttggaagcaccttctaacttagttatttctgagcgaacccatcgttcttttagagtgagctggacaccaccttctgacagtgtggatcgatataaggtggaatactatccagtttctggagggaaacgtcaagaattttatgtgagtcgaatggaaactagcacagtgctgaaagatctgaaacctgaaactgaatatgttgtcaatgtgtattctgtggtagaagatgaatatagtgagcctctgaaggggacagaaaaaaccttgccagtgcctgtagtcagcctgaatatttatgatgttggccctaccaccatgcatgtgcagtggcagcctgtgggaggagctactggctacatcttgtcatacaaacctgttaaggacacagagccaacaagacccaaagaggtgcgtttggggccaacagtgaatgacatgcagctgactgaccttgttcccaacacggagtatgcagtcacagtccaggctgtcctgcacgacctcactagtgaacctgtcactgttcgggaagtcaccttgcctttacccagacctcaggatctgaaactcagagatgtgactcacagcactatgaatgtcttttgggaacctgtgcctggaaaagtgcgtaaatatattgttcgatacaaaacaccagaagaggatgtcaaagaggtagaggtggacagatcagagaccagcacttccctcaaagacctcttctcacagaccttgtacacagtcagcgtttctgcagtacatgacgagggggagtctcctccagtgactgctcaagaaactacccgacccgtgccagccccaacaaacttaaagattactgaagtaacatcagagggtttcagagggacttgggatcatggagcttcagatgtgtctctctacagaataacttggggaccttttggaagctcagataagatggagaccatcttaaatggagatgaaaacactttggtgttcgaaaacctgaaccccaacaccatctatgaagtttccattactgccatctatcctgatgagtcagaaagtgatgacctgattggcagtgagcgcacactgcctatcttaacaacacaagctcccaaaagtgggccacgaaaccttcaagtgtacaatgcaacatctaacagcctgactgttaagtgggatcctgctagtggtcgtgtgcagaaatataggatcacttatcagccttccacaggggaaggcaatgagcaaacgaccacaataggaggacggcagaacagtgtggtcctgcagaaactgaagccagacactccttacactatcaccgtatcctctctgtatcctgatggtgaaggaggtcggatgacgggaagaggcaagaccaaacctctaaacactgtaaggaacctgagagtgtatgacccttctaccagcacctctgaatgtccgctgggaccatgcagagggaaatcctcgtcagtacaagctcttctatgcaccagcagcaggtggtccagaggaactggtaccaatccccgggaataccaattatgccattcttaggaatctgcagccagatacctcatacactgtgactgtagttcccgtttatactgaaggtgatgggggacgcacatcagatactggaaggacattgatgagaggactggcaagaaatgtccaagtatacaatcctacacctaacaggctcggtgttcgctgggaccctgcaccaggacctgtgctgcaatatcgcgttgtgtattctcctgtggatggcacaagaccctcagaatctatagtagtgccaggaaacacgcgcatggtgcatctggagcggctgattccggacacactctattccgtgaaccttgtggctctgtactcggatggagagggaaatcccagccctgcccagggccgaacgctaccacgcagtggaccaaggaacctgagagtctttggtgaaacaaccaatagcctctcggtagcctgggatcatgctgatgggccagttcagcagtacaggatcatctattctcccactgttggtgatccaattgatgaatataccacagtcccaggcagaagaaacaatgtaatactgcagcccctgcaacctgacactccatataaaattactgttattgctgtttatgaagatggagatggtggccatctaacaggaaatggaagaactgtgggactccttcctcctcagaacatacacatctctgacgaatggtatacaagattcagggtgtcctgggatccttcaccttctccagttcttggatataaaatagtatataagccagtgggttccaatgagcccatggaagcctttgttggagaaatgacatcatataccttacacaatctcaatcccagcaccacctacgatgtgaatgtttatgctcaatatgattctggactcagtgtccccttgacagatcaaggcactacattatatttaaatgtaacagatctgaaaacttaccagattgggtgggatacattctgtgtcaaatggtcacctcaccgggcagccacctcctacaggctaaaactaagccctgcagatggaacaaggggacaagaaattacagtgcgtggatcagaaaccagtcactgcttcactggcctttcaccagacactgattatggtgtcactgtttttgtgcagacaccaaatctcgagggaccaggagtctctgttaaagaacataccactgtgaaaccaacagaagcccctacagagccacccacacctcctccccctcccaccattccaccagcccgggatgtatgcaaaggggccaaggcagatattgtgttcttgactgatgcctcctggagcattggggacgataattttaacaaagttgtaaaattcatcttcaatactgtgggaggctttgatgaaatcagtcctgctgggattcaggtttcatttgtgcaatacagcgatgaggtcaagtctgagttcaagctgaacacgtacaatgacaaggccctagcccttggggccctccagaatattaggtacagaggaggaaacacaagaacaggcaaggccctcacgtttatcaaggagaaagtcttgacttgggagagcggcatgaggaagaatgtccctaaggtgttggttgtggtcacggacggtcggtcccaggatgaggtcaagaaggcggctttggtcatccagcagtcagggttcagtgtctttgtagttggtgtggctgatgtcgactacaatgagcttgccaacattgccagcaaaccaagtgaacggcacgtgttcattgtggacgactttgaatcttttgagaagatcgaagacaatcttattacatttgtttgtgaaactgccacttcaagttgtcctctcatttatttggatggctacacctcaccaggttttaaaatgcttgaagcatacaacctgacagaaaagaattttgcttctgtacaaggagtatctttggagtcagggtctttccccagctactcagcatacaggattcagaagaatgcgtttgtgaatcagcctacagcagacctacacccaaatggactccctccttcatacacgattatattattattcagacttctcccagaaactcccagtgacccttttgcaatttggcaaatcacagacagagactacaaaccacaagttggagtgattgcagatccttctagcaagacgttatcattctttaacaaggatacaagaggcgaggtgcaaactgttacatttgacacagaagaagtaaagacattattttatggaagttttcacaaggttcatattgtagtgacctcaaaaagtgttaagatttacattgactgctatgaaattatagaaaaagacatcaaggaagctggaaatataacaactgatggttatgaaattcttggaaaactccttaaaggggaaaggaaatcagccgcattccaaatccagagttttgacattgtctgcagtccagtgtggaccagtagagacagatgctgtgatattccctctaggagagatgagggaaaatgccctgcttttccaaattcttgcacatgtacacaggacagcgttggacctccaggacctccaggccctgcaggaggacctggtgctaaaggtcccagaggtgaaagaggtatcagtggggcaattgggccccctggtcctcgtggagacataggtcctccaggcccccagggtcctccaggccctcagggacccaatggactctctattccgggagagcaaggtcgccaagggatgaaaggtgatgctggagagccaggacttccaggccgaacaggaaccccaggattacctggcccaccaggaccaatgggacctccaggagacagaggcttcactggaaaagacggtgcaatgggacccaggggcccaccagggcggccgggaagcccaggctccccaggagtcacaggaccaagtgggaagccaggaaaacctggagatcatggcagaccaggtccatctgggttgaaaggagaaaaaggtgataggggagacattgcttcccagaacatgatgcgagcagttgcaagacaagtctgtgaacaattgataagtggtcagatgaacagattcaatcagatgctgaatcagattccaaatgattaccagtccagtcgcaaccagccaggcccgccgggtccaccgggacctcctggtagcgcaggagccagaggagaacctgggcctggggggcggccaggcttcccgggcacaccagggatgcagggaccccctggggaacgaggtttgccaggagagaaaggtgaaaggggtactggatcttcaggacctcgggggctgcctgggcccccaggtccacaaggagaatccagaacaggtccaccagggtccacaggttcaagaggtccccctggcccccctggccgtcctggaaactcaggtatccgaggacccccaggtcctcctggatactgtgattcttctcagtgtgccagcatcccatacaacgggcaaagctatccaggttccggctaacacattttctaagtcgccagtgctgcttacagtttgaatacatgaaaatcctgtttctgagatgtttgcgcacgtgcttattaggaaatgagtctgtatggaaatctcaccacagataatggttaacgaaccgggtcgacatcacaaaggagggtggagactctttttactaacttgaatgagacaaaagcagtggtgtcagtttataatcctgatgcatttcagtaataatgtagaaaaacattattttaaaaaagttccaacacacagccatgaggagcctcagttttgaaagaggtgcataataaaactactaaccagaggagtctatgccattttaagaaaaacaattaacctggttaaagagaaatgtcttatgtaaataataaactaattgtggcttgtaaatgatttgtatgtgatcctgtcgactaaaatcacttaacaattctacaataagcttctgcatcaaagcctgccgcttgctctatgccggaataacaccaaatggaatctcctcatctcttgcttgttagcgatgtgtctgattcagggcatctgtctttttgttacttttttgtccgtgtcctctcatttgggttttgtaactgcaattttcaaaccaaagtttaaaatcaccttttcttcctgttttgctgtagtcactggtgttcctcacccaccagctgtaactcagtttgtgtgaggtacagccacagaagatgtcatgtactgtatattacctggtgatagttgcttttcaccccccgagttcagtttctaggagccaatgaaacttcccctcacctcctcatctttccaagttgttctttgaattgaggagtttgaaggcataaacagttacttggggatttgcgaaaatcctacttagttactgcgtttacagttctttggcccagtctctgacccttcccaagtatttgtgcaatgattgtgtttactgctggatttttgaaggtttttttttttaagaaagtgccatttcattatttgattatcaccaaattatctggaaataattgggacattgtaacttatctatttatagttatgagattaagactggagtgccatcaccgcgggtgatgatttagcttttgctgtgtgtgtgtgtgtgtgtgtgccttccaaatcatgccataattgtaatgttgaatcggacagagccttacgtgcccgaggcggggcctacctgcctgagcgcgacccttcatcgtgccggtggagcccgagcggacagcggaatacgaggactacggcgcagacgagcctgcagaggagcctcctgagccccaccggcgctggcggcggccctgccccacggacccgggcagtgaaccagagatcacgcgccgcgccgcgaggcttgggggaggtgttgaaattctcatttacaggtcagatagagcagtgtacgtcttttctgaggtgtttcttccagcgttgctcatccaggagtaccctttctgattgtagagaaccttgtttctgcaggaagcctagctccaagcacgcagtctgtagacatttttgcctttgcccttgaaatgcttgcaaaatactttgttaacaaaagctgcaaagagagaacatgccgtgtgcctttagttagcacagcgggcagcctcagtgaaactcttaggttaagcagttaagtcctggaacccagagctgctgtgtatttcgagcgggcagtttatcttttgctatacttattttcaattcaattacaccacgattcaaataattcccctcctaaaaccaaaaaggagggaaacgtcaactccattgcaattacttatcttcctcttctatctctgttatacgccggggcatagaatgctcgtatacatctctttaacaaccacaaaccttaagccatgtagatgaagttagtgcatcaacgggatacagttccatattgccttaaacctccttgttttagacacactaacatttataccaaattgcagattattctgcagagagggaattgcatgtttgtgttgtatatttagtatgaacttttttcagaatataatatttcttagttatcaaaagtagttggaaaacatttgcaagactatgaacatagaattgctgcttttatattttaactgcagattgtgaatttcactgccttatattatttatttctgaaacaaaagaggcatttttcaataaaactactgaaaatttga

SEQ ID NO: 299399 - DNA, 11549 bp, Homo sapiens
  misc_feature (2424)..(2424): n is a, c, g, or t
  misc_feature (2554)..(2554): n is a, c, g, or t
gcggccgccaggtgctcctggagtgcagcgcctatcgccggggcgtgtgggggccacaccgagcaccagcttctccgacgccgggaagccgctgtcgccgccgctacctctccctgttgccgccgcctcagatctcttcatgccgctgtaagctcggaggccaaggatgcggagtaggcttcccccagcgcttgccgccctgggcgcggccctactcctgtcttccattgaggcagaagttgacccaccttcagacttgaattttaaaattatagatgaaaatactgttcatatgtcatgggcaaaaccagttgatccaattgtgggttacagaataacggtggaccctacaacggatgggcctactaaagaatttaccctttcagctagtaccactgaaactttattgtcagaacttgtacctgaaacagagtatgtggtgacaataacttcatatgatgaagtagaagaaagtgtaccagttataggacaactaacaattcaaacaggtagttcgacaaagccagtggagaagaaacctggaaaaaccgagatacaaaaatgctctgtcagtgcctggactgatttggttttcctcgtggatggctcttggagtgtgggaagaaataatttcaagtacattttagacttcattgctgctcttgtgtctgcttttgacattggggaagagaagacaagagttggagttgttcaatacagctctgacaccaggactgaatttaacttaaatcagtactaccaaagggatgaacttcttgctgcaataaaaaaaattccatataaaggtggcaacacaatgacaggggatgccattgattatttagttaaaaatactttcacggaatctgctggggcaagagttggctttcctaaagtggcaattattattacggatggaaaatcccaggatgaagtggaaattccagcaagagagcttcgtaatgttggagttgaagttttctccttgggcattaaagctgcagatgcaaaagaactcaaacaaattgcctccacaccttcactgaaccatgttttcaatgtggccaactttgatgcaattgtggatattcagaatgagatcatctcccaggtgtgctcaggtgttgatgaacaacttggtgaattggttagtggagaagaagttgttgagcctccttcaaatttgattgccatggaagtctcttcaaaatatgttaagctaaattggaatccatctcctagtccagtgactggctacaaagtcatcctcacaccaatgactgcaggaagccgacagcacgctctgagtgtggggcctcagacaaccacgctcagtgttcgcgacctctcagcagacacagaataccagatcagtgtttccgccatgaagggaatgacatccagtgaacccatttcaataatggagaagactcagccaatgaaagttcaagtggaatgctcacgtggtgtggatataaaagccgatattgtgtttttggttgatggctcctatagcattgggattgcaaactttgttaaagttagagcctttttggaagttcttgtaaaaagttttgaaatttcaccaaatagggtccagattagtcttgtgcaatacagccgggatcctcatactgagttcactttgaaaaaattcaccaaagttgaagatataattgaagcaataaacaccttcccttacagaggaggatctacaaatactggcaaagcaatgacttatgtcagagagaaaatatttgtgcctagcaagggatcaagaagcaatgtgccaaaggtcatgattcttatcacggatgggaaatcatcagatgctttcagagatcctgcgataaaactgaggaattcagatgttgaaatctttgcagttggtgtgaaggatgccgttcgctcagaattggaagctattgcctctcctcctgcagagacccatgtgttcacagtggaagattttgatgcttttcagaggatatcttttgaactcacacagtctatctgccttagaattgagcaagaattggcagctataaagaagaaagcttacgtccctccaaaggatcttagtttttcagaagtgacttcttatggtttcaaaaccaactggtctccagctggagaaaatgttttttcatatcacatcacctacaaggaagcggctggggatgatgaggtcactgtggtggagccagcatcgagcaccagtgttgttctcagcagcctgaagccagagaccttgtatttggtcaatgtgactgcggagtatgaggatggcttcagcattcccttagctggagaggagaccaccgaagaagtaaaaggagcacctcgaaacctaaaggtgacagatgagactacagatagtttcaaaattacttggactcaagctccagggagagttttaagatntcgaattatatatagaccagttgctggtggagagagcagagaagttaccaccccacccaatcagaggaggagaacactggagaacttgattccagacacgaaatatgaagtatctgtaattcctgaatanttctcaggacctggtactccattaactggaaatgcagccactgaagaagttagagggaatccaagagacttaagagtttctgaccctacgacgtctactatgaaattatcttggagtggggcaccaggaaaagtgaaacagtatctcgtcacatataccccagtggcagggggtgaaactcaagaggtcactgtgaggggagatacaaccaatacggtgctgcagggattgaaggaagggacacaatacgccttatctgtgacagcactgtatgcgtctggggctggcgacgccctctttggtgaaggaacaacacttgaagaacgtggttctcctcaagatttagttactaaagacatcactgacacatcaattggggcttattggacatctgctccaggaatggttcgcggttacagggtctcatggaaatcactttatgatgatgttgacactggagagaaaaatctgcctgaagatgcaattcatacgatgatagaaaatctgcagccagagaccaaatacagaatttcagtatttgccacttacagcagtggagaaggagaacctttgactggagatgccacaactgaattatctcaagattccaaaaccctgaaagtagatgaagaaacagaaaacacaatgagagttacatggaaaccagcaccagggaaagtcgtcaactaccgtgttgtctatcgccctcatgggagagggaagcaaatggttgctaaggtgccccccacagtcacttcgacagtgttaaagcgacttcagccacagaccacatatgacatcacagttcttcctatttacaagatgggagaaggaaagcttaggcaaggatcaggaacaacagcttctcggtttaagtctcctagaaacctcaaaacatctgacccaaccatgtcaagcttccgagtgacttgggagcctgcccctggggaagtgaagggttataaagtcacattccaccctacgggggatgacagaagactgggggagttagtggttggaccctatgacaacacagttgttttggaggaacttagggctggtaccacctataaagtaaatgtttttggaatgtttgatggaggagaaagctcaccacttgttggacaagaaatgacaaccctttccgacacaactgttatgccaattttatcttctgggatggagtgtctcaccagagctgaggcagacattgtgttgctggtggatggatcatggagcatcggccgggcaaattttagaaccgtgaggagtttcatttctcgtattgtggaagtctttgacattggccccaaaagagtacaaattgctcttgctcagtatagtggggatcccagaacagagtggcagttaaatgcacacagagacaagaagagcttgttgcaagctgtggcaaacttgccgtacaaaggaggcaatactctcacaggcatggctttgaatttcattcgccaacagaacttcaggacccaagctggcatgagacctcgagctcgaaaaattggtgtgctcattactgatggaaaatcacaagacgatgttgaagcaccttcaaagaaactcaaggatgagggagtggagctgtttgctattggtattaaaaatgctgatgaagtcgaattaaagatgattgcaactgatcctgatgatacccatgactacaatgtggcagattttgagtcactctccaggatagtggatgatctcaccattaatttgtgtaacagtgtcaaaggtccaggtgatttggaagcaccttctaacttagttatttctgagcgaacccatcgttcttttagagtgagctggacaccaccttctgacagtgtggatcgatataaggtggaatactatccagtttctggagggaaacgtcaagaattttatgtgagtcgaatggaaactagcacagtgctgaaagatctgaaacctgaaactgaatatgttgtcaatgtgtattctgtggtagaagatgaatatagtgagcctctgaaggggacagaaaaaaccttgccagtgcctgtagtcagcctgaatatttatgatgttggccctaccaccatgcatgtgcagtggcagcctgtgggaggagctactggctacatcttgtcatacaaacctgttaaggacacagagccaacaagacccaaagaggtgcgtttggggccaacagtgaatgacatgcagctgactgaccttgttcccaacacggagtatgcagtcacagtccaggctgtcctgcacgacctcactagtgaacctgtcactgttcgggaagtcaccttgcctttacccagacctcaggatctgaaactcagagatgtgactcacagcactatgaatgtcttttgggaacctgtgcctggaaaagtgcgtaaatatattgttcgatacaaaacaccagaagaggatgtcaaagaggtagaggtggacagatcagagaccagcacttccctcaaagacctcttctcacagaccttgtacacagtcagcgtttctgcagtacatgacgagggggagtctcctccagtgactgctcaagaaactacccgacccgtgccagccccaacaaacttaaagattactgaagtaacatcagagggtttcagagggacttgggatcatggagcttcagatgtgtctctctacagaataacttggggaccttttggaagctcagataagatggagaccatcttaaatggagatgaaaacactttggtgttcgaaaacctgaaccccaacaccatctatgaagtttccattactgccatctatcctgatgagtcagaaagtgatgacctgattggcagtgagcgcacactgcctatcttaacaacacaagctcccaaaagtgggccacgaaaccttcaagtgtacaatgcaacatctaacagcctgactgttaagtgggatcctgctagtggtcgtgtgcagaaatataggatcacttatcagccttccacaggggaaggcaatgagcaaacgaccacaataggaggacggcagaacagtgtggtcctgcagaaactgaagccagacactccttacactatcaccgtatcctctctgtatcctgatggtgaaggaggtcggatgacgggaagaggcaagaccaaacctctaaacactgtaaggaacctgagagtgtatgacccttctaccagcacctctgaatgtccgctgggaccatgcagagggaaatcctcgtcagtacaagctcttctatgcaccagcagcaggtggtccagaggaactggtaccaatccccgggaataccaattatgccattcttaggaatctgcagccagatacctcatacactgtgactgtagttcccgtttatactgaaggtgatgggggacgcacatcagatactggaaggacattgatgagaggactggcaagaaatgtccaagtatacaatcctacacctaacaggctcggtgttcgctgggaccctgcaccaggacctgtgctgcaatatcgcgttgtgtattctcctgtggatggcacaagaccctcagaatctatagtagtgccaggaaacacgcgcatggtgcatctggagcggctgattccggacacactctattccgtgaaccttgtggctctgtactcggatggagagggaaatcccagccctgcccagggccgaacgctaccacgcagtggaccaaggaacctgagagtctttggtgaaacaaccaatagcctctcggtagcctgggatcatgctgatgggccagttcagcagtacaggatcatctattctcccactgttggtgatccaattgatgaatataccacagtcccaggcagaagaaacaatgtaatactgcagcccctgcaacctgacactccatataaaattactgttattgctgtttatgaagatggagatggtggccatctaacaggaaatggaagaactgtgggactccttcctcctcagaacatacacatctctgacgaatggtatacaagattcagggtgtcctgggatccttcaccttctccagttcttggatataaaatagtatataagccagtgggttccaatgagcccatggaagcctttgttggagaaatgacatcatataccttacacaatctcaatcccagcaccacctacgatgtgaatgtttatgctcaatatgattctggactcagtgtccccttgacagatcaaggcactacattatatttaaatgtaacagatctgaaaacttaccagattgggtgggatacattctgtgtcaaatggtcacctcaccgggcagccacctcctacaggctaaaactaagccctgcagatggaacaaggggacaagaaattacagtgcgtggatcagaaaccagtcactgcttcactggcctttcaccagacactgattatggtgtcactgtttttgtgcagacaccaaatctcgagggaccaggagtctctgttaaagaacataccactgtgaaaccaacagaagcccctacagagccacccacacctcctccccctcccaccattccaccagcccgggatgtatgcaaaggggccaaggcagatattgtgttcttgactgatgcctcctggagcattggggacgataattttaacaaagttgtaaaattcatcttcaatactgtgggaggctttgatgaaatcagtcctgctgggattcaggtttcatttgtgcaatacagcgatgaggtcaagtctgagttcaagctgaacacgtacaatgacaaggccctagcccttggggccctccagaatattaggtacagaggaggaaacacaagaacaggcaaggccctcacgtttatcaaggagaaagtcttgacttgggagagcggcatgaggaagaatgtccctaaggtgttggttgtggtcacggacggtcggtcccaggatgaggtcaagaaggcggctttggtcatccagcagtcagggttcagtgtctttgtagttggtgtggctgatgtcgactacaatgagcttgccaacattgccagcaaaccaagtgaacggcacgtgttcattgtggacgactttgaatcttttgagaagatcgaagacaatcttattacatttgtttgtgaaactgccacttcaagttgtcctctcatttatttggatggctacacctcaccaggttttaaaatgcttgaagcatacaacctgacagaaaagaattttgcttctgtacaaggagtatctttggagtcagggtctttccccagctactcagcatacaggattcagaagaatgcgtttgtgaatcagcctacagcagacctacacccaaatggactccctccttcatacacgattatattattattcagacttctcccagaaactcccagtgacccttttgcaatttggcaaatcacagacagagactacaaaccacaagttggagtgattgcagatccttctagcaagacgttatcattctttaacaaggatacaagaggcgaggtgcaaactgttacatttgacacagaagaagtaaagacattattttatggaagttttcacaaggttcatattgtagtgacctcaaaaagtgttaagatttacattgactgctatgaaattatagaaaaagacatcaaggaagctggaaatataacaactgatggttatgaaattcttggaaaactccttaaaggggaaaggaaatcagccgcattccaaatccagagttttgacattgtctgcagtccagtgtggaccagtagagacagatgctgtgatattccctctaggagagatgagggaaaatgccctgcttttccaaattcttgcacatgtacacaggacagcgttggacctccaggacctccaggccctgcaggaggacctggtgctaaaggtcccagaggtgaaagaggtatcagtggggcaattgggccccctggtcctcgtggagacataggtcctccaggcccccagggtcctccaggccctcagggacccaatggactctctattccgggagagcaaggtcgccaagggatgaaaggtgatgctggagagccaggacttccaggccgaacaggaaccccaggattacctggcccaccaggaccaatgggacctccaggagacagaggcttcactggaaaagacggtgcaatgggacccaggggcccaccagggcggccgggaagcccaggctccccaggagtcacaggaccaagtgggaagccaggaaaacctggagatcatggcagaccaggtccatctgggttgaaaggagaaaaaggtgataggggagacattgcttcccagaacatgatgcgagcagttgcaagacaagtctgtgaacaattgataagtggtcagatgaacagattcaatcagatgctgaatcagattccaaatgattaccagtccagtcgcaaccagccaggcccgccgggtccaccgggacctcctggtagcgcaggagccagaggagaacctgggcctggggggcggccaggcttcccgggcacaccagggatgcagggaccccctggggaacgaggtttgccaggagagaaaggtgaaaggggtactggatcttcaggacctcgggggctgcctgggcccccaggtccacaaggagaatccagaacaggtccaccagggtccacaggttcaagaggtccccctggcccccctggccgtcctggaaactcaggtatccgaggacccccaggtcctcctggatactgtgattcttctcagtgtgccagcatcccatacaacgggcaaagctatccaggttccggctaacacattttctaagtcgccagtgctgcttacagtttgaatacatgaaaatcctgtttctgagatgtttgcgcacgtgcttattaggaaatgagtctgtatggaaatctcaccacagataatggttaacgaaccgggtcgacatcacaaaggagggtggagactctttttactaacttgaatgagacaaaagcagtggtgtcagtttataatcctgatgcatttcagtaataatgtagaaaaacattattttaaaaaagttccaacacacagccatgaggagcctcagttttgaaagaggtgcataataaaactactaaccagaggagtctatgccattttaagaaaaacaattaacctggttaaagagaaatgtcttatgtaaataataaactaattgtggcttgtaaatgatttgtatgtgatcctgtcgactaaaatcacttaacaattctacaataagcttctgcatcaaagcctgccgcttgctctatgccggaataacaccaaatggaatctcctcatctcttgcttgttagcgatgtgtctgattcagggcatctgtctttttgttacttttttgtccgtgtcctctcatttgggttttgtaactgcaattttcaaaccaaagtttaaaatcaccttttcttcctgttttgctgtagtcactggtgttcctcacccaccagctgtaactcagtttgtgtgaggtacagccacagaagatgtcatgtactgtatattacctggtgatagttgcttttcaccccccgagttcagtttctaggagccaatgaaacttcccctcacctcctcatctttccaagttgttctttgaattgaggagtttgaaggcataaacagttacttggggatttgcgaaaatcctacttagttactgcgtttacagttctttggcccagtctctgacccttcccaagtatttgtgcaatgattgtgtttactgctggatttttgaaggtttttttttttaagaaagtgccatttcattatttgattatcaccaaattatctggaaataattgggacattgtaacttatctatttatagttatgagattaagactggagtgccatcaccgcgggtgatgatttagcttttgctgtgtgtgtgtgtgtgtgtgtgccttccaaatcatgccataattgtaatgttgaatcggacagagccttacgtcccttcatcgtgccggtggagcccgagcggacagcggaatacgaggactacggcgcagacgagcctgcagaggagcctcctgagccccaccggcgctggcggcggccctgccccacggacccgggcagtgaaccagagatcacgcgccgcgccgcgaggcttgggggaggtgttgaaattctcatttacaggtcagatagagcagtgtacgtcttttctgaggtgtttcttccagcgttgctcatccaggagtaccctttctgattgtagagaaccttgtttctgcaggaagcctagctccaagcacgcagtctgtagacatttttgcctttgcccttgaaatgcttgcaaaatactttgttaacaaaagctgcaaagagagaacatgccgtgtgcctttagttagcacagcgggcagcctcagtgaaactcttaggttaagcagttaagtcctggaacccagagctgctgtgtatttcgagcgggcagtttatcttttgctatacttattttcaattcaattacaccacgattcaaataattcccctcctaaaaccaaaaaggagggaaacgtcaactccattgcaattacttatcttcctcttctatctctgttatacgccggggcatagaatgctcgtatacatctctttaacaaccacaaaccttaagccatgtagatgaagttagtgcatcaacgggatacagttccatattgccttaaacctccttgttttagacacactaacatttataccaaattgcagattattctgcagagagggaattgcatgtttgtgttgtatatttagtatgaacttttttcagaatataatatttcttagttatcaaaagtagttggaaaacatttgcaagactatgaacatagaattgctgcttttatattttaactgcagattgtgaatttcactgccttatattatttatttctgaaacaaaagaggcatttttcaataaaactactgaaaatttga

SEQ ID NO: 299400 - DNA, 8632 bp, Homo sapiens
gcggccgccaggtgctcctggagtgcagcgcctatcgccggggcgtgtgggggccacaccgagcaccagcttctccgacgccgggaagccgctgtcgccgccgctacctctccctgttgccgccgcctcagatctcttcatgccgctgtaagctcggaggccaaggatgcggagtaggcttcccccagcgcttgccgccctgggcgcggccctactcctgtcttccattgaggcagaagggatggagtgtctcaccagagctgaggcagacattgtgttgctggtggatggatcatggagcatcggccgggcaaattttagaaccgtgaggagtttcatttctcgtattgtggaagtctttgacattggccccaaaagagtacaaattgctcttgctcagtatagtggggatcccagaacagagtggcagttaaatgcacacagagacaagaagagcttgttgcaagctgtggcaaacttgccgtacaaaggaggcaatactctcacaggcatggctttgaatttcattcgccaacagaacttcaggacccaagctggcatgagacctcgagctcgaaaaattggtgtgctcattactgatggaaaatcacaagacgatgttgaagcaccttcaaagaaactcaaggatgagggagtggagctgtttgctattggtattaaaaatgctgatgaagtcgaattaaagatgattgcaactgatcctgatgatacccatgactacaatgtggcagattttgagtcactctccaggatagtggatgatctcaccattaatttgtgtaacagtgtcaaaggtccaggtgatttggaagcaccttctaacttagttatttctgagcgaacccatcgttcttttagagtgagctggacaccaccttctgacagtgtggatcgatataaggtggaatactatccagtttctggagggaaacgtcaagaattttatgtgagtcgaatggaaactagcacagtgctgaaagatctgaaacctgaaactgaatatgttgtcaatgtgtattctgtggtagaagatgaatatagtgagcctctgaaggggacagaaaaaaccttgccagtgcctgtagtcagcctgaatatttatgatgttggccctaccaccatgcatgtgcagtggcagcctgtgggaggagctactggctacatcttgtcatacaaacctgttaaggacacagagccaacaagacccaaagaggtgcgtttggggccaacagtgaatgacatgcagctgactgaccttgttcccaacacggagtatgcagtcacagtccaggctgtcctgcacgacctcactagtgaacctgtcactgttcgggaagtcaccttgcctttacccagacctcaggatctgaaactcagagatgtgactcacagcactatgaatgtcttttgggaacctgtgcctggaaaagtgcgtaaatatattgttcgatacaaaacaccagaagaggatgtcaaagaggtagaggtggacagatcagagaccagcacttccctcaaagacctcttctcacagaccttgtacacagtcagcgtttctgcagtacatgacgagggggagtctcctccagtgactgctcaagaaactacccgacccgtgccagccccaacaaacttaaagattactgaagtaacatcagagggtttcagagggacttgggatcatggagcttcagatgtgtctctctacagaataacttggggaccttttggaagctcagataagatggagaccatcttaaatggagatgaaaacactttggtgttcgaaaacctgaaccccaacaccatctatgaagtttccattactgccatctatcctgatgagtcagaaagtgatgacctgattggcagtgagcgcacactgcctatcttaacaacacaagctcccaaaagtgggccacgaaaccttcaagtgtacaatgcaacatctaacagcctgactgttaagtgggatcctgctagtggtcgtgtgcagaaatataggatcacttatcagccttccacaggggaaggcaatgagcaaacgaccacaataggaggacggcagaacagtgtggtcctgcagaaactgaagccagacactccttacactatcaccgtatcctctctgtatcctgatggtgaaggaggtcggatgacgggaagaggcaagaccaaacctctaaacactgtaaggaacctgagagtgtatgacccttctaccagcacctctgaatgtccgctgggaccatgcagagggaaatcctcgtcagtacaagctcttctatgcaccagcagcaggtggtccagaggaactggtaccaatccccgggaataccaattatgccattcttaggaatctgcagccagatacctcatacactgtgactgtagttcccgtttatactgaaggtgatgggggacgcacatcagatactggaaggacattgatgagaggactggcaagaaatgtccaagtatacaatcctacacctaacaggctcggtgttcgctgggaccctgcaccaggacctgtgctgcaatatcgcgttgtgtattctcctgtggatggcacaagaccctcagaatctatagtagtgccaggaaacacgcgcatggtgcatctggagcggctgattccggacacactctattccgtgaaccttgtggctctgtactcggatggagagggaaatcccagccctgcccagggccgaacgctaccacgcagtggaccaaggaacctgagagtctttggtgaaacaaccaatagcctctcggtagcctgggatcatgctgatgggccagttcagcagtacaggatcatctattctcccactgttggtgatccaattgatgaatataccacagtcccaggcagaagaaacaatgtaatactgcagcccctgcaacctgacactccatataaaattactgttattgctgtttatgaagatggagatggtggccatctaacaggaaatggaagaactgtgggactccttcctcctcagaacatacacatctctgacgaatggtatacaagattcagggtgtcctgggatccttcaccttctccagttcttggatataaaatagtatataagccagtgggttccaatgagcccatggaagcctttgttggagaaatgacatcatataccttacacaatctcaatcccagcaccacctacgatgtgaatgtttatgctcaatatgattctggactcagtgtccccttgacagatcaaggcactacattatatttaaatgtaacagatctgaaaacttaccagattgggtgggatacattctgtgtcaaatggtcacctcaccgggcagccacctcctacaggctaaaactaagccctgcagatggaacaaggggacaagaaattacagtgcgtggatcagaaaccagtcactgcttcactggcctttcaccagacactgattatggtgtcactgtttttgtgcagacaccaaatctcgagggaccaggagtctctgttaaagaacataccagtaagtttttgaggaatctggaaagctttcataaggctttagaatagaatgctctaggtaaggaagacttaagtgaatcctgtgcaggtacctctccgtaggggtagcaataatgatgggatgatggcagattcctgaatgtggagtctaaagctggttcaggacctttttctgtagcaatttgcaagttgtccctgttattgagttggtgctactttgaggaagggctaaaggagggagagatggctctcgctgagaaggtgaattcatattagtgacttttactcatttgaccctatctgaaggccttacattttccctttagatctttattttctgtagctgtagtggatgttgaatgactaccagtgacatcaatttggatggaataaaatccccagcatgtcagtaccgatgacaatggtgtctcattttgtacaacttgatttggtatccaggatttaaattgctcttaaaatttactttctgggatatcaaatgtgcacatggtgtgtttttataattattatttttaaattttagctgtgaaaccaacagaagcccctacagagccacccacacctcctccccctcccaccattccaccagcccgggatgtatgcaaaggggccaaggcagatattgtgttcttgactgatgcctcctggagcattggggacgataattttaacaaagttgtaaaattcatcttcaatactgtgggaggctttgatgaaatcagtcctgctgggattcaggtttcatttgtgcaatacagcgatgaggtcaagtctgagttcaagctgaacacgtacaatgacaaggccctagcccttggggccctccagaatattaggtacagaggaggaaacacaagaacaggcaaggccctcacgtttatcaaggagaaagtcttgacttgggagagcggcatgaggaagaatgtccctaaggtgttggttgtggtcacggacggtcggtcccaggatgaggtcaagaaggcggctttggtcatccagcagtcagggttcagtgtctttgtagttggtgtggctgatgtcgactacaatgagcttgccaacattgccagcaaaccaagtgaacggcacgtgttcattgtggacgactttgaatcttttgagaagatcgaagacaatcttattacatttgtttgtgaaactgccacttcaagttgtcctctcatttatttggatggctacacctcaccaggttttaaaatgcttgaagcatacaacctgacagaaaagaattttgcttctgtacaaggagtatctttggagtcagggtctttccccagctactcagcatacaggattcagaagaatgcgtttgtgaatcagcctacagcagacctacacccaaatggactccctccttcatacacgattatattattattcagacttctcccagaaactcccagtgacccttttgcaatttggcaaatcacagacagagactacaaaccacaagttggagtgattgcagatccttctagcaagacgttatcattctttaacaaggatacaagaggcgaggtgcaaactgttacatttgacacagaagaagtaaagacattattttatggaagttttcacaaggttcatattgtagtgacctcaaaaagtgttaagatttacattgactgctatgaaattatagaaaaagacatcaaggaagctggaaatataacaactgatggttatgaaattcttggaaaactccttaaaggggaaaggaaatcagccgcattccaaatccagagttttgacattgtctgcagtccagtgtggaccagtagagacagatgctgtgatattccctctaggagagatgagggaaaatgccctgcttttccaaattcttgcacatgtacacaggacagcgttggacctccaggacctccaggccctgcaggaggacctggtgctaaaggtcccagaggtgaaagaggtatcagtggggcaattgggccccctggtcctcgtggagacataggtcctccaggcccccagggtcctccaggccctcagggacccaatggactctctattccgggagagcaaggtcgccaagggatgaaaggtgatgctggagagccaggacttccaggccgaacaggaaccccaggattacctggcccaccaggaccaatgggacctccaggagacagaggcttcactggaaaagacggtgcaatgggacccaggggcccaccagggcggccgggaagcccaggctccccaggagtcacaggaccaagtgggaagccaggaaaacctggagatcatggcagaccaggtccatctgggttgaaaggagaaaaaggtgataggggagacattgcttcccagaacatgatgcgagcagttgcaagacaagtctgtgaacaattgataagtggtcagatgaacagattcaatcagatgctgaatcagattccaaatgattaccagtccagtcgcaaccagccaggcccgccgggtccaccgggacctcctggtagcgcaggagccagaggagaacctgggcctggggggcggccaggcttcccgggcacaccagggatgcagggaccccctggggaacgaggtttgccaggagagaaaggtgaaaggggtactggatcttcaggacctcgggggctgcctgggcccccaggtccacaaggagaatccagaacaggtccaccagggtccacaggttcaagaggtccccctggcccccctggccgtcctggaaactcaggtatccgaggacccccaggtcctcctggatactgtgattcttctcagtgtgccagcatcccatacaacgggcaaagctatccaggttccggctaacacattttctaagtcgccagtgctgcttacagtttgaatacatgaaaatcctgtttctgagatgtttgcgcacgtgcttattaggaaatgagtctgtatggaaatctcaccacagataatggttaacgaaccgggtcgacatcacaaaggagggtggagactctttttactaacttgaatgagacaaaagcagtggtgtcagtttataatcctgatgcatttcagtaataatgtagaaaaacattattttaaaaaagttccaacacacagccatgaggagcctcagttttgaaagaggtgcataataaaactactaaccagaggagtctatgccattttaagaaaaacaattaacctggttaaagagaaatgtcttatgtaaataataaactaattgtggcttgtaaatgatttgtatgtgatcctgtcgactaaaatcacttaacaattctacaataagcttctgcatcaaagcctgccgcttgctctatgccggaataacaccaaatggaatctcctcatctcttgcttgttagcgatgtgtctgattcagggcatctgtctttttgttacttttttgtccgtgtcctctcatttgggttttgtaactgcaattttcaaaccaaagtttaaaatcaccttttcttcctgttttgctgtagtcactggtgttcctcacccaccagctgtaactcagtttgtgtgaggtacagccacagaagatgtcatgtactgtatattacctggtgatagttgcttttcaccccccgagttcagtttctaggagccaatgaaacttcccctcacctcctcatctttccaagttgttctttgaattgaggagtttgaaggcataaacagttacttggggatttgcgaaaatcctacttagttactgcgtttacagttctttggcccagtctctgacccttcccaagtatttgtgcaatgattgtgtttactgctggatttttgaaggtttttttttttaagaaagtgccatttcattatttgattatcaccaaattatctggaaataattgggacattgtaacttatctatttatagttatgagattaagactggagtgccatcaccgcgggtgatgatttagcttttgctgtgtgtgtgtgtgtgtgtgtgccttccaaatcatgccataattgtaatgttgaatcggacagagccttacgtgcccgaggcggggcctacctgcctgagcgcgacccttcatcgtgccggtggagcccgagcggacagcggaatacgaggactacggcgcagacgagcctgcagaggagcctcctgagccccaccggcgctggcggcggccctgccccacggacccgggcagtgaaccagagatcacgcgccgcgccgcgaggcttgggggaggtgttgaaattctcatttacaggtcagatagagcagtgtacgtcttttctgaggtgtttcttccagcgttgctcatccaggagtaccctttctgattgtagagaaccttgtttctgcaggaagcctagctccaagcacgcagtctgtagacatttttgcctttgcccttgaaatgcttgcaaaatactttgttaacaaaagctgcaaagagagaacatgccgtgtgcctttagttagcacagcgggcagcctcagtgaaactcttaggttaagcagttaagtcctggaacccagagctgctgtgtatttcgagcgggcagtttatcttttgctatacttattttcaattcaattacaccacgattcaaataattcccctcctaaaaccaaaaaggagggaaacgtcaactccattgcaattacttatcttcctcttctatctctgttatacgccggggcatagaatgctcgtatacatctctttaacaaccacaaaccttaagccatgtagatgaagttagtgcatcaacgggatacagttccatattgccttaaacctccttgttttagacacactaacatttataccaaattgcagattattctgcagagagggaattgcatgtttgtgttgtatatttagtatgaacttttttcagaatataatatttcttagttatcaaaagtagttggaaaacatttgcaagactatgaacatagaattgctgcttttatattttaactgcagattgtgaatttcactgccttatattatttatttctgaaacaaaagaggcatttttcaataaaactactgaaaatttga

SEQ ID NO: 299401 - DNA, 6785 bp, Homo sapiens
ttagtggtctaggaagatgatgttattggttaaattagagtttggaattagtacatcaatttaattggtaggtttttctaagttcctattggggcagttaattaagaactgggtatatcttatttttctctccttttaccttttctattaatcacaaagttattgagtagcaatttgttaaatgaagaagtaatgaatggttgaaactagctgactgaatcagatgagctcaatagctgttgtcagattttacttagaaggcagactcttaaaaaatgtctcttcttcctctctccattacttatgttagaaaactgaaactacttttcctatttcttttctctatcccatgaccctttatggccaatccagttccaccacgtttattagcttgtttttaattgaatacaatgttgcttccttatagacaaaggccatacttgctaactttaactaaatttgggtttggagagttttaatctgcctttgtgtgtaggtaattagaagtataaagaagatagcattttatcctgttacagaatgtaggttctggaaaagtgatacaaaagcttgagatatataaacagacttaaaaaatagatgttggccttcatttcctcagtgatgagaggactggcaagaaatgtccaagtatacaatcctacacctaacaggctcggtgttcgctgggaccctgcaccaggacctgtgctgcaatatcgcgttgtgtattctcctgtggatggcacaagaccctcagaatctatagtagtgccaggaaacacgcgcatggtgcatctggagcggctgattccggacacactctattccgtgaaccttgtggctctgtactcggatggagagggaaatcccagccctgcccagggccgaacgctaccacgcagtggaccaaggaacctgagagtctttggtgaaacaaccaatagcctctcggtagcctgggatcatgctgatgggccagttcagcagtacaggatcatctattctcccactgttggtgatccaattgatgaatataccacagtcccaggcagaagaaacaatgtaatactgcagcccctgcaacctgacactccatataaaattactgttattgctgtttatgaagatggagatggtggccatctaacaggaaatggaagaactgtgggactccttcctcctcagaacatacacatctctgacgaatggtatacaagattcagggtgtcctgggatccttcaccttctccagttcttggatataaaatagtatataagccagtgggttccaatgagcccatggaagcctttgttggagaaatgacatcatataccttacacaatctcaatcccagcaccacctacgatgtgaatgtttatgctcaatatgattctggactcagtgtccccttgacagatcaaggcactacattatatttaaatgtaacagatctgaaaacttaccagattgggtgggatacattctgtgtcaaatggtcacctcaccgggcagccacctcctacaggctaaaactaagccctgcagatggaacaaggggacaagaaattacagtgcgtggatcagaaaccagtcactgcttcactggcctttcaccagacactgattatggtgtcactgtttttgtgcagacaccaaatctcgagggaccaggagtctctgttaaagaacataccagtaagtttttgaggaatctggaaagctttcataaggctttagaatagaatgctctaggtaaggaagacttaagtgaatcctgtgcaggtacctctccgtaggggtagcaataatgatgggatgatggcagattcctgaatgtggagtctaaagctggttcaggacctttttctgtagcaatttgcaagttgtccctgttattgagttggtgctactttgaggaagggctaaaggagggagagatggctctcgctgagaaggtgaattcatattagtgacttttactcatttgaccctatctgaaggccttacattttccctttagatctttattttctgtagctgtagtggatgttgaatgactaccagtgacatcaatttggatggaataaaatccccagcatgtcagtaccgatgacaatggtgtctcattttgtacaacttgatttggtatccaggatttaaattgctcttaaaatttactttctgggatatcaaatgtgcacatggtgtgtttttataattattatttttaaattttagctgtgaaaccaacagaagcccctacagagccacccacacctcctccccctcccaccattccaccagcccgggatgtatgcaaaggggccaaggcagatattgtgttcttgactgatgcctcctggagcattggggacgataattttaacaaagttgtaaaattcatcttcaatactgtgggaggctttgatgaaatcagtcctgctgggattcaggtttcatttgtgcaatacagcgatgaggtcaagtctgagttcaagctgaacacgtacaatgacaaggccctagcccttggggccctccagaatattaggtacagaggaggaaacacaagaacaggcaaggccctcacgtttatcaaggagaaagtcttgacttgggagagcggcatgaggaagaatgtccctaaggtgttggttgtggtcacggacggtcggtcccaggatgaggtcaagaaggcggctttggtcatccagcagtcagggttcagtgtctttgtagttggtgtggctgatgtcgactacaatgagcttgccaacattgccagcaaaccaagtgaacggcacgtgttcattgtggacgactttgaatcttttgagaagatcgaagacaatcttattacatttgtttgtgaaactgccacttcaagttgtcctctcatttatttggatggctacacctcaccaggttttaaaatgcttgaagcatacaacctgacagaaaagaattttgcttctgtacaaggagtatctttggagtcagggtctttccccagctactcagcatacaggattcagaagaatgcgtttgtgaatcagcctacagcagacctacacccaaatggactccctccttcatacacgattatattattattcagacttctcccagaaactcccagtgacccttttgcaatttggcaaatcacagacagagactacaaaccacaagttggagtgattgcagatccttctagcaagacgttatcattctttaacaaggatacaagaggcgaggtgcaaactgttacatttgacacagaagaagtaaagacattattttatggaagttttcacaaggttcatattgtagtgacctcaaaaagtgttaagatttacattgactgctatgaaattatagaaaaagacatcaaggaagctggaaatataacaactgatggttatgaaattcttggaaaactccttaaaggggaaaggaaatcagccgcattccaaatccagagttttgacattgtctgcagtccagtgtggaccagtagagacagatgctgtgatattccctctaggagagatgagggaaaatgccctgcttttccaaattcttgcacatgtacacaggacagcgttggacctccaggacctccaggccctgcaggaggacctggtgctaaaggtcccagaggtgaaagaggtatcagtggggcaattgggccccctggtcctcgtggagacataggtcctccaggcccccagggtcctccaggccctcagggacccaatggactctctattccgggagagcaaggtcgccaagggatgaaaggtgatgctggagagccaggacttccaggccgaacaggaaccccaggattacctggcccaccaggaccaatgggacctccaggagacagaggcttcactggaaaagacggtgcaatgggacccaggggcccaccagggcggccgggaagcccaggctccccaggagtcacaggaccaagtgggaagccaggaaaacctggagatcatggcagaccaggtccatctgggttgaaaggagaaaaaggtgataggggagacattgcttcccagaacatgatgcgagcagttgcaagacaagtctgtgaacaattgataagtggtcagatgaacagattcaatcagatgctgaatcagattccaaatgattaccagtccagtcgcaaccagccaggcccgccgggtccaccgggacctcctggtagcgcaggagccagaggagaacctgggcctggggggcggccaggcttcccgggcacaccagggatgcagggaccccctggggaacgaggtttgccaggagagaaaggtgaaaggggtactggatcttcaggacctcgggggctgcctgggcccccaggtccacaaggagaatccagaacaggtccaccagggtccacaggttcaagaggtccccctggcccccctggccgtcctggaaactcaggtatccgaggacccccaggtcctcctggatactgtgattcttctcagtgtgccagcatcccatacaacgggcaaagctatccaggttccggctaacacattttctaagtcgccagtgctgcttacagtttgaatacatgaaaatcctgtttctgagatgtttgcgcacgtgcttattaggaaatgagtctgtatggaaatctcaccacagataatggttaacgaaccgggtcgacatcacaaaggagggtggagactctttttactaacttgaatgagacaaaagcagtggtgtcagtttataatcctgatgcatttcagtaataatgtagaaaaacattattttaaaaaagttccaacacacagccatgaggagcctcagttttgaaagaggtgcataataaaactactaaccagaggagtctatgccattttaagaaaaacaattaacctggttaaagagaaatgtcttatgtaaataataaactaattgtggcttgtaaatgatttgtatgtgatcctgtcgactaaaatcacttaacaattctacaataagcttctgcatcaaagcctgccgcttgctctatgccggaataacaccaaatggaatctcctcatctcttgcttgttagcgatgtgtctgattcagggcatctgtctttttgttacttttttgtccgtgtcctctcatttgggttttgtaactgcaattttcaaaccaaagtttaaaatcaccttttcttcctgttttgctgtagtcactggtgttcctcacccaccagctgtaactcagtttgtgtgaggtacagccacagaagatgtcatgtactgtatattacctggtgatagttgcttttcaccccccgagttcagtttctaggagccaatgaaacttcccctcacctcctcatctttccaagttgttctttgaattgaggagtttgaaggcataaacagttacttggggatttgcgaaaatcctacttagttactgcgtttacagttctttggcccagtctctgacccttcccaagtatttgtgcaatgattgtgtttactgctggatttttgaaggtttttttttttaagaaagtgccatttcattatttgattatcaccaaattatctggaaataattgggacattgtaacttatctatttatagttatgagattaagactggagtgccatcaccgcgggtgatgatttagcttttgctgtgtgtgtgtgtgtgtgtgtgccttccaaatcatgccataattgtaatgttgaatcggacagagccttacgtgcccgaggcggggcctacctgcctgagcgcgacccttcatcgtgccggtggagcccgagcggacagcggaatacgaggactacggcgcagacgagcctgcagaggagcctcctgagccccaccggcgctggcggcggccctgccccacggacccgggcagtgaaccagagatcacgcgccgcgccgcgaggcttgggggaggtgttgaaattctcatttacaggtcagatagagcagtgtacgtcttttctgaggtgtttcttccagcgttgctcatccaggagtaccctttctgattgtagagaaccttgtttctgcaggaagcctagctccaagcacgcagtctgtagacatttttgcctttgcccttgaaatgcttgcaaaatactttgttaacaaaagctgcaaagagagaacatgccgtgtgcctttagttagcacagcgggcagcctcagtgaaactcttaggttaagcagttaagtcctggaacccagagctgctgtgtatttcgagcgggcagtttatcttttgctatacttattttcaattcaattacaccacgattcaaataattcccctcctaaaaccaaaaaggagggaaacgtcaactccattgcaattacttatcttcctcttctatctctgttatacgccggggcatagaatgctcgtatacatctctttaacaaccacaaaccttaagccatgtagatgaagttagtgcatcaacgggatacagttccatattgccttaaacctccttgttttagacacactaacatttataccaaattgcagattattctgcagagagggaattgcatgtttgtgttgtatatttagtatgaacttttttcagaatataatatttcttagttatcaaaagtagttggaaaacatttgcaagactatgaacatagaattgctgcttttatattttaactgcagattgtgaatttcactgccttatattatttatttctgaaacaaaagaggcatttttcaataaaactactgaaaatttga

SEQ ID NO: 299402 - DNA, 5303 bp, Homo sapiens
atgctatataaaattttcttgaaatataattggtgatgacactggcattttcctttgttgtcataatcaggaacaaggggacaagaaattacagtgcgtggatcagaaaccagtcactgcttcactggcctttcaccagacactgattatggtgtcactgtttttgtgcagacaccaaatctcgagggaccaggagtctctgttaaagaacataccagtaagtttttgaggaatctggaaagctttcataaggctttagaatagaatgctctaggtaaggaagacttaagtgaatcctgtgcaggtacctctccgtaggggtagcaataatgatgggatgatggcagattcctgaatgtggagtctaaagctggttcaggacctttttctgtagcaatttgcaagttgtccctgttattgagttggtgctactttgaggaagggctaaaggagggagagatggctctcgctgagaaggtgaattcatattagtgacttttactcatttgaccctatctgaaggccttacattttccctttagatctttattttctgtagctgtagtggatgttgaatgactaccagtgacatcaatttggatggaataaaatccccagcatgtcagtaccgatgacaatggtgtctcattttgtacaacttgatttggtatccaggatttaaattgctcttaaaatttactttctgggatatcaaatgtgcacatggtgtgtttttataattattatttttaaattttagctgtgaaaccaacagaagcccctacagagccacccacacctcctccccctcccaccattccaccagcccgggatgtatgcaaaggggccaaggcagatattgtgttcttgactgatgcctcctggagcattggggacgataattttaacaaagttgtaaaattcatcttcaatactgtgggaggctttgatgaaatcagtcctgctgggattcaggtttcatttgtgcaatacagcgatgaggtcaagtctgagttcaagctgaacacgtacaatgacaaggccctagcccttggggccctccagaatattaggtacagaggaggaaacacaagaacaggcaaggccctcacgtttatcaaggagaaagtcttgacttgggagagcggcatgaggaagaatgtccctaaggtgttggttgtggtcacggacggtcggtcccaggatgaggtcaagaaggcggctttggtcatccagcagtcagggttcagtgtctttgtagttggtgtggctgatgtcgactacaatgagcttgccaacattgccagcaaaccaagtgaacggcacgtgttcattgtggacgactttgaatcttttgagaagatcgaagacaatcttattacatttgtttgtgaaactgccacttcaagttgtcctctcatttatttggatggctacacctcaccaggttttaaaatgcttgaagcatacaacctgacagaaaagaattttgcttctgtacaaggagtatctttggagtcagggtctttccccagctactcagcatacaggattcagaagaatgcgtttgtgaatcagcctacagcagacctacacccaaatggactccctccttcatacacgattatattattattcagacttctcccagaaactcccagtgacccttttgcaatttggcaaatcacagacagagactacaaaccacaagttggagtgattgcagatccttctagcaagacgttatcattctttaacaaggatacaagaggcgaggtgcaaactgttacatttgacacagaagaagtaaagacattattttatggaagttttcacaaggttcatattgtagtgacctcaaaaagtgttaagatttacattgactgctatgaaattatagaaaaagacatcaaggaagctggaaatataacaactgatggttatgaaattcttggaaaactccttaaaggggaaaggaaatcagccgcattccaaatccagagttttgacattgtctgcagtccagtgtggaccagtagagacagatgctgtgatattccctctaggagagatgagggaaaatgccctgcttttccaaattcttgcacatgtacacaggacagcgttggacctccaggacctccaggccctgcaggaggacctggtgctaaaggtcccagaggtgaaagaggtatcagtggggcaattgggccccctggtcctcgtggagacataggtcctccaggcccccagggtcctccaggccctcagggacccaatggactctctattccgggagagcaaggtcgccaagggatgaaaggtgatgctggagagccaggacttccaggccgaacaggaaccccaggattacctggcccaccaggaccaatgggacctccaggagacagaggcttcactggaaaagacggtgcaatgggacccaggggcccaccagggcggccgggaagcccaggctccccaggagtcacaggaccaagtgggaagccaggaaaacctggagatcatggcagaccaggtccatctgggttgaaaggagaaaaaggtgataggggagacattgcttcccagaacatgatgcgagcagttgcaagacaagtctgtgaacaattgataagtggtcagatgaacagattcaatcagatgctgaatcagattccaaatgattaccagtccagtcgcaaccagccaggcccgccgggtccaccgggacctcctggtagcgcaggagccagaggagaacctgggcctggggggcggccaggcttcccgggcacaccagggatgcagggaccccctggggaacgaggtttgccaggagagaaaggtgaaaggggtactggatcttcaggacctcgggggctgcctgggcccccaggtccacaaggagaatccagaacaggtccaccagggtccacaggttcaagaggtccccctggcccccctggccgtcctggaaactcaggtatccgaggacccccaggtcctcctggatactgtgattcttctcagtgtgccagcatcccatacaacgggcaaagctatccaggttccggctaacacattttctaagtcgccagtgctgcttacagtttgaatacatgaaaatcctgtttctgagatgtttgcgcacgtgcttattaggaaatgagtctgtatggaaatctcaccacagataatggttaacgaaccgggtcgacatcacaaaggagggtggagactctttttactaacttgaatgagacaaaagcagtggtgtcagtttataatcctgatgcatttcagtaataatgtagaaaaacattattttaaaaaagttccaacacacagccatgaggagcctcagttttgaaagaggtgcataataaaactactaaccagaggagtctatgccattttaagaaaaacaattaacctggttaaagagaaatgtcttatgtaaataataaactaattgtggcttgtaaatgatttgtatgtgatcctgtcgactaaaatcacttaacaattctacaataagcttctgcatcaaagcctgccgcttgctctatgccggaataacaccaaatggaatctcctcatctcttgcttgttagcgatgtgtctgattcagggcatctgtctttttgttacttttttgtccgtgtcctctcatttgggttttgtaactgcaattttcaaaccaaagtttaaaatcaccttttcttcctgttttgctgtagtcactggtgttcctcacccaccagctgtaactcagtttgtgtgaggtacagccacagaagatgtcatgtactgtatattacctggtgatagttgcttttcaccccccgagttcagtttctaggagccaatgaaacttcccctcacctcctcatctttccaagttgttctttgaattgaggagtttgaaggcataaacagttacttggggatttgcgaaaatcctacttagttactgcgtttacagttctttggcccagtctctgacccttcccaagtatttgtgcaatgattgtgtttactgctggatttttgaaggtttttttttttaagaaagtgccatttcattatttgattatcaccaaattatctggaaataattgggacattgtaacttatctatttatagttatgagattaagactggagtgccatcaccgcgggtgatgatttagcttttgctgtgtgtgtgtgtgtgtgtgtgccttccaaatcatgccataattgtaatgttgaatcggacagagccttacgtgcccgaggcggggcctacctgcctgagcgcgacccttcatcgtgccggtggagcccgagcggacagcggaatacgaggactacggcgcagacgagcctgcagaggagcctcctgagccccaccggcgctggcggcggccctgccccacggacccgggcagtgaaccagagatcacgcgccgcgccgcgaggcttgggggaggtgttgaaattctcatttacaggtcagatagagcagtgtacgtcttttctgaggtgtttcttccagcgttgctcatccaggagtaccctttctgattgtagagaaccttgtttctgcaggaagcctagctccaagcacgcagtctgtagacatttttgcctttgcccttgaaatgcttgcaaaatactttgttaacaaaagctgcaaagagagaacatgccgtgtgcctttagttagcacagcgggcagcctcagtgaaactcttaggttaagcagttaagtcctggaacccagagctgctgtgtatttcgagcgggcagtttatcttttgctatacttattttcaattcaattacaccacgattcaaataattcccctcctaaaaccaaaaaggagggaaacgtcaactccattgcaattacttatcttcctcttctatctctgttatacgccggggcatagaatgctcgtatacatctctttaacaaccacaaaccttaagccatgtagatgaagttagtgcatcaacgggatacagttccatattgccttaaacctccttgttttagacacactaacatttataccaaattgcagattattctgcagagagggaattgcatgtttgtgttgtatatttagtatgaacttttttcagaatataatatttcttagttatcaaaagtagttggaaaacatttgcaagactatgaacatagaattgctgcttttatattttaactgcagattgtgaatttcactgccttatattatttatttctgaaacaaaagaggcatttttcaataaaactactgaaaatttga

SEQ ID NO: 299403 - DNA, 6695 bp, Homo sapiens
ccgtttatactgaaggtgatgggggacgcacatctaacagcctgactgttaagtgggatcctgctagtggtcgtgtgcagaaatataggatcacttatcagccttccacaggggaaggcaatgagcaaacgaccacaataggaggacggcagaacagtgtggtcctgcagaaactgaagccagacactccttacactatcaccgtatcctctctgtatcctgatggtgaaggaggtcggatgacgggaagaggcaagaccaaacctctaaacactgtaaggaacctgagagtgtatgacccttctaccagcacctctgaatgtccgctgggaccatgcagagggaaatcctcgtcagtacaagctcttctatgcaccagcagcaggtggtccagaggaactggtaccaatccccgggaataccaattatgccattcttaggaatctgcagccagatacctcatacactgtgactgtagttcccgtttatactgaaggtgatgggggacgcacatcagatactggaaggacattgatgagaggactggcaagaaatgtccaagtatacaatcctacacctaacaggctcggtgttcgctgggaccctgcaccaggacctgtgctgcaatatcgcgttgtgtattctcctgtggatggcacaagaccctcagaatctatagtagtgccaggaaacacgcgcatggtgcatctggagcggctgattccggacacactctattccgtgaaccttgtggctctgtactcggatggagagggaaatcccagccctgcccagggccgaacgctaccacgcagtggaccaaggaacctgagagtctttggtgaaacaaccaatagcctctcggtagcctgggatcatgctgatgggccagttcagcagtacaggatcatctattctcccactgttggtgatccaattgatgaatataccacagtcccaggcagaagaaacaatgtaatactgcagcccctgcaacctgacactccatataaaattactgttattgctgtttatgaagatggagatggtggccatctaacaggaaatggaagaactgtgggactccttcctcctcagaacatacacatctctgacgaatggtatacaagattcagggtgtcctgggatccttcaccttctccagttcttggatataaaatagtatataagccagtgggttccaatgagcccatggaagcctttgttggagaaatgacatcatataccttacacaatctcaatcccagcaccacctacgatgtgaatgtttatgctcaatatgattctggactcagtgtccccttgacagatcaaggcactacattatatttaaatgtaacagatctgaaaacttaccagattgggtgggatacattctgtgtcaaatggtcacctcaccgggcagccacctcctacaggctaaaactaagccctgcagatggaacaaggggacaagaaattacagtgcgtggatcagaaaccagtcactgcttcactggcctttcaccagacactgattatggtgtcactgtttttgtgcagacaccaaatctcgagggaccaggagtctctgttaaagaacataccagtaagtttttgaggaatctggaaagctttcataaggctttagaatagaatgctctaggtaaggaagacttaagtgaatcctgtgcaggtacctctccgtaggggtagcaataatgatgggatgatggcagattcctgaatgtggagtctaaagctggttcaggacctttttctgtagcaatttgcaagttgtccctgttattgagttggtgctactttgaggaagggctaaaggagggagagatggctctcgctgagaaggtgaattcatattagtgacttttactcatttgaccctatctgaaggccttacattttccctttagatctttattttctgtagctgtagtggatgttgaatgactaccagtgacatcaatttggatggaataaaatccccagcatgtcagtaccgatgacaatggtgtctcattttgtacaacttgatttggtatccaggatttaaattgctcttaaaatttactttctgggatatcaaatgtgcacatggtgtgtttttataattattatttttaaattttagctgtgaaaccaacagaagcccctacagagccacccacacctcctccccctcccaccattccaccagcccgggatgtatgcaaaggggccaaggcagatattgtgttcttgactgatgcctcctggagcattggggacgataattttaacaaagttgtaaaattcatcttcaatactgtgggaggctttgatgaaatcagtcctgctgggattcaggtttcatttgtgcaatacagcgatgaggtcaagtctgagttcaagctgaacacgtacaatgacaaggccctagcccttggggccctccagaatattaggtacagaggaggaaacacaagaacaggcaaggccctcacgtttatcaaggagaaagtcttgacttgggagagcggcatgaggaagaatgtccctaaggtgttggttgtggtcacggacggtcggtcccaggatgaggtcaagaaggcggctttggtcatccagcagtcagggttcagtgtctttgtagttggtgtggctgatgtcgactacaatgagcttgccaacattgccagcaaaccaagtgaacggcacgtgttcattgtggacgactttgaatcttttgagaagatcgaagacaatcttattacatttgtttgtgaaactgccacttcaagttgtcctctcatttatttggatggctacacctcaccaggttttaaaatgcttgaagcatacaacctgacagaaaagaattttgcttctgtacaaggagtatctttggagtcagggtctttccccagctactcagcatacaggattcagaagaatgcgtttgtgaatcagcctacagcagacctacacccaaatggactccctccttcatacacgattatattattattcagacttctcccagaaactcccagtgacccttttgcaatttggcaaatcacagacagagactacaaaccacaagttggagtgattgcagatccttctagcaagacgttatcattctttaacaaggatacaagaggcgaggtgcaaactgttacatttgacacagaagaagtaaagacattattttatggaagttttcacaaggttcatattgtagtgacctcaaaaagtgttaagatttacattgactgctatgaaattatagaaaaagacatcaaggaagctggaaatataacaactgatggttatgaaattcttggaaaactccttaaaggggaaaggaaatcagccgcattccaaatccagagttttgacattgtctgcagtccagtgtggaccagtagagacagatgctgtgatattccctctaggagagatgagggaaaatgccctgcttttccaaattcttgcacatgtacacaggacagcgttggacctccaggacctccaggccctgcaggaggacctggtgctaaaggtcccagaggtgaaagaggtatcagtggggcaattgggccccctggtcctcgtggagacataggtcctccaggcccccagggtcctccaggccctcagggacccaatggactctctattccgggagagcaaggtcgccaagggatgaaaggtgatgctggagagccaggacttccaggccgaacaggaaccccaggattacctggcccaccaggaccaatgggacctccaggagacagaggcttcactggaaaagacggtgcaatgggacccaggggcccaccagggcggccgggaagcccaggctccccaggagtcacaggaccaagtgggaagccaggaaaacctggagatcatggcagaccaggtccatctgggttgaaaggagaaaaaggtgataggggagacattgcttcccagaacatgatgcgagcagttgcaagacaagtctgtgaacaattgataagtggtcagatgaacagattcaatcagatgctgaatcagattccaaatgattaccagtccagtcgcaaccagccaggcccgccgggtccaccgggacctcctggtagcgcaggagccagaggagaacctgggcctggggggcggccaggcttcccgggcacaccagggatgcagggaccccctggggaacgaggtttgccaggagagaaaggtgaaaggggtactggatcttcaggacctcgggggctgcctgggcccccaggtccacaaggagaatccagaacaggtccaccagggtccacaggttcaagaggtccccctggcccccctggccgtcctggaaactcaggtatccgaggacccccaggtcctcctggatactgtgattcttctcagtgtgccagcatcccatacaacgggcaaagctatccaggttccggctaacacattttctaagtcgccagtgctgcttacagtttgaatacatgaaaatcctgtttctgagatgtttgcgcacgtgcttattaggaaatgagtctgtatggaaatctcaccacagataatggttaacgaaccgggtcgacatcacaaaggagggtggagactctttttactaacttgaatgagacaaaagcagtggtgtcagtttataatcctgatgcatttcagtaataatgtagaaaaacattattttaaaaaagttccaacacacagccatgaggagcctcagttttgaaagaggtgcataataaaactactaaccagaggagtctatgccattttaagaaaaacaattaacctggttaaagagaaatgtcttatgtaaataataaactaattgtggcttgtaaatgatttgtatgtgatcctgtcgactaaaatcacttaacaattctacaataagcttctgcatcaaagcctgccgcttgctctatgccggaataacaccaaatggaatctcctcatctcttgcttgttagcgatgtgtctgattcagggcatctgtctttttgttacttttttgtccgtgtcctctcatttgggttttgtaactgcaattttcaaaccaaagtttaaaatcaccttttcttcctgttttgctgtagtcactggtgttcctcacccaccagctgtaactcagtttgtgtgaggtacagccacagaagatgtcatgtactgtatattacctggtgatagttgcttttcaccccccgagttcagtttctaggagccaatgaaacttcccctcacctcctcatctttccaagttgttctttgaattgaggagtttgaaggcataaacagttacttggggatttgcgaaaatcctacttagttactgcgtttacagttctttggcccagtctctgacccttcccaagtatttgtgcaatgattgtgtttactgctggatttttgaaggtttttttttttaagaaagtgccatttcattatttgattatcaccaaattatctggaaataattgggacattgtaacttatctatttatagttatgagattaagactggagtgccatcaccgcgggtgatgatttagcttttgctgtgtgtgtgtgtgtgtgtgtgccttccaaatcatgccataattgtaatgttgaatcggacagagccttacgtgcccgaggcggggcctacctgcctgagcgcgacccttcatcgtgccggtggagcccgagcggacagcggaatacgaggactacggcgcagacgagcctgcagaggagcctcctgagccccaccggcgctggcggcggccctgccccacggacccgggcagtgaaccagagatcacgcgccgcgccgcgaggcttgggggaggtgttgaaattctcatttacaggtcagatagagcagtgtacgtcttttctgaggtgtttcttccagcgttgctcatccaggagtaccctttctgattgtagagaaccttgtttctgcaggaagcctagctccaagcacgcagtctgtagacatttttgcctttgcccttgaaatgcttgcaaaatactttgttaacaaaagctgcaaagagagaacatgccgtgtgcctttagttagcacagcgggcagcctcagtgaaactcttaggttaagcagttaagtcctggaacccagagctgctgtgtatttcgagcgggcagtttatcttttgctatacttattttcaattcaattacaccacgattcaaataattcccctcctaaaaccaaaaaggagggaaacgtcaactccattgcaattacttatcttcctcttctatctctgttatacgccggggcatagaatgctcgtatacatctctttaacaaccacaaaccttaagccatgtagatgaagttagtgcatcaacgggatacagttccatattgccttaaacctccttgttttagacacactaacatttataccaaattgcagattattctgcagagagggaattgcatgtttgtgttgtatatttagtatgaacttttttcagaatataatatttcttagttatcaaaagtagttggaaaacatttgcaagactatgaacatagaattgctgcttttatattttaactgcagattgtgaatttcactgccttatattatttatttctgaaacaaaagaggcatttttcaataaaactactgaaaatttga

SEQ ID NO: 299404 - DNA, 4250 bp, Homo sapiens
  misc_feature (1)..(1): n is a, c, g, or t
ngcggtagtcgctgacctggatgtgctgcacctggatggcgtgctgggggtagggctgaggatcatggagctggccaacatccacagtggactgctgtgactggtgaggggaagtggccgaggccacttgaaccacttgcagctgtatgtgctgaggtcaagaaggcggctttggtcatccagcagtcagggttcagtgtctttgtagttggtgtggctgatgtcgactacaatgagcttgccaacattgccagcaaaccaagtgaacggcacgtgttcattgtggacgactttgaatcttttgagaagatcgaagacaatcttattacatttgtttgtgaaactgccacttcaagttgtcctctcatttatttggatggctacacctcaccaggttttaaaatgcttgaagcatacaacctgacagaaaagaattttgcttctgtacaaggagtatctttggagtcagggtctttccccagctactcagcatacaggattcagaagaatgcgtttgtgaatcagcctacagcagacctacacccaaatggactccctccttcatacacgattatattattattcagacttctcccagaaactcccagtgacccttttgcaatttggcaaatcacagacagagactacaaaccacaagttggagtgattgcagatccttctagcaagacgttatcattctttaacaaggatacaagaggcgaggtgcaaactgttacatttgacacagaagaagtaaagacattattttatggaagttttcacaaggttcatattgtagtgacctcaaaaagtgttaagatttacattgactgctatgaaattatagaaaaagacatcaaggaagctggaaatataacaactgatggttatgaaattcttggaaaactccttaaaggggaaaggaaatcagccgcattccaaatccagagttttgacattgtctgcagtccagtgtggaccagtagagacagatgctgtgatattccctctaggagagatgagggaaaatgccctgcttttccaaattcttgcacatgtacacaggacagcgttggacctccaggacctccaggccctgcaggaggacctggtgctaaaggtcccagaggtgaaagaggtatcagtggggcaattgggccccctggtcctcgtggagacataggtcctccaggcccccagggtcctccaggccctcagggacccaatggactctctattccgggagagcaaggtcgccaagggatgaaaggtgatgctggagagccaggacttccaggccgaacaggaaccccaggattacctggcccaccaggaccaatgggacctccaggagacagaggcttcactggaaaagacggtgcaatgggacccaggggcccaccagggcggccgggaagcccaggctccccaggagtcacaggaccaagtgggaagccaggaaaacctggagatcatggcagaccaggtccatctgggttgaaaggagaaaaaggtgataggggagacattgcttcccagaacatgatgcgagcagttgcaagacaagtctgtgaacaattgataagtggtcagatgaacagattcaatcagatgctgaatcagattccaaatgattaccagtccagtcgcaaccagccaggcccgccgggtccaccgggacctcctggtagcgcaggagccagaggagaacctgggcctggggggcggccaggcttcccgggcacaccagggatgcagggaccccctggggaacgaggtttgccaggagagaaaggtgaaaggggtactggatcttcaggacctcgggggctgcctgggcccccaggtccacaaggagaatccagaacaggtccaccagggtccacaggttcaagaggtccccctggcccccctggccgtcctggaaactcaggtatccgaggacccccaggtcctcctggatactgtgattcttctcagtgtgccagcatcccatacaacgggcaaagctatccaggttccggctaacacattttctaagtcgccagtgctgcttacagtttgaatacatgaaaatcctgtttctgagatgtttgcgcacgtgcttattaggaaatgagtctgtatggaaatctcaccacagataatggttaacgaaccgggtcgacatcacaaaggagggtggagactctttttactaacttgaatgagacaaaagcagtggtgtcagtttataatcctgatgcatttcagtaataatgtagaaaaacattattttaaaaaagttccaacacacagccatgaggagcctcagttttgaaagaggtgcataataaaactactaaccagaggagtctatgccattttaagaaaaacaattaacctggttaaagagaaatgtcttatgtaaataataaactaattgtggcttgtaaatgatttgtatgtgatcctgtcgactaaaatcacttaacaattctacaataagcttctgcatcaaagcctgccgcttgctctatgccggaataacaccaaatggaatctcctcatctcttgcttgttagcgatgtgtctgattcagggcatctgtctttttgttacttttttgtccgtgtcctctcatttgggttttgtaactgcaattttcaaaccaaagtttaaaatcaccttttcttcctgttttgctgtagtcactggtgttcctcacccaccagctgtaactcagtttgtgtgaggtacagccacagaagatgtcatgtactgtatattacctggtgatagttgcttttcaccccccgagttcagtttctaggagccaatgaaacttcccctcacctcctcatctttccaagttgttctttgaattgaggagtttgaaggcataaacagttacttggggatttgcgaaaatcctacttagttactgcgtttacagttctttggcccagtctctgacccttcccaagtatttgtgcaatgattgtgtttactgctggatttttgaaggtttttttttttaagaaagtgccatttcattatttgattatcaccaaattatctggaaataattgggacattgtaacttatctatttatagttatgagattaagactggagtgccatcaccgcgggtgatgatttagcttttgctgtgtgtgtgtgtgtgtgtgtgccttccaaatcatgccataattgtaatgttgaatcggacagagccttacgtgcccgaggcggggcctacctgcctgagcgcgacccttcatcgtgccggtggagcccgagcggacagcggaatacgaggactacggcgcagacgagcctgcagaggagcctcctgagccccaccggcgctggcggcggccctgccccacggacccgggcagtgaaccagagatcacgcgccgcgccgcgaggcttgggggaggtgttgaaattctcatttacaggtcagatagagcagtgtacgtcttttctgaggtgtttcttccagcgttgctcatccaggagtaccctttctgattgtagagaaccttgtttctgcaggaagcctagctccaagcacgcagtctgtagacatttttgcctttgcccttgaaatgcttgcaaaatactttgttaacaaaagctgcaaagagagaacatgccgtgtgcctttagttagcacagcgggcagcctcagtgaaactcttaggttaagcagttaagtcctggaacccagagctgctgtgtatttcgagcgggcagtttatcttttgctatacttattttcaattcaattacaccacgattcaaataattcccctcctaaaaccaaaaaggagggaaacgtcaactccattgcaattacttatcttcctcttctatctctgttatacgccggggcatagaatgctcgtatacatctctttaacaaccacaaaccttaagccatgtagatgaagttagtgcatcaacgggatacagttccatattgccttaaacctccttgttttagacacactaacatttataccaaattgcagattattctgcagagagggaattgcatgtttgtgttgtatatttagtatgaacttttttcagaatataatatttcttagttatcaaaagtagttggaaaacatttgcaagactatgaacatagaattgctgcttttatattttaactgcagattgtgaatttcactgccttatattatttatttctgaaacaaaagaggcatttttcaataaaactactgaaaatttga

SEQ ID NO: 299405 - DNA, 1939 bp, Homo sapiens
ggtaccccgtttattatttacataagacatttctctttaacccggttaattgtttttcttaaaatggcatagactcctctggttagtagttttatgtaaataataaactaattgtggcttgtaaatgatttgtatgtgatcctgtcgactaaaatcacttaacaattctacaataagcttctgcatcaaagcctgccgcttgctctatgccggaataacaccaaatggaatctcctcatctcttgcttgttagcgatgtgtctgattcagggcatctgtctttttgttacttttttgtccgtgtcctctcatttgggttttgtaactgcaattttcaaaccaaagtttaaaatcaccttttcttcctgttttgctgtagtcactggtgttcctcacccaccagctgtaactcagtttgtgtgaggtacagccacagaagatgtcatgtactgtatattacctggtgatagttgcttttcaccccccgagttcagtttctaggagccaatgaaacttcccctcacctcctcatctttccaagttgttctttgaattgaggagtttgaaggcataaacagttacttggggatttgcgaaaatcctacttagttactgcgtttacagttctttggcccagtctctgacccttcccaagtatttgtgcaatgattgtgtttactgctggatttttgaaggtttttttttttaagaaagtgccatttcattatttgattatcaccaaattatctggaaataattgggacattgtaacttatctatttatagttatgagattaagactggagtgccatcaccgcgggtgatgatttagcttttgctgtgtgtgtgtgtgtgtgtgtgccttccaaatcatgccataattgtaatgttgaatcggacagagccttacgtgcccgaggcggggcctacctgcctgagcgcgacccttcatcgtgccggtggagcccgagcggacagcggaatacgaggactacggcgcagacgagcctgcagaggagcctcctgagccccaccggcgctggcggcggccctgccccacggacccgggcagtgaaccagagatcacgcgccgcgccgcgaggcttgggggaggtgttgaaattctcatttacaggtcagatagagcagtgtacgtcttttctgaggtgtttcttccagcgttgctcatccaggagtaccctttctgattgtagagaaccttgtttctgcaggaagcctagctccaagcacgcagtctgtagacatttttgcctttgcccttgaaatgcttgcaaaatactttgttaacaaaagctgcaaagagagaacatgccgtgtgcctttagttagcacagcgggcagcctcagtgaaactcttaggttaagcagttaagtcctggaacccagagctgctgtgtatttcgagcgggcagtttatcttttgctatacttattttcaattcaattacaccacgattcaaataattcccctcctaaaaccaaaaaggagggaaacgtcaactccattgcaattacttatcttcctcttctatctctgttatacgccggggcatagaatgctcgtatacatctctttaacaaccacaaaccttaagccatgtagatgaagttagtgcatcaacgggatacagttccatattgccttaaacctccttgttttagacacactaacatttataccaaattgcagattattctgcagagagggaattgcatgtttgtgttgtatatttagtatgaacttttttcagaatataatatttcttagttatcaaaagtagttggaaaacatttgcaagactatgaacatagaattgctgcttttatattttaactgcagattgtgaatttcactgccttatattatttatttctgaaacaaaagaggcatttttcaataaaactactgaaaatttga

SEQ ID NO: 299406 - DNA, 1212 bp, Homo sapiens
ccgtttatactgaaggtgatgggggacgcacatctaacagcctgactgttaagtgggatcctgctagtggtcgtgtgcagaaatataggatcacttatcagccttccacaggggaaggcaatgagcaaacgaccacaataggaggacggcagaacagtgtggtcctgcagaaactgaagccagacactccttacactatcaccgtatcctctctgtatcctgatggtgaaggaggtcggatgacgggaagaggcaagaccaaacctctaaacactgtaaggaacctgagagtgtatgacccttctaccagcacctctgaatgtccgctgggaccatgcagagggaaatcctcgtcagtacaagctcttctatgcaccagcagcaggtggtccagaggaactggtaccaatccccgggaataccaattatgccattcttaggaatctgcagccagatactcatccaggagtaccctttctgattgtagagaaccttgtttctgcaggaagcctagctccaagcacgcagtctgtagacatttttgcctttgcccttgaaatgcttgcaaaatactttgttaacaaaagctgcaaagagagaacatgccgtgtgcctttagttagcacagcgggcagcctcagtgaaactcttaggttaagcagttaagtcctggaacccagagctgctgtgtatttcgagcgggcagtttatcttttgctatacttattttcaattcaattacaccacgattcaaataattcccctcctaaaaccaaaaaggagggaaacgtcaactccattgcaattacttatcttcctcttctatctctgttatacgccggggcatagaatgctcgtatacatctctttaacaaccacaaaccttaagccatgtagatgaagttagtgcatcaacgggatacagttccatattgccttaaacctccttgttttagacacactaacatttataccaaattgcagattattctgcagagagggaattgcatgtttgtgttgtatatttagtatgaacttttttcagaatataatatttcttagttatcaaaagtagttggaaaacatttgcaagactatgaacatagaattgctgcttttatattttaactgcagattgtgaatttcactgccttatattatttatttctgaaacaaaagaggcatttttcaataaaactactgaaaatttga

SEQ ID NO: 299407 - DNA, 8847 bp, Homo sapiens
  misc_feature (2424)..(2424): n is a, c, g, or t
  misc_feature (2554)..(2554): n is a, c, g, or t
gcggccgccaggtgctcctggagtgcagcgcctatcgccggggcgtgtgggggccacaccgagcaccagcttctccgacgccgggaagccgctgtcgccgccgctacctctccctgttgccgccgcctcagatctcttcatgccgctgtaagctcggaggccaaggatgcggagtaggcttcccccagcgcttgccgccctgggcgcggccctactcctgtcttccattgaggcagaagttgacccaccttcagacttgaattttaaaattatagatgaaaatactgttcatatgtcatgggcaaaaccagttgatccaattgtgggttacagaataacggtggaccctacaacggatgggcctactaaagaatttaccctttcagctagtaccactgaaactttattgtcagaacttgtacctgaaacagagtatgtggtgacaataacttcatatgatgaagtagaagaaagtgtaccagttataggacaactaacaattcaaacaggtagttcgacaaagccagtggagaagaaacctggaaaaaccgagatacaaaaatgctctgtcagtgcctggactgatttggttttcctcgtggatggctcttggagtgtgggaagaaataatttcaagtacattttagacttcattgctgctcttgtgtctgcttttgacattggggaagagaagacaagagttggagttgttcaatacagctctgacaccaggactgaatttaacttaaatcagtactaccaaagggatgaacttcttgctgcaataaaaaaaattccatataaaggtggcaacacaatgacaggggatgccattgattatttagttaaaaatactttcacggaatctgctggggcaagagttggctttcctaaagtggcaattattattacggatggaaaatcccaggatgaagtggaaattccagcaagagagcttcgtaatgttggagttgaagttttctccttgggcattaaagctgcagatgcaaaagaactcaaacaaattgcctccacaccttcactgaaccatgttttcaatgtggccaactttgatgcaattgtggatattcagaatgagatcatctcccaggtgtgctcaggtgttgatgaacaacttggtgaattggttagtggagaagaagttgttgagcctccttcaaatttgattgccatggaagtctcttcaaaatatgttaagctaaattggaatccatctcctagtccagtgactggctacaaagtcatcctcacaccaatgactgcaggaagccgacagcacgctctgagtgtggggcctcagacaaccacgctcagtgttcgcgacctctcagcagacacagaataccagatcagtgtttccgccatgaagggaatgacatccagtgaacccatttcaataatggagaagactcagccaatgaaagttcaagtggaatgctcacgtggtgtggatataaaagccgatattgtgtttttggttgatggctcctatagcattgggattgcaaactttgttaaagttagagcctttttggaagttcttgtaaaaagttttgaaatttcaccaaatagggtccagattagtcttgtgcaatacagccgggatcctcatactgagttcactttgaaaaaattcaccaaagttgaagatataattgaagcaataaacaccttcccttacagaggaggatctacaaatactggcaaagcaatgacttatgtcagagagaaaatatttgtgcctagcaagggatcaagaagcaatgtgccaaaggtcatgattcttatcacggatgggaaatcatcagatgctttcagagatcctgcgataaaactgaggaattcagatgttgaaatctttgcagttggtgtgaaggatgccgttcgctcagaattggaagctattgcctctcctcctgcagagacccatgtgttcacagtggaagattttgatgcttttcagaggatatcttttgaactcacacagtctatctgccttagaattgagcaagaattggcagctataaagaagaaagcttacgtccctccaaaggatcttagtttttcagaagtgacttcttatggtttcaaaaccaactggtctccagctggagaaaatgttttttcatatcacatcacctacaaggaagcggctggggatgatgaggtcactgtggtggagccagcatcgagcaccagtgttgttctcagcagcctgaagccagagaccttgtatttggtcaatgtgactgcggagtatgaggatggcttcagcattcccttagctggagaggagaccaccgaagaagtaaaaggagcacctcgaaacctaaaggtgacagatgagactacagatagtttcaaaattacttggactcaagctccagggagagttttaagatntcgaattatatatagaccagttgctggtggagagagcagagaagttaccaccccacccaatcagaggaggagaacactggagaacttgattccagacacgaaatatgaagtatctgtaattcctgaatanttctcaggacctggtactccattaactggaaatgcagccactgaagaagttagagggaatccaagagacttaagagtttctgaccctacgacgtctactatgaaattatcttggagtggggcaccaggaaaagtgaaacagtatctcgtcacatataccccagtggcagggggtgaaactcaagaggtcactgtgaggggagatacaaccaatacggtgctgcagggattgaaggaagggacacaatacgccttatctgtgacagcactgtatgcgtctggggctggcgacgccctctttggtgaaggaacaacacttgaagaacgtggttctcctcaagatttagttactaaagacatcactgacacatcaattggggcttattggacatctgctccaggaatggttcgcggttacagggtctcatggaaatcactttatgatgatgttgacactggagagaaaaatctgcctgaagatgcaattcatacgatgatagaaaatctgcagccagagaccaaatacagaatttcagtatttgccacttacagcagtggagaaggagaacctttgactggagatgccacaactgaattatctcaagattccaaaaccctgaaagtagatgaagaaacagaaaacacaatgagagttacatggaaaccagcaccagggaaagtcgtcaactaccgtgttgtctatcgccctcatgggagagggaagcaaatggttgctaaggtgccccccacagtcacttcgacagtgttaaagcgacttcagccacagaccacatatgacatcacagttcttcctatttacaagatgggagaaggaaagcttaggcaaggatcaggaacaacagcttctcggtttaagtctcctagaaacctcaaaacatctgacccaaccatgtcaagcttccgagtgacttgggagcctgcccctggggaagtgaagggttataaagtcacattccaccctacgggggatgacagaagactgggggagttagtggttggaccctatgacaacacagttgttttggaggaacttagggctggtaccacctataaagtaaatgtttttggaatgtttgatggaggagaaagctcaccacttgttggacaagaaatgacaaccctttccgacacaactgttatgccaattttatcttctgggatggagtgtctcaccagagctgaggcagacattgtgttgctggtggatggatcatggagcatcggccgggcaaattttagaaccgtgaggagtttcatttctcgtattgtggaagtctttgacattggccccaaaagagtacaaattgctcttgctcagtatagtggggatcccagaacagagtggcagttaaatgcacacagagacaagaagagcttgttgcaagctgtggcaaacttgccgtacaaaggaggcaatactctcacaggcatggctttgaatttcattcgccaacagaacttcaggacccaagctggcatgagacctcgagctcgaaaaattggtgtgctcattactgatggaaaatcacaagacgatgttgaagcaccttcaaagaaactcaaggatgagggagtggagctgtttgctattggtattaaaaatgctgatgaagtcgaattaaagatgattgcaactgatcctgatgatacccatgactacaatgtggcagattttgagtcactctccaggatagtggatgatctcaccattaatttgtgtaacagtgtcaaaggtccaggtgatttggaagcaccttctaacttagttatttctgagcgaacccatcgttcttttagagtgagctggacaccaccttctgacagtgtggatcgatataaggtggaatactatccagtttctggagggaaacgtcaagaattttatgtgagtcgaatggaaactagcacagtgctgaaagatctgaaacctgaaactgaatatgttgtcaatgtgtattctgtggtagaagatgaatatagtgagcctctgaaggggacagaaaaaaccttgccagtgcctgtagtcagcctgaatatttatgatgttggccctaccaccatgcatgtgcagtggcagcctgtgggaggagctactggctacatcttgtcatacaaacctgttaaggacacagagccaacaagacccaaagaggtgcgtttggggccaacagtgaatgacatgcagctgactgaccttgttcccaacacggagtatgcagtcacagtccaggctgtcctgcacgacctcactagtgaacctgtcactgttcgggaagtcaccttgcctttacccagacctcaggatctgaaactcagagatgtgactcacagcactatgaatgtcttttgggaacctgtgcctggaaaagtgcgtaaatatattgttcgatacaaaacaccagaagaggatgtcaaagaggtagaggtggacagatcagagaccagcacttccctcaaagacctcttctcacagaccttgtacacagtcagcgtttctgcagtacatgacgagggggagtctcctccagtgactgctcaagaaactacccgacccgtgccagccccaacaaacttaaagattactgaagtaacatcagagggtttcagagggacttgggatcatggagcttcagatgtgtctctctacagaataacttggggaccttttggaagctcagataagatggagaccatcttaaatggagatgaaaacactttggtgttcgaaaacctgaaccccaacaccatctatgaagtttccattactgccatctatcctgatgagtcagaaagtgatgacctgattggcagtgagcgcacactgcctatcttaacaacacaagctcccaaaagtgggccacgaaaccttcaagtgtacaatgcaacatctaacagcctgactgttaagtgggatcctgctagtggtcgtgtgcagaaatataggatcacttatcagccttccacaggggaaggcaatgagcaaacgaccacaataggaggacggcagaacagtgtggtcctgcagaaactgaagccagacactccttacactatcaccgtatcctctctgtatcctgatggtgaaggaggtcggatgacgggaagaggcaagaccaaacctctaaacactgtaaggaacctgagagtgtatgacccttctaccagcacctctgaatgtccgctgggaccatgcagagggaaatcctcgtcagtacaagctcttctatgcaccagcagcaggtggtccagaggaactggtaccaatccccgggaataccaattatgccattcttaggaatctgcagccagatacctcatacactgtgactgtagttcccgtttatactgaaggtgatgggggacgcacatcagatactggaaggacattgatgagaggactggcaagaaatgtccaagtatacaatcctacacctaacaggctcggtgttcgctgggaccctgcaccaggacctgtgctgcaatatcgcgttgtgtattctcctgtggatggcacaagaccctcagaatctatagtagtgccaggaaacacgcgcatggtgcatctggagcggctgattccggacacactctattccgtgaaccttgtggctctgtactcggatggagagggaaatcccagccctgcccagggccgaacgctaccacgcagtggaccaaggaacctgagagtctttggtgaaacaaccaatagcctctcggtagcctgggatcatgctgatgggccagttcagcagtacaggatcatctattctcccactgttggtgatccaattgatgaatataccacagtcccaggcagaagaaacaatgtaatactgcagcccctgcaacctgacactccatataaaattactgttattgctgtttatgaagatggagatggtggccatctaacaggaaatggaagaactgtgggactccttcctcctcagaacatacacatctctgacgaatggtatacaagattcagggtgtcctgggatccttcaccttctccagttcttggatataaaatagtatataagccagtgggttccaatgagcccatggaagcctttgttggagaaatgacatcatataccttacacaatctcaatcccagcaccacctacgatgtgaatgtttatgctcaatatgattctggactcagtgtccccttgacagatcaaggcactacattatatttaaatgtaacagatctgaaaacttaccagattgggtgggatacattctgtgtcaaatggtcacctcaccgggcagccacctcctacaggctaaaactaagccctgcagatggaacaaggggacaagaaattacagtgcgtggatcagaaaccagtcactgcttcactggcctttcaccagacactgattatggtgtcactgtttttgtgcagacaccaaatctcgagggaccaggagtctctgttaaagaacataccagtaagtttttgaggaatctggaaagctttcataaggctttagaatagaatgctctaggtaaggaagacttaagtgaatcctgtgcaggtacctctccgtaggggtagcaataatgatgggatgatggcagattcctgaatgtggagtctaaagctggttcaggacctttttctgtagcaatttgcaagttgtccctgttattgagttggtgctactttgaggaagggctaaaggagggagagatggctctcgctgagaaggtgaattcatattagtgacttttactcatttgaccctatctgaaggccttacattttccctttagatctttattttctgtagctgtagtggatgttgaatgactaccagtgacatcaatttggatggaataaaatccccagcatgtcagtaccgatgacaatggtgtctcattttgtacaacttgatttggtatccaggatttaaattgctcttaaaatttactttctgggatatcaaatgtgcacatggtgtgtttttataattattatttttaaattttagctgtgaaaccaacagaagcccctacagagccacccacacctcctccccctcccaccattccaccagcccgggatgtatgcaaaggggccaaggcagatattgtgttcttgactgatgcctcctggagcattggggacgataattttaacaaagttgtaaaattcatcttcaatactgtgggaggctttgatgaaatcagtcctgctgggattcaggtttcatttgtgcaatacagcgatgaggtcaagtctgagttcaagctgaacacgtacaatgacaaggccctagcccttggggccctccagaatattaggtacagaggaggaaacacaagaacaggcaaggccctcacgtttatcaaggagaaagtcttgacttgggagagcggcatgaggaagaatgtccctaaggtgttggttgtggtcacggacggtcggtcccaggatgaggtcaagaaggcggctttggtcatccagcagtcagggttcagtgtctttgtagttggtgtggctgatgtcgactacaatgagcttgccaacattgccagcaaaccaagtgaacggcacgtgttcattgtggacgactttgaatcttttgagaagatcgaagacaatcttattacatttgtttgtgaaactgccacttcaagttgtcctctcatttatttggatggctacacctcaccaggttttaaaatgcttgaagcatacaacctgacagaaaagaattttgcttctgtacaaggagtatctttggagtcagggtctttccccagctactcagcatacaggattcagaagaatgcgtttgtgaatcagcctacagcagacctacacccaaatggactccctccttcatacacgattatattattattcagacttctcccagaaactcccagtgacccttttgcaatttggcaaatcacagacagagactacaaaccacaagttggagtgattgcagatccttctagcaagacgttatcattctttaacaaggatacaagaggcgaggtgcaaactgttacatttgacacagaagaagtaaagacattattttatggaagttttcacaaggtaaaaacataagattatttgagtcttatttctagaaaaaaatataaaacaaatttattatttattaaaatgtcatgttaaattggcagaattataactatgtcttttaaaaataaaatcttgttttagagaatttggttaattcaaataatatttaaaataaaacaatatactaatcaagagataa

SEQ ID NO: 299408 - DNA, 9110 bp, Homo sapiens
  misc_feature (2424)..(2424): n is a, c, g, or t
  misc_feature (2554)..(2554): n is a, c, g, or t
  misc_feature (7801)..(7801): n is a, c, g, or t
  misc_feature (7946)..(7946): n is a, c, g, or t
gcggccgccaggtgctcctggagtgcagcgcctatcgccggggcgtgtgggggccacaccgagcaccagcttctccgacgccgggaagccgctgtcgccgccgctacctctccctgttgccgccgcctcagatctcttcatgccgctgtaagctcggaggccaaggatgcggagtaggcttcccccagcgcttgccgccctgggcgcggccctactcctgtcttccattgaggcagaagttgacccaccttcagacttgaattttaaaattatagatgaaaatactgttcatatgtcatgggcaaaaccagttgatccaattgtgggttacagaataacggtggaccctacaacggatgggcctactaaagaatttaccctttcagctagtaccactgaaactttattgtcagaacttgtacctgaaacagagtatgtggtgacaataacttcatatgatgaagtagaagaaagtgtaccagttataggacaactaacaattcaaacaggtagttcgacaaagccagtggagaagaaacctggaaaaaccgagatacaaaaatgctctgtcagtgcctggactgatttggttttcctcgtggatggctcttggagtgtgggaagaaataatttcaagtacattttagacttcattgctgctcttgtgtctgcttttgacattggggaagagaagacaagagttggagttgttcaatacagctctgacaccaggactgaatttaacttaaatcagtactaccaaagggatgaacttcttgctgcaataaaaaaaattccatataaaggtggcaacacaatgacaggggatgccattgattatttagttaaaaatactttcacggaatctgctggggcaagagttggctttcctaaagtggcaattattattacggatggaaaatcccaggatgaagtggaaattccagcaagagagcttcgtaatgttggagttgaagttttctccttgggcattaaagctgcagatgcaaaagaactcaaacaaattgcctccacaccttcactgaaccatgttttcaatgtggccaactttgatgcaattgtggatattcagaatgagatcatctcccaggtgtgctcaggtgttgatgaacaacttggtgaattggttagtggagaagaagttgttgagcctccttcaaatttgattgccatggaagtctcttcaaaatatgttaagctaaattggaatccatctcctagtccagtgactggctacaaagtcatcctcacaccaatgactgcaggaagccgacagcacgctctgagtgtggggcctcagacaaccacgctcagtgttcgcgacctctcagcagacacagaataccagatcagtgtttccgccatgaagggaatgacatccagtgaacccatttcaataatggagaagactcagccaatgaaagttcaagtggaatgctcacgtggtgtggatataaaagccgatattgtgtttttggttgatggctcctatagcattgggattgcaaactttgttaaagttagagcctttttggaagttcttgtaaaaagttttgaaatttcaccaaatagggtccagattagtcttgtgcaatacagccgggatcctcatactgagttcactttgaaaaaattcaccaaagttgaagatataattgaagcaataaacaccttcccttacagaggaggatctacaaatactggcaaagcaatgacttatgtcagagagaaaatatttgtgcctagcaagggatcaagaagcaatgtgccaaaggtcatgattcttatcacggatgggaaatcatcagatgctttcagagatcctgcgataaaactgaggaattcagatgttgaaatctttgcagttggtgtgaaggatgccgttcgctcagaattggaagctattgcctctcctcctgcagagacccatgtgttcacagtggaagattttgatgcttttcagaggatatcttttgaactcacacagtctatctgccttagaattgagcaagaattggcagctataaagaagaaagcttacgtccctccaaaggatcttagtttttcagaagtgacttcttatggtttcaaaaccaactggtctccagctggagaaaatgttttttcatatcacatcacctacaaggaagcggctggggatgatgaggtcactgtggtggagccagcatcgagcaccagtgttgttctcagcagcctgaagccagagaccttgtatttggtcaatgtgactgcggagtatgaggatggcttcagcattcccttagctggagaggagaccaccgaagaagtaaaaggagcacctcgaaacctaaaggtgacagatgagactacagatagtttcaaaattacttggactcaagctccagggagagttttaagatntcgaattatatatagaccagttgctggtggagagagcagagaagttaccaccccacccaatcagaggaggagaacactggagaacttgattccagacacgaaatatgaagtatctgtaattcctgaatanttctcaggacctggtactccattaactggaaatgcagccactgaagaagttagagggaatccaagagacttaagagtttctgaccctacgacgtctactatgaaattatcttggagtggggcaccaggaaaagtgaaacagtatctcgtcacatataccccagtggcagggggtgaaactcaagaggtcactgtgaggggagatacaaccaatacggtgctgcagggattgaaggaagggacacaatacgccttatctgtgacagcactgtatgcgtctggggctggcgacgccctctttggtgaaggaacaacacttgaagaacgtggttctcctcaagatttagttactaaagacatcactgacacatcaattggggcttattggacatctgctccaggaatggttcgcggttacagggtctcatggaaatcactttatgatgatgttgacactggagagaaaaatctgcctgaagatgcaattcatacgatgatagaaaatctgcagccagagaccaaatacagaatttcagtatttgccacttacagcagtggagaaggagaacctttgactggagatgccacaactgaattatctcaagattccaaaaccctgaaagtagatgaagaaacagaaaacacaatgagagttacatggaaaccagcaccagggaaagtcgtcaactaccgtgttgtctatcgccctcatgggagagggaagcaaatggttgctaaggtgccccccacagtcacttcgacagtgttaaagcgacttcagccacagaccacatatgacatcacagttcttcctatttacaagatgggagaaggaaagcttaggcaaggatcaggaacaacagcttctcggtttaagtctcctagaaacctcaaaacatctgacccaaccatgtcaagcttccgagtgacttgggagcctgcccctggggaagtgaagggttataaagtcacattccaccctacgggggatgacagaagactgggggagttagtggttggaccctatgacaacacagttgttttggaggaacttagggctggtaccacctataaagtaaatgtttttggaatgtttgatggaggagaaagctcaccacttgttggacaagaaatgacaaccctttccgacacaactgttatgccaattttatcttctgggatggagtgtctcaccagagctgaggcagacattgtgttgctggtggatggatcatggagcatcggccgggcaaattttagaaccgtgaggagtttcatttctcgtattgtggaagtctttgacattggccccaaaagagtacaaattgctcttgctcagtatagtggggatcccagaacagagtggcagttaaatgcacacagagacaagaagagcttgttgcaagctgtggcaaacttgccgtacaaaggaggcaatactctcacaggcatggctttgaatttcattcgccaacagaacttcaggacccaagctggcatgagacctcgagctcgaaaaattggtgtgctcattactgatggaaaatcacaagacgatgttgaagcaccttcaaagaaactcaaggatgagggagtggagctgtttgctattggtattaaaaatgctgatgaagtcgaattaaagatgattgcaactgatcctgatgatacccatgactacaatgtggcagattttgagtcactctccaggatagtggatgatctcaccattaatttgtgtaacagtgtcaaaggtccaggtgatttggaagcaccttctaacttagttatttctgagcgaacccatcgttcttttagagtgagctggacaccaccttctgacagtgtggatcgatataaggtggaatactatccagtttctggagggaaacgtcaagaattttatgtgagtcgaatggaaactagcacagtgctgaaagatctgaaacctgaaactgaatatgttgtcaatgtgtattctgtggtagaagatgaatatagtgagcctctgaaggggacagaaaaaaccttgccagtgcctgtagtcagcctgaatatttatgatgttggccctaccaccatgcatgtgcagtggcagcctgtgggaggagctactggctacatcttgtcatacaaacctgttaaggacacagagccaacaagacccaaagaggtgcgtttggggccaacagtgaatgacatgcagctgactgaccttgttcccaacacggagtatgcagtcacagtccaggctgtcctgcacgacctcactagtgaacctgtcactgttcgggaagtcaccttgcctttacccagacctcaggatctgaaactcagagatgtgactcacagcactatgaatgtcttttgggaacctgtgcctggaaaagtgcgtaaatatattgttcgatacaaaacaccagaagaggatgtcaaagaggtagaggtggacagatcagagaccagcacttccctcaaagacctcttctcacagaccttgtacacagtcagcgtttctgcagtacatgacgagggggagtctcctccagtgactgctcaagaaactacccgacccgtgccagccccaacaaacttaaagattactgaagtaacatcagagggtttcagagggacttgggatcatggagcttcagatgtgtctctctacagaataacttggggaccttttggaagctcagataagatggagaccatcttaaatggagatgaaaacactttggtgttcgaaaacctgaaccccaacaccatctatgaagtttccattactgccatctatcctgatgagtcagaaagtgatgacctgattggcagtgagcgcacactgcctatcttaacaacacaagctcccaaaagtgggccacgaaaccttcaagtgtacaatgcaacatctaacagcctgactgttaagtgggatcctgctagtggtcgtgtgcagaaatataggatcacttatcagccttccacaggggaaggcaatgagcaaacgaccacaataggaggacggcagaacagtgtggtcctgcagaaactgaagccagacactccttacactatcaccgtatcctctctgtatcctgatggtgaaggaggtcggatgacgggaagaggcaagaccaaacctctaaacactgtaaggaacctgagagtgtatgacccttctaccagcacctctgaatgtccgctgggaccatgcagagggaaatcctcgtcagtacaagctcttctatgcaccagcagcaggtggtccagaggaactggtaccaatccccgggaataccaattatgccattcttaggaatctgcagccagatacctcatacactgtgactgtagttcccgtttatactgaaggtgatgggggacgcacatcagatactggaaggacattgatgagaggactggcaagaaatgtccaagtatacaatcctacacctaacaggctcggtgttcgctgggaccctgcaccaggacctgtgctgcaatatcgcgttgtgtattctcctgtggatggcacaagaccctcagaatctatagtagtgccaggaaacacgcgcatggtgcatctggagcggctgattccggacacactctattccgtgaaccttgtggctctgtactcggatggagagggaaatcccagccctgcccagggccgaacgctaccacgcagtggaccaaggaacctgagagtctttggtgaaacaaccaatagcctctcggtagcctgggatcatgctgatgggccagttcagcagtacaggatcatctattctcccactgttggtgatccaattgatgaatataccacagtcccaggcagaagaaacaatgtaatactgcagcccctgcaacctgacactccatataaaattactgttattgctgtttatgaagatggagatggtggccatctaacaggaaatggaagaactgtgggactccttcctcctcagaacatacacatctctgacgaatggtatacaagattcagggtgtcctgggatccttcaccttctccagttcttggatataaaatagtatataagccagtgggttccaatgagcccatggaagcctttgttggagaaatgacatcatataccttacacaatctcaatcccagcaccacctacgatgtgaatgtttatgctcaatatgattctggactcagtgtccccttgacagatcaaggcactacattatatttaaatgtaacagatctgaaaacttaccagattgggtgggatacattctgtgtcaaatggtcacctcaccgggcagccacctcctacaggctaaaactaagccctgcagatggaacaaggggacaagaaattacagtgcgtggatcagaaaccagtcactgcttcactggcctttcaccagacactgattatggtgtcactgtttttgtgcagacaccaaatctcgagggaccaggagtctctgttaaagaacataccagtaagtttttgaggaatctggaaagctttcataaggctttagaatagaatgctctaggtaaggaagacttaagtgaatcctgtgcaggtacctctccgtaggggtagcaataatgatgggatgatggcagattcctgaatgtggagtctaaagctggttcaggacctttttctgtagcaatttgcaagttgtccctgttattgagttggtgctactttgaggaagggctaaaggagggagagatggctctcgctgagaaggtgaattcatattagtgacttttactcatttgaccctatctgaaggccttacattttccctttagatctttattttctgtagctgtagtggatgttgaatgactaccagtgacatcaatttggatggaataaaatccccagcatgtcagtaccgatgacaatggtgtctcattttgtacaacttgatttggtatccaggatttaaattgctcttaaaatttactttctgggatatcaaatgtgcacatggtgtgtttttataattattatttttaaattttagctgtgaaaccaacagaagcccctacagagccacccacacctcctccccctcccaccattccaccagcccgggatggtaagtacagctaaataggcaatacgttcagctgatagggagttacagacttcttatttacgctgcatgtgcatcatttacaattaatatagaacatttctgatctattattgctgctgaagagtttttagattgaaagaaaagntaaccagtaatttgtttctctccatctctgggcacattttggtgtgaataaaatcagtcataaattattccagatcttcagctggaagtctgtttcctcagttttacagatttaggtcttccatggtccatagttacatggtggncatttctttctgctagctgctggcatcagtaagcgctgtgaacccttttggctatatttgcgaccgaagccctgaggctgttggctttaaaattcctggtgtccaacctgagaagttccctggattatacaatgctaaaaaattttccattcaccaaaatttgaaagataattgtaacttgcagtgaactggtgaaacgacatactgatttattaaggttgatctctcagcatttgagggcaattctctagcactttgtcaaattaaatttagttaaataactactgtattattcttttctcatatgctgtttccagcatttaatagaaagcatttcagatatttttattttatcttagaaggatgtcgaacgttacaacttcgttaaacctattatataagtaaaattaaaaattaaaagtgtattattgtggggtaaaataataatggattcctttaaattagatacagaaagaaattcagtaaataatcttggtttaaaaacaagttttttctttttaaataggctttattttctagagtagttttaggttcatagcaacattgcagggatgatgcagagatttttcatctcccagacagactgcccttccccacacatgcccagcctcctccactattaacatcccacatctgagtggtacgtttgttacaaccgatgaacctacattgacacatcatcaccacccaaagtccacagtttgcgttagggttcactcttggtgttatacttctatatgctaagtttttataaactaaaattttgttaattgtttttggaattttttcttagcctctaagtctagatattccaataaaaatcttctcctttcctgcatatgattctagtggcttaatttaaattttacaaaggacttggccaggtgcggtggctcacgcctgtaatcccagcactttgggaggccgggacaggtggatcgagaccatcatggccaacatggttaaacccgtctctgctaaaaatagagaaattagctgggcgtggtggcacatgcctgtagtcccagctactcaggaggctgaggcaggagaatcacttgaacctgggaggtggagtttgcagtgagccaagatcatcacaccactgcactccagcctgaagacagagcaagaccctgtcta

SEQ ID NO: 299409 - DNA, 5527 bp, Homo sapiens
  misc_feature (2424)..(2424): n is a, c, g, or t
  misc_feature (2554)..(2554): n is a, c, g, or t
gcggccgccaggtgctcctggagtgcagcgcctatcgccggggcgtgtgggggccacaccgagcaccagcttctccgacgccgggaagccgctgtcgccgccgctacctctccctgttgccgccgcctcagatctcttcatgccgctgtaagctcggaggccaaggatgcggagtaggcttcccccagcgcttgccgccctgggcgcggccctactcctgtcttccattgaggcagaagttgacccaccttcagacttgaattttaaaattatagatgaaaatactgttcatatgtcatgggcaaaaccagttgatccaattgtgggttacagaataacggtggaccctacaacggatgggcctactaaagaatttaccctttcagctagtaccactgaaactttattgtcagaacttgtacctgaaacagagtatgtggtgacaataacttcatatgatgaagtagaagaaagtgtaccagttataggacaactaacaattcaaacaggtagttcgacaaagccagtggagaagaaacctggaaaaaccgagatacaaaaatgctctgtcagtgcctggactgatttggttttcctcgtggatggctcttggagtgtgggaagaaataatttcaagtacattttagacttcattgctgctcttgtgtctgcttttgacattggggaagagaagacaagagttggagttgttcaatacagctctgacaccaggactgaatttaacttaaatcagtactaccaaagggatgaacttcttgctgcaataaaaaaaattccatataaaggtggcaacacaatgacaggggatgccattgattatttagttaaaaatactttcacggaatctgctggggcaagagttggctttcctaaagtggcaattattattacggatggaaaatcccaggatgaagtggaaattccagcaagagagcttcgtaatgttggagttgaagttttctccttgggcattaaagctgcagatgcaaaagaactcaaacaaattgcctccacaccttcactgaaccatgttttcaatgtggccaactttgatgcaattgtggatattcagaatgagatcatctcccaggtgtgctcaggtgttgatgaacaacttggtgaattggttagtggagaagaagttgttgagcctccttcaaatttgattgccatggaagtctcttcaaaatatgttaagctaaattggaatccatctcctagtccagtgactggctacaaagtcatcctcacaccaatgactgcaggaagccgacagcacgctctgagtgtggggcctcagacaaccacgctcagtgttcgcgacctctcagcagacacagaataccagatcagtgtttccgccatgaagggaatgacatccagtgaacccatttcaataatggagaagactcagccaatgaaagttcaagtggaatgctcacgtggtgtggatataaaagccgatattgtgtttttggttgatggctcctatagcattgggattgcaaactttgttaaagttagagcctttttggaagttcttgtaaaaagttttgaaatttcaccaaatagggtccagattagtcttgtgcaatacagccgggatcctcatactgagttcactttgaaaaaattcaccaaagttgaagatataattgaagcaataaacaccttcccttacagaggaggatctacaaatactggcaaagcaatgacttatgtcagagagaaaatatttgtgcctagcaagggatcaagaagcaatgtgccaaaggtcatgattcttatcacggatgggaaatcatcagatgctttcagagatcctgcgataaaactgaggaattcagatgttgaaatctttgcagttggtgtgaaggatgccgttcgctcagaattggaagctattgcctctcctcctgcagagacccatgtgttcacagtggaagattttgatgcttttcagaggatatcttttgaactcacacagtctatctgccttagaattgagcaagaattggcagctataaagaagaaagcttacgtccctccaaaggatcttagtttttcagaagtgacttcttatggtttcaaaaccaactggtctccagctggagaaaatgttttttcatatcacatcacctacaaggaagcggctggggatgatgaggtcactgtggtggagccagcatcgagcaccagtgttgttctcagcagcctgaagccagagaccttgtatttggtcaatgtgactgcggagtatgaggatggcttcagcattcccttagctggagaggagaccaccgaagaagtaaaaggagcacctcgaaacctaaaggtgacagatgagactacagatagtttcaaaattacttggactcaagctccagggagagttttaagatntcgaattatatatagaccagttgctggtggagagagcagagaagttaccaccccacccaatcagaggaggagaacactggagaacttgattccagacacgaaatatgaagtatctgtaattcctgaatanttctcaggacctggtactccattaactggaaatgcagccactgaagaagttagagggaatccaagagacttaagagtttctgaccctacgacgtctactatgaaattatcttggagtggggcaccaggaaaagtgaaacagtatctcgtcacatataccccagtggcagggggtgaaactcaagaggtcactgtgaggggagatacaaccaatacggtgctgcagggattgaaggaagggacacaatacgccttatctgtgacagcactgtatgcgtctggggctggcgacgccctctttggtgaaggaacaacacttgaagaacgtggttctcctcaagatttagttactaaagacatcactgacacatcaattggggcttattggacatctgctccaggaatggttcgcggttacagggtctcatggaaatcactttatgatgatgttgacactggagagaaaaatctgcctgaagatgcaattcatacgatgatagaaaatctgcagccagagaccaaatacagaatttcagtatttgccacttacagcagtggagaaggagaacctttgactggagatgccacaactgaattatctcaagattccaaaaccctgaaagtagatgaagaaacagaaaacacaatgagagttacatggaaaccagcaccagggaaagtcgtcaactaccgtgttgtctatcgccctcatgggagagggaagcaaatggttgctaaggtgccccccacagtcacttcgacagtgttaaagcgacttcagccacagaccacatatgacatcacagttcttcctatttacaagatgggagaaggaaagcttaggcaaggatcaggaacaacagcttctcggtttaagtctcctagaaacctcaaaacatctgacccaaccatgtcaagcttccgagtgacttgggagcctgcccctggggaagtgaagggttataaagtcacattccaccctacgggggatgacagaagactgggggagttagtggttggaccctatgacaacacagttgttttggaggaacttagggctggtaccacctataaagtaaatgtttttggaatgtttgatggaggagaaagctcaccacttgttggacaagaaatgacaaccctttccgacacaactgttatgccaattttatcttctgggatggagtgtctcaccagagctgaggcagacattgtgttgctggtggatggatcatggagcatcggccgggcaaattttagaaccgtgaggagtttcatttctcgtattgtggaagtctttgacattggccccaaaagagtacaaattgctcttgctcagtatagtggggatcccagaacagagtggcagttaaatgcacacagagacaagaagagcttgttgcaagctgtggcaaacttgccgtacaaaggaggcaatactctcacaggcatggctttgaatttcattcgccaacagaacttcaggacccaagctggcatgagacctcgagctcgaaaaattggtgtgctcattactgatggaaaatcacaagacgatgttgaagcaccttcaaagaaactcaaggatgagggagtggagctgtttgctattggtattaaaaatgctgatgaagtcgaattaaagatgattgcaactgatcctgatgatacccatgactacaatgtggcagattttgagtcactctccaggatagtggatgatctcaccattaatttgtgtaacagtgtcaaaggtccaggtgatttggaagcaccttctaacttagttatttctgagcgaacccatcgttcttttagagtgagctggacaccaccttctgacagtgtggatcgatataaggtggaatactatccagtttctggagggaaacgtcaagaattttatgtgagtcgaatggaaactagcacagtgctgaaagatctgaaacctgaaactgaatatgttgtcaatgtgtattctgtggtagaagatgaatatagtgagcctctgaaggggacagaaaaaaccttgccagtgcctgtagtcagcctgaatatttatgatgttggccctaccaccatgcatgtgcagtggcagcctgtgggaggagctactggctacatcttgtcatacaaacctgttaaggacacagagccaacaagacccaaagaggtgcgtttggggccaacagtgaatgacatgcagctgactgaccttgttcccaacacggagtatgcagtcacagtccaggctgtcctgcacgacctcactagtgaacctgtcactgttcgggaagtcaccttgcctttacccagacctcaggatctgaaactcagagatgtgactcacagcactatgaatgtcttttgggaacctgtgcctggaaaagtgcgtaaatatattgttcgatacaaaacaccagaagaggatgtcaaagaggtagaggtggacagatcagagaccagcacttccctcaaagacctcttctcacagaccttgtacacagtcagcgtttctgcagtacatgacgagggggagtctcctccagtgactgctcaagaaactacccgacccgtgccagccccaacaaacttaaagattactgaagtaacatcagagggtttcagagggacttgggatcatggagcttcagatgtgtctctctacagaataacttggggaccttttggaagctcagataagatggagaccatcttaaatggagatgaaaacactttggtgttcgaaaacctgaaccccaacaccatctatgaagtttccattactgccatctatcctgatgagtcagaaagtgatgacctgattggcagtgagcgcacactgcctatcttaacaacacaaggtaagaatttaatttgatgaattgtttgaatgaacaaataatgaatgaatgtataaatgaaaagtaccataagatacataataaataggtcatctgcttttaaatcctaa

SEQ ID NO: 299410 - DNA, 544 bp, Homo sapiens
  misc_feature (525)..(526): n is a, c, g, or t
gcggccgccaggtgctcctggagtgcagcgcctatcgccggggcgtgtgggggccacaccgagcaccagcttctccgacgccgggaagccgctgtcgccgccgctacctctccctgttgccgccgcctcagatctcttcatgccgctgtaagctcggaggccaaggatgcggagtaggcttcccccagcgcttgccgccctgggcgcggccctactcctgtcttccattgaggcagaagttgacccaccttcagacttgaattttaaaattatagatgaaaatactgttcatatgtcatgggcaaaaccagttgatccaattgtgggttacagaataacggtggaccctacaacggatgggcctactaaagaatttaccctttcagctagtaccactgaaactttattgtcagaacttgtacctgaaacagagtatgtggtgacaataacttcatatgatgaagtagaagaaagtgtaccagttataggacaactaacaattcaaacaggtttcttctccactgnntttgtcgaacctcgtgcc

SEQ ID NO: 299411 - DNA, 319 bp, Homo sapiens
cccaggatataactttgatgtagtgcacatgcataagtaaagtaacaaagtgtttttcaagtcatttttttaaataatgggttttgatgatgttgtcattttttaatgaagttagagggaatccaagagacttaagagtttctgaccctacgacgtctactatgaaattatcttggagtggggcaccaggaaaagtgaaacagtatctcgtcacatataccccagtggcagggggtgaaactcaagaggtcactgtgaggggagatacaaccaatacggtgctgcagggattgaaggaagggacacaatacgccttatc

SEQ ID NO: 299412 - DNA, 3767 bp, Homo sapiens
ggggacgcggcacagatagggggaagccggagtaatggttttcgggcaagtggatgttggagagcacacacaggagttggggggcgggggagggcctggggttggggagggctcgaactcggggctgctgggtagtccaggagggcgcggtaaggctggggtgtcctggtgagaactggagaggatctacccgggtccctgcctggccagtggggaaacaccggtcccccaggcaccttcacctaaccagagcggggatttccaccgcccctcatgccgccctttggaggaaagtgaaagtgaaaggaggaagaggaggcttcatggctgaggaggtcgcagcgccatgaagtccctgtctctgctcctcgctgtggctttgggcctggcgaccgccgtctcagcaggacccgcggtgatcgagtgttggttcgtggaggatgcgagcggaaagggcctggccaagagacccggtgcactgctgttgcgccagggaccgggggaaccgccgccccggccggacctcgaccctgagctctatctcagtgtacacgaccccgcgggcgccctccaggctgccttcaggcggtatccccggggcgcccccgcaccacactgcgagatgagccgcttcgtgcctctccccgcctctgcgaaatgggccagcggcctgacccccgcgcagaactgcccgcgggccctggatggggcttggctgatggtcagcatatccagcccagtcctcagcctctccagcctcttgcgaccacagccagagcctcagcaggagcctgttctcatcaccatggcaacagtggtactgactgtcctcacccacacccctgcccctcgagtgagactgggacaagatgctctgctggacttgagctttgcctacatgccccccacctccgaggccgcctcatctctggctccgggtccccctccctttgggctagagtggcgacgccagcacctgggtaagggacatctgctcctggctgcaactcctgggctgaatggccagatgccagcagcccaagaaggggccgtggcatttgctgcttgggatgatgatgagccatggggcccatggaccggaaatgggaccttctggctgcctagagttcaaccctttcaggagggcacctatctggccaccatacacctgccatacctgcaaggacaggtcaccctggagcttgctgtgtacaaaccccccaaagtgtccctgatgccagcaacccttgcacgggccgccccaggggaggcacccccggaattgctctgccttgtgtcccacttctacccttctgggggcctggaggtggagtgggaactccggggtggcccagggggccgctctcagaaggccgaggggcagaggtggctctcggccctgcgccaccattccgatggctctgtcagcctctctgggcacttgcagccgcccccagtcaccactgagcagcatggggcacgctatgcctgtcgaattcaccatcccagcctgcctgcctcggggcgcagcgctgaggtcaccctggaggtagcaggtctttcagggccctcccttgaggacagcgtaggccttttcctgtctgcctttcttctgcttgggctcttcaaggcactgggctgggctgctgtctacctgtccacctgcaaggattcaaagaagaaagcagagtgagggcactcactgccatcctgtggaagccaccatcatctctggcccaagcttctgtagtagctccctaaaataataccctatcatctgctcctaatccctccaatctctctccactgagtggctggaatgcttttttttttttctttcacttatataagggataatttttcttttttttttttttttgagacggagtctcacctcttccgcccaggctgcagtgcagtggcatgatcttggcttactgcaacctccgcctcctgggttcaagcaattctgtggcttcagcctccggagtagctgggattacaggcacatgccaccacacccagtgaatttttgtatttttagtagagacggggtttcaccatgttggccaggctggtcttgaattcctgacctcaggtgatctgcccacctcagcctcccaaagtgctgggattacaggcgtgagccaccacaccaggcccgagaaatgcttttttaaaaaacacacatcttatggcattcaccttcttggagctctaggacagtggttctcaaaatttttttctctcaggacctcttaaaaatcatcaaggaccccaaaaagcttttgggtatgtgggttatagctatcaatatttatggtactagaacttaaaagtgagaaaaatttaaaacacgagaatacataggcacacattctattcatcgtgggaaccatggtgtcaatacatatcatgtagcttctgaaaaactccactgtacacttatagaatgaagaaggcaaaaaactttttttttttttttttggagacggagtctcgctctgtcgcccaggctggagtgcagtggcgcgatctcggctcactgcaagctccgcctctcgggttcacgccattctcctgcctcagcctcccaagtagctcggactacaggcgtcctccaccatgcctggctaatattttgtattttttagtagagacggggtttcaccgtgttagccaggatggtctcgatctcctaacctggtgatccgcccgcctcggcctcccaaagtattgggattacccgcgtgagccaccgcgcccggctgcaaataatctttctttttttctttttttctgagacagagtctcgctctgttgcccaggctggagtgcagtggcacgatctcggctcacggcacgctccgcctcccgggttcacgccattctcctgcctcagcttcccgagtagctgggactacaggggcccgccaccacgcccggctaactttttgtgtttttagtagagacggggtttcaccgtgttagccaggatggtctcgatctcctgaccttgtgatctgcccgcctcggcctcccaaagtgctgggattacaggcgtgagccaccgcgcccggcggcgaaacacgatattgtactaacatcttaattttgttataaaatctcacaaaccccctgacatagtctcagagatctgtagggccgaggttacatttggagaacccgtactctagggccaaatccattcttcttgccctggctcacttgtcccccccaccgccccgcgctggagccactgcctagttcttcagccctagatggtgctcgccagacctcctctcaatgctcatcacacacagggctattcctttcctccaatgaaccaaacgcctcccgcccacctccaggtcccagtcctctgttccctttgcctggtccacccttgccctccctgggtcgcagacgaggtcggcctcgtcattccccgcagaccgccgcgcgtccctcttgtgcggttcaccacagttgtatttaagtgatcgtgtgagtcgtcgttaaatgcctgtctccccgcggatcatgggctcctcgaggacagggaccggcctgtctgtccactgctgtaaccccgcgccggcatagggacctaaggcccactggagggcgctcatcaagtagctgctggatgttgacgaaggaagcggcggcgcagctcagggatctccgagtcaggacggtcggccagacccacggggtaacgggtctaatcgtgtaggaataaagctgtattccagtgctccaaa

SEQ ID NO: 299413 - DNA, 606 bp, Homo sapiens
cgctgtggcctggctcgggacgccccgaggaagcagacccggcggtgcagtccagcacagccagcgctgggcccccgtcctgacctgagcggttaccaccagtccccagcgctctgactggatggctgctagtccaccagagcccctgctcatcacacacagggctattcctttcctccaatgaaccaaacgcctcccgcccacctccaggtcccagtcctctgttccctttgcctggtccacccttgccctccctgggtcgcagacgaggtcggcctcgtcattccccgcagaccgccgcgcgtccctcttgtgcggttcaccacagttgtatttaagtgatcgtgtgagtcgtcgttaaatgcctgtctccccgcggatcatgggctcctcgaggacagggaccggcctgtctgtccactgctgtaaccccgcgccggcatagggacctaaggcccactggagggcgctcatcaagtagctgctggatgttgacgaaggaagcggcggcgcagctcagggatctccgagtcaggacggtcggccagacccacggggtaacgggtctaatcgtgtaggaataaagctgtattccagtgctccaaa

SEQ ID NO: 299414 - DNA, 287 bp, Homo sapiens
gcggccgcctactactactactgctcgaattcaagcttctaacgatgtacggccccgcggatcatgggctcctcgaggacagggaccggcctgtctgtccactgctgtaaccccgcgccggcatagggacctaaggcccactggagggcgctcatcaagtagctgctggatgttgacgaaggaagcggcggcgcagctcagggatctccgagtcaggacggtcggccagacccacggggtaacgggtctaatcgtgtaggaataaagctgtattccagtgctccaaa

SEQ ID NO: 299415 - DNA, 1048 bp, Homo sapiens
gaggtggccccactggagccgatgccagggtgggagtggggcaggtcaccagacatacaaaccgctcctcactcgcgtccctatacgccaggcctggcgaccgccgtctcagcaggacccgcggtgatcgagtgttggttcgtggaggatgcgagcggaaagggcctggccaagagacccggtgcactgctgttgcgccagggaccgggggaaccgccgccccggccggacctcgaccctgagctctatctcagtgtacacgaccccgcgggcgccctccaggctgccttcaggcggtatccccggggcgcccccgcaccacactgcgagatgagccgcttcgtgcctctccccgcctctgcgaaatgggccagcggcctgacccccgcgcagaactgcccgcgggccctggatggggcttggctgatggtcagcatatccagcccagtcctcagcctctccagcctcttgcgaccacagccagagcctcagcaggagcctgttctcatcaccatggcaacaggtagctggggaggggaggtggagaagggtgggtagattctaagggtccagatcagccggtggtctcgctttatggacttgagcaagacatttcgccaatcggggttcagtttcctttttttgttaagagaggtggtttggctagaatgaatcaatctctaccgctccttctagccctcacccagttaaaaaaaaaaaacaaaaaaaaaactgcagcttggcagggggtagggggaaagcagggccgggcaggggggttactttctggtgtttcgaagggcggggctttgaagaggtggggtttcccgacaccagaccttgagagacttgtcaggtgatgcgaggtgggaggggttcagaagcaggagcgttttttctctgctcttcccagatctgtgtcttgctctgcaccctcagctttgcgggtcactctttcaaaacccagcactctatccccacctgcgcccacacccggcgctgcggcaatccgcaaagcaaaggctcttgcactctagcgcgttgacct

SEQ ID NO: 299416 - DNA, 3984 bp, Homo sapiens
ggggacgcggcacagatagggggaagccggagtaatggttttcgggcaagtggatgttggagagcacacacaggagttggggggcgggggagggcctggggttggggagggctcgaactcggggctgctgggtagtccaggagggcgcggtaaggctggggtgtcctggtgagaactggagaggatctacccgggtccctgcctggccagtggggaaacaccggtcccccaggcaccttcacctaaccagagcggggatttccaccgcccctcatgccgccctttggaggaaagtgaaagtgaaaggaggaagaggaggcttcatggctgaggaggtcgcagcgccatgaagtccctgtctctgctcctcgctgtggctttgggcctggcgaccgccgtctcagcaggacccgcggtgatcgagtgttggttcgtggaggatgcgagcggaaagggcctggccaagagacccggtgcactgctgttgcgccagggaccgggggaaccgccgccccggccggacctcgaccctgagctctatctcagtgtacacgaccccgcgggcgccctccaggctgccttcaggcggtatccccggggcgcccccgcaccacactgcgagatgagccgcttcgtgcctctccccgcctctgcgaaatgggccagcggcctgacccccgcgcagaactgcccgcgggccctggatggggcttggctgatggtcagcatatccagcccagtcctcagcctctccagcctcttgcgaccacagccagagcctcagcaggagcctgttctcatcaccatggcaacagtggtactgactgtcctcacccacacccctgcccctcgagtgagactgggacaagatgctctgctggacttgagctttgcctacatgccccccacctccgaggccgcctcatctctggctccgggtccccctccctttgggctagagtggcgacgccagcacctgggtaagggacatctgctcctggctgcaactcctgggctgaatggccagatgccagcagcccaagaaggggccgtggcatttgctgcttgggatgatgatgagccatggggcccatggaccggaaatgggaccttctggctgcctagagttcaaccctttcaggagggcacctatctggccaccatacacctgccatacctgcaaggacaggtcaccctggagcttgctgtgtacaaaccccccaaagtgtccctgatgccagcaacccttgcacgggccgccccaggggaggcacccccggaattgctctgccttgtgtcccacttctacccttctgggggcctggaggtggagtgggaactccggggtggcccagggggccgctctcagaaggccgaggggcagaggtggctctcggccctgcgccaccattccgatggctctgtcagcctctctgggcacttgcagccgcccccagtcaccactgagcagcatggggcacgctatgcctgtcgaattcaccatcccagcctgcctgcctcggggcgcagcgctgaggtcaccctggaggtagcaggtaagagctgggagctctgcggaatctgagccagcacccaggaagacaggagctcactctcaccccttctgcctgccaggtctttcagggccctcccttgaggacagcgtaggccttttcctgtctgcctttcttctgcttgggctcttcaaggcactgggctgggctggtaagtgtcagccctaccctgaccatgacctgaggttggtggactttccccacctactcccaagagcctgacacccatccctctgccctccacctctaccactccagcatcccatcccttctcaatctttccccacagctgtctacctgtccacctgcaaggattcaaagaagaaagcagagtgagggcactcactgccatcctgtggaagccaccatcatctctggcccaagcttctgtagtagctccctaaaataataccctatcatctgctcctaatccctccaatctctctccactgagtggctggaatgcttttttttttttctttcacttatataagggataatttttcttttttttttttttttgagacggagtctcacctcttccgcccaggctgcagtgcagtggcatgatcttggcttactgcaacctccgcctcctgggttcaagcaattctgtggcttcagcctccggagtagctgggattacaggcacatgccaccacacccagtgaatttttgtatttttagtagagacggggtttcaccatgttggccaggctggtcttgaattcctgacctcaggtgatctgcccacctcagcctcccaaagtgctgggattacaggcgtgagccaccacaccaggcccgagaaatgcttttttaaaaaacacacatcttatggcattcaccttcttggagctctaggacagtggttctcaaaatttttttctctcaggacctcttaaaaatcatcaaggaccccaaaaagcttttgggtatgtgggttatagctatcaatatttatggtactagaacttaaaagtgagaaaaatttaaaacacgagaatacataggcacacattctattcatcgtgggaaccatggtgtcaatacatatcatgtagcttctgaaaaactccactgtacacttatagaatgaagaaggcaaaaaactttttttttttttttttggagacggagtctcgctctgtcgcccaggctggagtgcagtggcgcgatctcggctcactgcaagctccgcctctcgggttcacgccattctcctgcctcagcctcccaagtagctcggactacaggcgtcctccaccatgcctggctaatattttgtattttttagtagagacggggtttcaccgtgttagccaggatggtctcgatctcctaacctggtgatccgcccgcctcggcctcccaaagtattgggattacccgcgtgagccaccgcgcccggctgcaaataatctttctttttttctttttttctgagacagagtctcgctctgttgcccaggctggagtgcagtggcacgatctcggctcacggcacgctccgcctcccgggttcacgccattctcctgcctcagcttcccgagtagctgggactacaggggcccgccaccacgcccggctaactttttgtgtttttagtagagacggggtttcaccgtgttagccaggatggtctcgatctcctgaccttgtgatctgcccgcctcggcctcccaaagtgctgggattacaggcgtgagccaccgcgcccggcggcgaaacacgatattgtactaacatcttaattttgttataaaatctcacaaaccccctgacatagtctcagagatctgtagggccgaggttacatttggagaacccgtactctagggccaaatccattcttcttgccctggctcacttgtcccccccaccgccccgcgctggagccactgcctagttcttcagccctagatggtgctcgccagacctcctctcaatgctcatcacacacagggctattcctttcctccaatgaaccaaacgcctcccgcccacctccaggtcccagtcctctgttccctttgcctggtccacccttgccctccctgggtcgcagacgaggtcggcctcgtcattccccgcagaccgccgcgcgtccctcttgtgcggttcaccacagttgtatttaagtgatcgtgtgagtcgtcgttaaatgcctgtctccccgcggatcatgggctcctcgaggacagggaccggcctgtctgtccactgctgtaaccccgcgccggcatagggacctaaggcccactggagggcgctcatcaagtagctgctggatgttgacgaaggaagcggcggcgcagctcagggatctccgagtcaggacggtcggccagacccacggggtaacgggtctaatcgtgtaggaataaagctgtattccagtgctccaaa

SEQ ID NO: 299417 - DNA, 4117 bp, Homo sapiens
ggggacgcggcacagatagggggaagccggagtaatggttttcgggcaagtggatgttggagagcacacacaggagttggggggcgggggagggcctggggttggggagggctcgaactcggggctgctgggtagtccaggagggcgcggtaaggctggggtgtcctggtgagaactggagaggatctacccgggtccctgcctggccagtggggaaacaccggtcccccaggcaccttcacctaaccagagcggggatttccaccgcccctcatgccgccctttggaggaaagtgaaagtgaaaggaggaagaggaggcttcatggctgaggaggtcgcagcgccatgaagtccctgtctctgctcctcgctgtggctttgggcctggcgaccgccgtctcagcaggacccgcggtgatcgagtgttggttcgtggaggatgcgagcggaaagggcctggccaagagacccggtgcactgctgttgcgccagggaccgggggaaccgccgccccggccggacctcgaccctgagctctatctcagtgtacacgaccccgcgggcgccctccaggctgccttcaggcggtatccccggggcgcccccgcaccacactgcgagatgagccgcttcgtgcctctccccgcctctgcgaaatgggccagcggcctgacccccgcgcagaactgcccgcgggccctggatggggcttggctgatggtcagcatatccagcccagtcctcagcctctccagcctcttgcgaccacagccagagcctcagcaggagcctgttctcatcaccatggcaacagtggtactgactgtcctcacccacacccctgcccctcgagtgagactgggacaagatgctctgctggacttgagctttgcctacatgccccccacctccgaggccgcctcatctctggctccgggtccccctccctttgggctagagtggcgacgccagcacctgggtaagggacatctgctcctggctgcaactcctgggctgaatggccagatgccagcagcccaagaaggggccgtggcatttgctgcttgggatgatgatgagccatggggcccatggaccggaaatgggaccttctggctgcctagagttcaaccctttcaggagggcacctatctggccaccatacacctgccatacctgcaaggacaggtcaccctggagcttgctgtgtacagtgagttgggggacagaggtctccaggggtagagggtgggcactggattgtggtgaccgtaatagggggagggatgatggataagagggtgcctgggcaagtaagtagagatagaaagaggttcctgggagttagaggggtaatgggaggctagaagtttcctggaaatttgaggggctttgacatgggtatttctgtgacgcaccaatggagagacagtgggttccctatttcaggagaagaaacctaaccttctttagttctgaggaagccagcaggcaaactgagggtctcttagggaggacagtatggactgatttccctatgctcatttcgtcctctttccccagaaccccccaaagtgtccctgatgccagcaacccttgcacgggccgccccaggggaggcacccccggaattgctctgccttgtgtcccacttctacccttctgggggcctggaggtggagtgggaactccggggtggcccagggggccgctctcagaaggccgaggggcagaggtggctctcggccctgcgccaccattccgatggctctgtcagcctctctgggcacttgcagccgcccccagtcaccactgagcagcatggggcacgctatgcctgtcgaattcaccatcccagcctgcctgcctcggggcgcagcgctgaggtcaccctggaggtagcaggtctttcagggccctcccttgaggacagcgtaggccttttcctgtctgcctttcttctgcttgggctcttcaaggcactgggctgggctgctgtctacctgtccacctgcaaggattcaaagaagaaagcagagtgagggcactcactgccatcctgtggaagccaccatcatctctggcccaagcttctgtagtagctccctaaaataataccctatcatctgctcctaatccctccaatctctctccactgagtggctggaatgcttttttttttttctttcacttatataagggataatttttcttttttttttttttttgagacggagtctcacctcttccgcccaggctgcagtgcagtggcatgatcttggcttactgcaacctccgcctcctgggttcaagcaattctgtggcttcagcctccggagtagctgggattacaggcacatgccaccacacccagtgaatttttgtatttttagtagagacggggtttcaccatgttggccaggctggtcttgaattcctgacctcaggtgatctgcccacctcagcctcccaaagtgctgggattacaggcgtgagccaccacaccaggcccgagaaatgcttttttaaaaaacacacatcttatggcattcaccttcttggagctctaggacagtggttctcaaaatttttttctctcaggacctcttaaaaatcatcaaggaccccaaaaagcttttgggtatgtgggttatagctatcaatatttatggtactagaacttaaaagtgagaaaaatttaaaacacgagaatacataggcacacattctattcatcgtgggaaccatggtgtcaatacatatcatgtagcttctgaaaaactccactgtacacttatagaatgaagaaggcaaaaaactttttttttttttttttggagacggagtctcgctctgtcgcccaggctggagtgcagtggcgcgatctcggctcactgcaagctccgcctctcgggttcacgccattctcctgcctcagcctcccaagtagctcggactacaggcgtcctccaccatgcctggctaatattttgtattttttagtagagacggggtttcaccgtgttagccaggatggtctcgatctcctaacctggtgatccgcccgcctcggcctcccaaagtattgggattacccgcgtgagccaccgcgcccggctgcaaataatctttctttttttctttttttctgagacagagtctcgctctgttgcccaggctggagtgcagtggcacgatctcggctcacggcacgctccgcctcccgggttcacgccattctcctgcctcagcttcccgagtagctgggactacaggggcccgccaccacgcccggctaactttttgtgtttttagtagagacggggtttcaccgtgttagccaggatggtctcgatctcctgaccttgtgatctgcccgcctcggcctcccaaagtgctgggattacaggcgtgagccaccgcgcccggcggcgaaacacgatattgtactaacatcttaattttgttataaaatctcacaaaccccctgacatagtctcagagatctgtagggccgaggttacatttggagaacccgtactctagggccaaatccattcttcttgccctggctcacttgtcccccccaccgccccgcgctggagccactgcctagttcttcagccctagatggtgctcgccagacctcctctcaatgctcatcacacacagggctattcctttcctccaatgaaccaaacgcctcccgcccacctccaggtcccagtcctctgttccctttgcctggtccacccttgccctccctgggtcgcagacgaggtcggcctcgtcattccccgcagaccgccgcgcgtccctcttgtgcggttcaccacagttgtatttaagtgatcgtgtgagtcgtcgttaaatgcctgtctccccgcggatcatgggctcctcgaggacagggaccggcctgtctgtccactgctgtaaccccgcgccggcatagggacctaaggcccactggagggcgctcatcaagtagctgctggatgttgacgaaggaagcggcggcgcagctcagggatctccgagtcaggacggtcggccagacccacggggtaacgggtctaatcgtgtaggaataaagctgtattccagtgctccaaa

SEQ ID NO: 299418 - DNA, 4334 bp, Homo sapiens
ggggacgcggcacagatagggggaagccggagtaatggttttcgggcaagtggatgttggagagcacacacaggagttggggggcgggggagggcctggggttggggagggctcgaactcggggctgctgggtagtccaggagggcgcggtaaggctggggtgtcctggtgagaactggagaggatctacccgggtccctgcctggccagtggggaaacaccggtcccccaggcaccttcacctaaccagagcggggatttccaccgcccctcatgccgccctttggaggaaagtgaaagtgaaaggaggaagaggaggcttcatggctgaggaggtcgcagcgccatgaagtccctgtctctgctcctcgctgtggctttgggcctggcgaccgccgtctcagcaggacccgcggtgatcgagtgttggttcgtggaggatgcgagcggaaagggcctggccaagagacccggtgcactgctgttgcgccagggaccgggggaaccgccgccccggccggacctcgaccctgagctctatctcagtgtacacgaccccgcgggcgccctccaggctgccttcaggcggtatccccggggcgcccccgcaccacactgcgagatgagccgcttcgtgcctctccccgcctctgcgaaatgggccagcggcctgacccccgcgcagaactgcccgcgggccctggatggggcttggctgatggtcagcatatccagcccagtcctcagcctctccagcctcttgcgaccacagccagagcctcagcaggagcctgttctcatcaccatggcaacagtggtactgactgtcctcacccacacccctgcccctcgagtgagactgggacaagatgctctgctggacttgagctttgcctacatgccccccacctccgaggccgcctcatctctggctccgggtccccctccctttgggctagagtggcgacgccagcacctgggtaagggacatctgctcctggctgcaactcctgggctgaatggccagatgccagcagcccaagaaggggccgtggcatttgctgcttgggatgatgatgagccatggggcccatggaccggaaatgggaccttctggctgcctagagttcaaccctttcaggagggcacctatctggccaccatacacctgccatacctgcaaggacaggtcaccctggagcttgctgtgtacagtgagttgggggacagaggtctccaggggtagagggtgggcactggattgtggtgaccgtaatagggggagggatgatggataagagggtgcctgggcaagtaagtagagatagaaagaggttcctgggagttagaggggtaatgggaggctagaagtttcctggaaatttgaggggctttgacatgggtatttctgtgacgcaccaatggagagacagtgggttccctatttcaggagaagaaacctaaccttctttagttctgaggaagccagcaggcaaactgagggtctcttagggaggacagtatggactgatttccctatgctcatttcgtcctctttccccagaaccccccaaagtgtccctgatgccagcaacccttgcacgggccgccccaggggaggcacccccggaattgctctgccttgtgtcccacttctacccttctgggggcctggaggtggagtgggaactccggggtggcccagggggccgctctcagaaggccgaggggcagaggtggctctcggccctgcgccaccattccgatggctctgtcagcctctctgggcacttgcagccgcccccagtcaccactgagcagcatggggcacgctatgcctgtcgaattcaccatcccagcctgcctgcctcggggcgcagcgctgaggtcaccctggaggtagcaggtaagagctgggagctctgcggaatctgagccagcacccaggaagacaggagctcactctcaccccttctgcctgccaggtctttcagggccctcccttgaggacagcgtaggccttttcctgtctgcctttcttctgcttgggctcttcaaggcactgggctgggctggtaagtgtcagccctaccctgaccatgacctgaggttggtggactttccccacctactcccaagagcctgacacccatccctctgccctccacctctaccactccagcatcccatcccttctcaatctttccccacagctgtctacctgtccacctgcaaggattcaaagaagaaagcagagtgagggcactcactgccatcctgtggaagccaccatcatctctggcccaagcttctgtagtagctccctaaaataataccctatcatctgctcctaatccctccaatctctctccactgagtggctggaatgcttttttttttttctttcacttatataagggataatttttcttttttttttttttttgagacggagtctcacctcttccgcccaggctgcagtgcagtggcatgatcttggcttactgcaacctccgcctcctgggttcaagcaattctgtggcttcagcctccggagtagctgggattacaggcacatgccaccacacccagtgaatttttgtatttttagtagagacggggtttcaccatgttggccaggctggtcttgaattcctgacctcaggtgatctgcccacctcagcctcccaaagtgctgggattacaggcgtgagccaccacaccaggcccgagaaatgcttttttaaaaaacacacatcttatggcattcaccttcttggagctctaggacagtggttctcaaaatttttttctctcaggacctcttaaaaatcatcaaggaccccaaaaagcttttgggtatgtgggttatagctatcaatatttatggtactagaacttaaaagtgagaaaaatttaaaacacgagaatacataggcacacattctattcatcgtgggaaccatggtgtcaatacatatcatgtagcttctgaaaaactccactgtacacttatagaatgaagaaggcaaaaaactttttttttttttttttggagacggagtctcgctctgtcgcccaggctggagtgcagtggcgcgatctcggctcactgcaagctccgcctctcgggttcacgccattctcctgcctcagcctcccaagtagctcggactacaggcgtcctccaccatgcctggctaatattttgtattttttagtagagacggggtttcaccgtgttagccaggatggtctcgatctcctaacctggtgatccgcccgcctcggcctcccaaagtattgggattacccgcgtgagccaccgcgcccggctgcaaataatctttctttttttctttttttctgagacagagtctcgctctgttgcccaggctggagtgcagtggcacgatctcggctcacggcacgctccgcctcccgggttcacgccattctcctgcctcagcttcccgagtagctgggactacaggggcccgccaccacgcccggctaactttttgtgtttttagtagagacggggtttcaccgtgttagccaggatggtctcgatctcctgaccttgtgatctgcccgcctcggcctcccaaagtgctgggattacaggcgtgagccaccgcgcccggcggcgaaacacgatattgtactaacatcttaattttgttataaaatctcacaaaccccctgacatagtctcagagatctgtagggccgaggttacatttggagaacccgtactctagggccaaatccattcttcttgccctggctcacttgtcccccccaccgccccgcgctggagccactgcctagttcttcagccctagatggtgctcgccagacctcctctcaatgctcatcacacacagggctattcctttcctccaatgaaccaaacgcctcccgcccacctccaggtcccagtcctctgttccctttgcctggtccacccttgccctccctgggtcgcagacgaggtcggcctcgtcattccccgcagaccgccgcgcgtccctcttgtgcggttcaccacagttgtatttaagtgatcgtgtgagtcgtcgttaaatgcctgtctccccgcggatcatgggctcctcgaggacagggaccggcctgtctgtccactgctgtaaccccgcgccggcatagggacctaaggcccactggagggcgctcatcaagtagctgctggatgttgacgaaggaagcggcggcgcagctcagggatctccgagtcaggacggtcggccagacccacggggtaacgggtctaatcgtgtaggaataaagctgtattccagtgctccaaa

SEQ ID NO: 299419 - DNA, 2288 bp, Homo sapiens
gtttcaagttcaaaaaacagcaggattttgccaacacctgcacaagcacaaggcctacctgacccctaaagtccgtgtccctcagctctgggcatgcccagcctctcacggctccggaatgccatgctatccacaggaaggcagccagctgcccctgagccaggctgctgtctacctgtccacctgcaaggattcaaagaagaaagcagagtgagggcactcactgccatcctgtggaagccaccatcatctctggcccaagcttctgtagtagctccctaaaataataccctatcatctgctcctaatccctccaatctctctccactgagtggctggaatgcttttttttttttctttcacttatataagggataatttttcttttttttttttttttgagacggagtctcacctcttccgcccaggctgcagtgcagtggcatgatcttggcttactgcaacctccgcctcctgggttcaagcaattctgtggcttcagcctccggagtagctgggattacaggcacatgccaccacacccagtgaatttttgtatttttagtagagacggggtttcaccatgttggccaggctggtcttgaattcctgacctcaggtgatctgcccacctcagcctcccaaagtgctgggattacaggcgtgagccaccacaccaggcccgagaaatgcttttttaaaaaacacacatcttatggcattcaccttcttggagctctaggacagtggttctcaaaatttttttctctcaggacctcttaaaaatcatcaaggaccccaaaaagcttttgggtatgtgggttatagctatcaatatttatggtactagaacttaaaagtgagaaaaatttaaaacacgagaatacataggcacacattctattcatcgtgggaaccatggtgtcaatacatatcatgtagcttctgaaaaactccactgtacacttatagaatgaagaaggcaaaaaactttttttttttttttttggagacggagtctcgctctgtcgcccaggctggagtgcagtggcgcgatctcggctcactgcaagctccgcctctcgggttcacgccattctcctgcctcagcctcccaagtagctcggactacaggcgtcctccaccatgcctggctaatattttgtattttttagtagagacggggtttcaccgtgttagccaggatggtctcgatctcctaacctggtgatccgcccgcctcggcctcccaaagtattgggattacccgcgtgagccaccgcgcccggctgcaaataatctttctttttttctttttttctgagacagagtctcgctctgttgcccaggctggagtgcagtggcacgatctcggctcacggcacgctccgcctcccgggttcacgccattctcctgcctcagcttcccgagtagctgggactacaggggcccgccaccacgcccggctaactttttgtgtttttagtagagacggggtttcaccgtgttagccaggatggtctcgatctcctgaccttgtgatctgcccgcctcggcctcccaaagtgctgggattacaggcgtgagccaccgcgcccggcggcgaaacacgatattgtactaacatcttaattttgttataaaatctcacaaaccccctgacatagtctcagagatctgtagggccgaggttacatttggagaacccgtactctagggccaaatccattcttcttgccctggctcacttgtcccccccaccgccccgcgctggagccactgcctagttcttcagccctagatggtgctcgccagacctcctctcaatgctcatcacacacagggctattcctttcctccaatgaaccaaacgcctcccgcccacctccaggtcccagtcctctgttccctttgcctggtccacccttgccctccctgggtcgcagacgaggtcggcctcgtcattccccgcagaccgccgcgcgtccctcttgtgcggttcaccacagttgtatttaagtgatcgtgtgagtcgtcgttaaatgcctgtctccccgcggatcatgggctcctcgaggacagggaccggcctgtctgtccactgctgtaaccccgcgccggcatagggacctaaggcccactggagggcgctcatcaagtagctgctggatgttgacgaaggaagcggcggcgcagctcagggatctccgagtcaggacggtcggccagacccacggggtaacgggtctaatcgtgtaggaataaagctgtattccagtgctccaaa

SEQ ID NO: 299420 - DNA, 2197 bp, Homo sapiens
cccgctccatggaaaagcgggcttgactgcattgccgctgtataaagcatgtggtcttatagtgtttggacagctgctgtctacctgtccacctgcaaggattcaaagaagaaagcagagtgagggcactcactgccatcctgtggaagccaccatcatctctggcccaagcttctgtagtagctccctaaaataataccctatcatctgctcctaatccctccaatctctctccactgagtggctggaatgcttttttttttttctttcacttatataagggataatttttcttttttttttttttttgagacggagtctcacctcttccgcccaggctgcagtgcagtggcatgatcttggcttactgcaacctccgcctcctgggttcaagcaattctgtggcttcagcctccggagtagctgggattacaggcacatgccaccacacccagtgaatttttgtatttttagtagagacggggtttcaccatgttggccaggctggtcttgaattcctgacctcaggtgatctgcccacctcagcctcccaaagtgctgggattacaggcgtgagccaccacaccaggcccgagaaatgcttttttaaaaaacacacatcttatggcattcaccttcttggagctctaggacagtggttctcaaaatttttttctctcaggacctcttaaaaatcatcaaggaccccaaaaagcttttgggtatgtgggttatagctatcaatatttatggtactagaacttaaaagtgagaaaaatttaaaacacgagaatacataggcacacattctattcatcgtgggaaccatggtgtcaatacatatcatgtagcttctgaaaaactccactgtacacttatagaatgaagaaggcaaaaaactttttttttttttttttggagacggagtctcgctctgtcgcccaggctggagtgcagtggcgcgatctcggctcactgcaagctccgcctctcgggttcacgccattctcctgcctcagcctcccaagtagctcggactacaggcgtcctccaccatgcctggctaatattttgtattttttagtagagacggggtttcaccgtgttagccaggatggtctcgatctcctaacctggtgatccgcccgcctcggcctcccaaagtattgggattacccgcgtgagccaccgcgcccggctgcaaataatctttctttttttctttttttctgagacagagtctcgctctgttgcccaggctggagtgcagtggcacgatctcggctcacggcacgctccgcctcccgggttcacgccattctcctgcctcagcttcccgagtagctgggactacaggggcccgccaccacgcccggctaactttttgtgtttttagtagagacggggtttcaccgtgttagccaggatggtctcgatctcctgaccttgtgatctgcccgcctcggcctcccaaagtgctgggattacaggcgtgagccaccgcgcccggcggcgaaacacgatattgtactaacatcttaattttgttataaaatctcacaaaccccctgacatagtctcagagatctgtagggccgaggttacatttggagaacccgtactctagggccaaatccattcttcttgccctggctcacttgtcccccccaccgccccgcgctggagccactgcctagttcttcagccctagatggtgctcgccagacctcctctcaatgctcatcacacacagggctattcctttcctccaatgaaccaaacgcctcccgcccacctccaggtcccagtcctctgttccctttgcctggtccacccttgccctccctgggtcgcagacgaggtcggcctcgtcattccccgcagaccgccgcgcgtccctcttgtgcggttcaccacagttgtatttaagtgatcgtgtgagtcgtcgttaaatgcctgtctccccgcggatcatgggctcctcgaggacagggaccggcctgtctgtccactgctgtaaccccgcgccggcatagggacctaaggcccactggagggcgctcatcaagtagctgctggatgttgacgaaggaagcggcggcgcagctcagggatctccgagtcaggacggtcggccagacccacggggtaacgggtctaatcgtgtaggaataaagctgtattccagtgctccaaa

SEQ ID NO: 299421 - DNA, 2104 bp, Homo sapiens
cagagtccaaacagtgcccagagtccaaacagtgcccagagtccaaacagtgcccagagtccaaacagtgcccagagtccaaacagtgcccagagtccaaacagtgcctatcatctgctcctaatccctccaatctctctccactgagtggctggaatgcttttttttttttctttcacttatataagggataatttttcttttttttttttttttgagacggagtctcacctcttccgcccaggctgcagtgcagtggcatgatcttggcttactgcaacctccgcctcctgggttcaagcaattctgtggcttcagcctccggagtagctgggattacaggcacatgccaccacacccagtgaatttttgtatttttagtagagacggggtttcaccatgttggccaggctggtcttgaattcctgacctcaggtgatctgcccacctcagcctcccaaagtgctgggattacaggcgtgagccaccacaccaggcccgagaaatgcttttttaaaaaacacacatcttatggcattcaccttcttggagctctaggacagtggttctcaaaatttttttctctcaggacctcttaaaaatcatcaaggaccccaaaaagcttttgggtatgtgggttatagctatcaatatttatggtactagaacttaaaagtgagaaaaatttaaaacacgagaatacataggcacacattctattcatcgtgggaaccatggtgtcaatacatatcatgtagcttctgaaaaactccactgtacacttatagaatgaagaaggcaaaaaactttttttttttttttttggagacggagtctcgctctgtcgcccaggctggagtgcagtggcgcgatctcggctcactgcaagctccgcctctcgggttcacgccattctcctgcctcagcctcccaagtagctcggactacaggcgtcctccaccatgcctggctaatattttgtattttttagtagagacggggtttcaccgtgttagccaggatggtctcgatctcctaacctggtgatccgcccgcctcggcctcccaaagtattgggattacccgcgtgagccaccgcgcccggctgcaaataatctttctttttttctttttttctgagacagagtctcgctctgttgcccaggctggagtgcagtggcacgatctcggctcacggcacgctccgcctcccgggttcacgccattctcctgcctcagcttcccgagtagctgggactacaggggcccgccaccacgcccggctaactttttgtgtttttagtagagacggggtttcaccgtgttagccaggatggtctcgatctcctgaccttgtgatctgcccgcctcggcctcccaaagtgctgggattacaggcgtgagccaccgcgcccggcggcgaaacacgatattgtactaacatcttaattttgttataaaatctcacaaaccccctgacatagtctcagagatctgtagggccgaggttacatttggagaacccgtactctagggccaaatccattcttcttgccctggctcacttgtcccccccaccgccccgcgctggagccactgcctagttcttcagccctagatggtgctcgccagacctcctctcaatgctcatcacacacagggctattcctttcctccaatgaaccaaacgcctcccgcccacctccaggtcccagtcctctgttccctttgcctggtccacccttgccctccctgggtcgcagacgaggtcggcctcgtcattccccgcagaccgccgcgcgtccctcttgtgcggttcaccacagttgtatttaagtgatcgtgtgagtcgtcgttaaatgcctgtctccccgcggatcatgggctcctcgaggacagggaccggcctgtctgtccactgctgtaaccccgcgccggcatagggacctaaggcccactggagggcgctcatcaagtagctgctggatgttgacgaaggaagcggcggcgcagctcagggatctccgagtcaggacggtcggccagacccacggggtaacgggtctaatcgtgtaggaataaagctgtattccagtgctccaaa

SEQ ID NO: 299422 - DNA, 3824 bp, Homo sapiens
ggggacgcggcacagatagggggaagccggagtaatggttttcgggcaagtggatgttggagagcacacacaggagttggggggcgggggagggcctggggttggggagggctcgaactcggggctgctgggtagtccaggagggcgcggtaaggctggggtgtcctggtgagaactggagaggatctacccgggtccctgcctggccagtggggaaacaccggtcccccaggcaccttcacctaaccagagcggggatttccaccgcccctcatgccgccctttggaggaaagtgaaagtgaaaggaggaagaggaggcttcatggctgaggaggtcgcagcgccatgaagtccctgtctctgctcctcgctgtggctttgggcctggcgaccgccgtctcagcaggacccgcggtgatcgagtgttggttcgtggaggatgcgagcggaaagggcctggccaagagacccggtgcactgctgttgcgccagggaccgggggaaccgccgccccggccggacctcgaccctgagctctatctcagtgtacacgaccccgcgggcgccctccaggctgccttcaggcggtatccccggggcgcccccgcaccacactgcgagatgagccgcttcgtgcctctccccgcctctgcgaaatgggccagcggcctgacccccgcgcagaactgcccgcgggccctggatggggcttggctgatggtcagcatatccagcccagtcctcagcctctccagcctcttgcgaccacagccagagcctcagcaggagcctgttctcatcaccatggcaacagtggtactgactgtcctcacccacacccctgcccctcgagtgagactgggacaagatgctctgctggacttgagctttgcctacatgccccccacctccgaggccgcctcatctctggctccgggtccccctccctttgggctagagtggcgacgccagcacctgggtaagggacatctgctcctggctgcaactcctgggctgaatggccagatgccagcagcccaagaaggggccgtggcatttgctgcttgggatgatgatgagccatggggcccatggaccggaaatgggaccttctggctgcctagagttcaaccctttcaggagggcacctatctggccaccatacacctgccatacctgcaaggacaggtcaccctggagcttgctgtgtacaaaccccccaaagtgtccctgatgccagcaacccttgcacgggccgccccaggggaggcacccccggaattgctctgccttgtgtcccacttctacccttctgggggcctggaggtggagtgggaactccggggtggcccagggggccgctctcagaaggccgaggggcagaggtggctctcggccctgcgccaccattccgatggctctgtcagcctctctgggcacttgcagccgcccccagtcaccactgagcagcatggggcacgctatgcctgtcgaattcaccatcccagcctgcctgcctcggggcgcagcgctgaggtcaccctggaggtagcaggtctttcagggccctcccttgaggacagcgtaggccttttcctgtctgcctttcttctgcttgggctcttcaaggcactgggctgggctgctgtctacctgtccacctgcaaggattcaaagaagaaagcagagtgagggcactcactgccatcctgtggaagccaccatcatctctggcccaagcttctgtagtagctccctaaaataataccctatcatctgctcctaatccctccaatctctctccactgagtggctggaatgcttttttttttttctttcacttatataagggataatttttcttttttttttttttttgagacggagtctcacctcttccgcccaggctgcagtgcagtggcatgatcttggcttactgcaacctccgcctcctgggttcaagcaattctgtggcttcagcctccggagtagctgggattacaggcacatgccaccacacccagtgaatttttgtatttttagtagagacggggtttcaccatgttggccaggctggtcttgaattcctgacctcaggtgatctgcccacctcagcctcccaaagtgctgggattacaggcgtgagccaccacaccaggcccgagaaatgcttttttaaaaaacacacatcttatggcattcaccttcttggagctctaggacagtggttctcaaaatttttttctctcaggacctcttaaaaatcatcaaggaccccaaaaagcttttgggtatgtgggttatagctatcaatatttatggtactagaacttaaaagtgagaaaaatttaaaacacgagaatacataggcacacattctattcatcgtgggaaccatggtgtcaatacatatcatgtagcttctgaaaaactccactgtacacttatagaatgaagaaggcaaaaaactttttttttttttttttggagacggagtctcgctctgtcgcccaggctggagtgcagtggcgcgatctcggctcactgcaagctccgcctctcgggttcacgccattctcctgcctcagcctcccaagtagctcggactacaggcgtcctccaccatgcctggctaatattttgtattttttagtagagacggggtttcaccgtgttagccaggatggtctcgatctcctaacctggtgatccgcccgcctcggcctcccaaagtattgggattacccgcgtgagccaccgcgcccggctgcaaataatctttctttttttctttttttctgagacagagtctcgctctgttgcccaggctggagtgcagtggcacgatctcggctcacggcacgctccgcctcccgggttcacgccattctcctgcctcagcttcccgagtagctgggactacaggggcccgccaccacgcccggctaactttttgtgtttttagtagagacggggtttcaccgtgttagccaggatggtctcgatctcctgaccttgtgatctgcccgcctcggcctcccaaagtgctgggattacaggcgtgagccaccgcgcccggcggcgaaacacgatattgtactaacatcttaattttgttataaaatctcacaaaccccctgacatagtctcagagatctgtagggccgaggttacatttggagaacccgtactctagggccaaatccattcttcttgccctggctcacttgtcccccccaccgccccgcgctggagccactgcctagttcttcagccctagatggtgctcgccagacctcctctcaatgctcatcacacacagggctattcctttcctccaatgaaccaaacgcctcccgcccacctccaggtcccagtcctctgttccctttgcctggtccacccttgccctccctgggtcgcagacgaggtcggcctcgtcattccccgcagaccgccgcgcgtccctcttgtgcggttcaccacagttgtatttaagtgatcgtgtgagtcgtcgttaaatgcctgtctccccgcggatcatgggctcctcgaggacagggaccggcctgtctgtccactgctgtaaccccgcgccggcatagggacctaaggcccactggagggcgctcatcaagtagctgctggatgttgacgaaggaagcggcggcgcagctcagggatctccgagtcaggacggtcggccagacccacggggtaacgggtctaatcgtgtaggaataaagctgtattccagtgctccaaaaaaaaaaaacacgaacacacaacaacaacccacagaccagacaaaaaaaaaaggggg

SEQ ID NO: 299423 - DNA, 3694 bp, Homo sapiens
ggggacgcggcacagatagggggaagccggagtaatggttttcgggcaagtggatgttggagagcacacacaggagttggggggcgggggagggcctggggttggggagggctcgaactcggggctgctgggtagtccaggagggcgcggtaaggctggggtgtcctggtgagaactggagaggatctacccgggtccctgcctggccagtggggaaacaccggtcccccaggcaccttcacctaaccagagcggggatttccaccgcccctcatgccgccctttggaggaaagtgaaagtgaaaggaggaagaggaggcttcatggctgaggaggtcgcagcgccatgaagtccctgtctctgctcctcgctgtggctttgggcctggcgaccgccgtctcagcaggacccgcggtgatcgagtgttggttcgtggaggatgcgagcggaaagggcctggccaagagacccggtgcactgctgttgcgccagggaccgggggaaccgccgccccggccggacctcgaccctgagctctatctcagtgtacacgaccccgcgggcgccctccaggctgccttcaggcggtatccccggggcgcccccgcaccacactgcgagatgagccgcttcgtgcctctccccgcctctgcgaaatgggccagcggcctgacccccgcgcagaactgcccgcgggccctggatggggcttggctgatggtcagcatatccagcccagtcctcagcctctccagcctcttgcgaccacagccagagcctcagcaggagcctgttctcatcaccatggcaacagtggtactgactgtcctcacccacacccctgcccctcgagtgagactgggacaagatgctctgctggacttgagctttgcctacatgccccccacctccgaggccgcctcatctctggctccgggtccccctccctttgggctagagtggcgacgccagcacctgggtaagggacatctgctcctggctgcaactcctgggctgaatggccagatgccagcagcccaagaaggggccgtggcatttgctgcttgggatgatgatgagccatggggcccatggaccggaaatgggaccttctggctgcctagagttcaaccctttcaggagggcacctatctggccaccatacacctgccatacctgcaaggacaggtcaccctggagcttgctgtgtacaaaccccccaaagtgtccctgatgccagcaacccttgcacgggccgccccaggggaggcacccccggaattgctctgccttgtgtcccacttctacccttctgggggcctggaggtggagtgggaactccggggtggcccagggggccgctctcagaaggccgaggggcagaggtggctctcggccctgcgccaccattccgatggctctgtcagcctctctgggcacttgcagccgcccccagtcaccactgagcagcatggggcacgctatgcctgtcgaattcaccatcccagcctgcctgcctcggggcgcagcgctgaggtcaccctggaggtagcaggtctttcagggccctcccttgaggacagcgtaggccttttcctgtctgcctttcttctgcttgggctcttcaaggcactgggctgggctgctgtctacctgtccacctgcaaggattcaaagaagaaagcagagtgagggcactcactgccatcctgtggaagccaccatcatctctggcccaagcttctgtagtagctccctaaaataataccctatcatctgctcctaatccctccaatctctctccactgagtggctggaatgcttttttttttttctttcacttatataagggataatttttcttttttttttttttttgagacggagtctcacctcttccgcccaggctgcagtgcagtggcatgatcttggcttactgcaacctccgcctcctgggttcaagcaattctgtggcttcagcctccggagtagctgggattacaggcacatgccaccacacccagtgaatttttgtatttttagtagagacggggtttcaccatgttggccaggctggtcttgaattcctgacctcaggtgatctgcccacctcagcctcccaaagtgctgggattacaggcgtgagccaccacaccaggcccgagaaatgcttttttaaaaaacacacatcttatggcattcaccttcttggagctctaggacagtggttctcaaaatttttttctctcaggacctcttaaaaatcatcaaggaccccaaaaagcttttgggtatgtgggttatagctatcaatatttatggtactagaacttaaaagtgagaaaaatttaaaacacgagaatacataggcacacattctattcatcgtgggaaccatggtgtcaatacatatcatgtagcttctgaaaaactccactgtacacttatagaatgaagaaggcaaaaaactttttttttttttttttggagacggagtctcgctctgtcgcccaggctggagtgcagtggcgcgatctcggctcactgcaagctccgcctctcgggttcacgccattctcctgcctcagcctcccaagtagctcggactacaggcgtcctccaccatgcctggctaatattttgtattttttagtagagacggggtttcaccgtgttagccaggatggtctcgatctcctaacctggtgatccgcccgcctcggcctcccaaagtattgggattacccgcgtgagccaccgcgcccggctgcaaataatctttctttttttctttttttctgagacagagtctcgctctgttgcccaggctggagtgcagtggcacgatctcggctcacggcacgctccgcctcccgggttcacgccattctcctgcctcagcttcccgagtagctgggactacaggggcccgccaccacgcccggctaactttttgtgtttttagtagagacggggtttcaccgtgttagccaggatggtctcgatctcctgaccttgtgatctgcccgcctcggcctcccaaagtgctgggattacaggcgtgagccaccgcgcccggcggcgaaacacgatattgtactaacatcttaattttgttataaaatctcacaaaccccctgacatagtctcagagatctgtagggccgaggttacatttggagaacccgtactctagggccaaatccattcttcttgccctggctcacttgtcccccccaccgccccgcgctggagccactgcctagttcttcagccctagatggtgctcgccagacctcctctcaatgctcatcacacacagggctattcctttcctccaatgaaccaaacgcctcccgcccacctccaggtcccagtcctctgttccctttgcctggtccacccttgccctccctgggtcgcagacgaggtcggcctcgtcattccccgcagaccgccgcgcgtccctcttgtgcggttcaccacagttgtatttaagtgatcgtgtgagtcgtcgttaaatgcctgtctccccgcggatcatgggctcctcgaggacagggaccggcctgtctgtccactgctgtaaccccgcgccggcatagggacctaaggcccactggagggcgctgggctgttacggaggcgctgttagaggcgctcgttacgaggcgctcgttacgtatgttagcg

SEQ ID NO: 299424 - DNA, 2160 bp, Homo sapiens
ggggacgcggcacagatagggggaagccggagtaatggttttcgggcaagtggatgttggagagcacacacaggagttggggggcgggggagggcctggggttggggagggctcgaactcggggctgctgggtagtccaggagggcgcggtaaggctggggtgtcctggtgagaactggagaggatctacccgggtccctgcctggccagtggggaaacaccggtcccccaggcaccttcacctaaccagagcggggatttccaccgcccctcatgccgccctttggaggaaagtgaaagtgaaaggaggaagaggaggcttcatggctgaggaggtcgcagcgccatgaagtccctgtctctgctcctcgctgtggctttgggcctggcgaccgccgtctcagcaggacccgcggtgatcgagtgttggttcgtggaggatgcgagcggaaagggcctggccaagagacccggtgcactgctgttgcgccagggaccgggggaaccgccgccccggccggacctcgaccctgagctctatctcagtgtacacgaccccgcgggcgccctccaggctgccttcaggcggtatccccggggcgcccccgcaccacactgcgagatgagccgcttcgtgcctctccccgcctctgcgaaatgggccagcggcctgacccccgcgcagaactgcccgcgggccctggatggggcttggctgatggtcagcatatccagcccagtcctcagcctctccagcctcttgcgaccacagccagagcctcagcaggagcctgttctcatcaccatggcaacagtggtactgactgtcctcacccacacccctgcccctcgagtgagactgggacaagatgctctgctggacttgagctttgcctacatgccccccacctccgaggccgcctcatctctggctccgggtccccctccctttgggctagagtggcgacgccagcacctgggtaagggacatctgctcctggctgcaactcctgggctgaatggccagatgccagcagcccaagaaggggccgtggcatttgctgcttgggatgatgatgagccatggggcccatggaccggaaatgggaccttctggctgcctagagttcaaccctttcaggagggcacctatctggccaccatacacctgccatacctgcaaggacaggtcaccctggagcttgctgtgtacagtgagttgggggacagaggtctccaggggtagagggtgggcactggattgtggtgaccgtaatagggggagggatgatggataagagggtgcctgggcaagtaagtagagatagaaagaggttcctgggagttagaggggtaatgggaggctagaagtttcctggaaatttgaggggctttgacatgggtatttcttgtgatctgcccgcctcggcctcccaaagtgctgggattacaggcgtgagccaccgcgcccggcggcgaaacacgatattgtactaacatcttaattttgttataaaatctcacaaaccccctgacatagtctcagagatctgtagggccgaggttacatttggagaacccgtactctagggccaaatccattcttcttgccctggctcacttgtcccccccaccgccccgcgctggagccactgcctagttcttcagccctagatggtgctcgccagacctcctctcaatgctcatcacacacagggctattcctttcctccaatgaaccaaacgcctcccgcccacctccaggtcccagtcctctgttccctttgcctggtccacccttgccctccctgggtcgcagacgaggtcggcctcgtcattccccgcagaccgccgcgcgtccctcttgtgcggttcaccacagttgtatttaagtgatcgtgtgagtcgtcgttaaatgcctgtctccccgcggatcatgggctcctcgaggacagggaccggcctgtctgtccactgctgtaaccccgcgccggcatagggacctaaggcccactggagggcgctcatcaagtagctgctggatgttgacgaaggaagcggcggcgcagctcagggatctccgagtcaggacggtcggccagacccacggggtaacgggtctaatcgtgtaggaataaagctgtattccagtgctccaaa

SEQ ID NO: 299425 - DNA, 3569 bp, Homo sapiens
ggggacgcggcacagatagggggaagccggagtaatggttttcgggcaagtggatgttggagagcacacacaggagttggggggcgggggagggcctggggttggggagggctcgaactcggggctgctgggtagtccaggagggcgcggtaaggctggggtgtcctggtgagaactggagaggatctacccgggtccctgcctggccagtggggaaacaccggtcccccaggcaccttcacctaaccagagcggggatttccaccgcccctcatgccgccctttggaggaaagtgaaagtgaaaggaggaagaggaggcttcatggctgaggaggtcgcagcgccatgaagtccctgtctctgctcctcgctgtggctttgggcctggcgaccgccgtctcagcaggacccgcggtgatcgagtgttggttcgtggaggatgcgagcggaaagggcctggccaagagacccggtgcactgctgttgcgccagggaccgggggaaccgccgccccggccggacctcgaccctgagctctatctcagtgtacacgaccccgcgggcgccctccaggctgccttcaggcggtatccccggggcgcccccgcaccacactgcgagatgagccgcttcgtgcctctccccgcctctgcgaaatgggccagcggcctgacccccgcgcagaactgcccgcgggccctggatggggcttggctgatggtcagcatatccagcccagtcctcagcctctccagcctcttgcgaccacagccagagcctcagcaggagcctgttctcatcaccatggcaacagtggtactgactgtcctcacccacacccctgcccctcgagtgagactgggacaagatgctctgctggacttgagctttgcctacatgccccccacctccgaggccgcctcatctctggctccgggtccccctccctttgggctagagtggcgacgccagcacctgggtaagggacatctgctcctggctgcaactcctgggctgaatggccagatgccagcagcccaagaaggggccgtggcatttgctgcttgggatgatgatgagccatggggcccatggaccggaaatgggaccttctggctgcctagagttcaaccctttcaggagggcacctatctggccaccatacacctgccatacctgcaaggacaggtcaccctggagcttgctgtgtacaaaccccccaaagtgtccctgatgccagcaacccttgcacgggccgccccaggggaggcacccccggaattgctctgccttgtgtcccacttctacccttctgggggcctggaggtggagtgggaactccggggtggcccagggggccgctctcagaaggccgaggggcagaggtggctctcggccctgcgccaccattccgatggctctgtcagcctctctgggcacttgcagccgcccccagtcaccactgagcagcatggggcacgctatgcctgtcgaattcaccatcccagcctgcctgcctcggggcgcagcgctgaggtcaccctggaggtagcaggtctttcagggccctcccttgaggacagcgtaggccttttcctgtctgcctttcttctgcttgggctcttcaaggcactgggctgggctgctgtctacctgtccacctgcaaggattcaaagaagaaagcagagtgagggcactcactgccatcctgtggaagccaccatcatctctggcccaagcttctgtagtagctccctaaaataataccctatcatctgctcctaatccctccaatctctctccactgagtggctggaatgcttttttttttttctttcacttatataagggataatttttcttttttttttttttttgagacggagtctcacctcttccgcccaggctgcagtgcagtggcatgatcttggcttactgcaacctccgcctcctgggttcaagcaattctgtggcttcagcctccggagtagctgggattacaggcacatgccaccacacccagtgaatttttgtatttttagtagagacggggtttcaccatgttggccaggctggtcttgaattcctgacctcaggtgatctgcccacctcagcctcccaaagtgctgggattacaggcgtgagccaccacaccaggcccgagaaatgcttttttaaaaaacacacatcttatggcattcaccttcttggagctctaggacagtggttctcaaaatttttttctctcaggacctcttaaaaatcatcaaggaccccaaaaagcttttgggtatgtgggttatagctatcaatatttatggtactagaacttaaaagtgagaaaaatttaaaacacgagaatacataggcacacattctattcatcgtgggaaccatggtgtcaatacatatcatgtagcttctgaaaaactccactgtacacttatagaatgaagaaggcaaaaaactttttttttttttttttggagacggagtctcgctctgtcgcccaggctggagtgcagtggcgcgatctcggctcactgcaagctccgcctctcgggttcacgccattctcctgcctcagcctcccaagtagctcggactacaggcgtcctccaccatgcctggctaatattttgtattttttagtagagacggggtttcaccgtgttagccaggatggtctcgatctcctaacctggtgatccgcccgcctcggcctcccaaagtattgggattacccgcgtgagccaccgcgcccggctgcaaataatctttctttttttctttttttctgagacagagtctcgctctgttgcccaggctggagtgcagtggcacgatctcggctcacggcacgctccgcctcccgggttcacgccattctcctgcctcagcttcccgagtagctgggactacaggggcccgccaccacgcccggctaactttttgtgtttttagtagagacggggtttcaccgtgttagccaggatggtctcgatctcctgaccttgtgatctgcccgcctcggcctcccaaagtgctgggattacaggcgtgagccaccgcgcccggcggcgaaacacgatattgtactaacatcttaattttgttataaaatctcacaaaccccctgacatagtctcagagatctgtagggccgaggttacatttggagaacccgtactctagggccaaatccattcttcttgccctggctcacttgtcccccccaccgccccgcgctggagccactgcctagtccctcttgtgcggttcaccacagttgtatttaagtgatcgtgtgagtcgtcgttaaatgcctgtctccccgcggatcatgggctcctcgaggacagggaccggcctgtctgtccactgctgtaaccccgcgccggcatagggacctaaggcccactggagggcgctcatcaagtagctgctggatgttgacgaaggaagcggcggcgcagctcagggatctccgagtcaggacggtcggccagacccacggggtaacgggtctaatcgtgtaggaataaagctgtattccagtgctccaaa

SEQ ID NO: 299426 - DNA, 3501 bp, Homo sapiens
ggggacgcggcacagatagggggaagccggagtaatggttttcgggcaagtggatgttggagagcacacacaggagttggggggcgggggagggcctggggttggggagggctcgaactcggggctgctgggtagtccaggagggcgcggtaaggctggggtgtcctggtgagaactggagaggatctacccgggtccctgcctggccagtggggaaacaccggtcccccaggcaccttcacctaaccagagcggggatttccaccgcccctcatgccgccctttggaggaaagtgaaagtgaaaggaggaagaggaggcttcatggctgaggaggtcgcagcgccatgaagtccctgtctctgctcctcgctgtggctttgggcctggcgaccgccgtctcagcaggacccgcggtgatcgagtgttggttcgtggaggatgcgagcggaaagggcctggccaagagacccggtgcactgctgttgcgccagggaccgggggaaccgccgccccggccggacctcgaccctgagctctatctcagtgtacacgaccccgcgggcgccctccaggctgccttcaggcggtatccccggggcgcccccgcaccacactgcgagatgagccgcttcgtgcctctccccgcctctgcgaaatgggccagcggcctgacccccgcgcagaactgcccgcgggccctggatggggcttggctgatggtcagcatatccagcccagtcctcagcctctccagcctcttgcgaccacagccagagcctcagcaggagcctgttctcatcaccatggcaacagtggtactgactgtcctcacccacacccctgcccctcgagtgagactgggacaagatgctctgctggacttgagctttgcctacatgccccccacctccgaggccgcctcatctctggctccgggtccccctccctttgggctagagtggcgacgccagcacctgggtaagggacatctgctcctggctgcaactcctgggctgaatggccagatgccagcagcccaagaaggggccgtggcatttgctgcttgggatgatgatgagccatggggcccatggaccggaaatgggaccttctggctgcctagagttcaaccctttcaggagggcacctatctggccaccatacacctgccatacctgcaaggacaggtcaccctggagcttgctgtgtacaaaccccccaaagtgtccctgatgccagcaacccttgcacgggccgccccaggggaggcacccccggaattgctctgccttgtgtcccacttctacccttctgggggcctggaggtggagtgggaactccggggtggcccagggggccgctctcagaaggccgaggggcagaggtggctctcggccctgcgccaccattccgatggctctgtcagcctctctgggcacttgcagccgcccccagtcaccactgagcagcatggggcacgctatgcctgtcgaattcaccatcccagcctgcctgcctcggggcgcagcgctgaggtcaccctggaggtagcaggtctttcagggccctcccttgaggacagcgtaggccttttcctgtctgcctttcttctgcttgggctcttcaaggcactgggctgggctgctgtctacctgtccacctgcaaggattcaaagaagaaagcagagtgagggcactcactgccatcctgtggaagccaccatcatctctggcccaagcttctgtagtagctccctaaaataataccctatcatctgctcctaatccctccaatctctctccactgagtggctggaatgcttttttttttttctttcacttatataagggataatttttcttttttttttttttttgagacggagtctcacctcttccgcccaggctgcagtgcagtggcatgatcttggcttactgcaacctccgcctcctgggttcaagcaattctgtggcttcagcctccggagtagctgggattacaggcacatgccaccacacccagtgaatttttgtatttttagtagagacggggtttcaccatgttggccaggctggtcttgaattcctgacctcaggtgatctgcccacctcagcctcccaaagtgctgggattacaggcgtgagccaccacaccaggcccgagaaatgcttttttaaaaaacacacatcttatggcattcaccttcttggagctctaggacagtggttctcaaaatttttttctctcaggacctcttaaaaatcatcaaggaccccaaaaagcttttgggtatgtgggttatagctatcaatatttatggtactagaacttaaaagtgagaaaaatttaaaacacgagaatacataggcacacattctattcatcgtgggaaccatggtgtcaatacatatcatgtagcttctgaaaaactccactgtacacttatagaatgaagaaggcaaaaaactttttttttttttttttggagacggagtctcgctctgtcgcccaggctggagtgcagtggcgcgatctcggctcactgcaagctccgcctctcgggttcacgccattctcctgcctcagcctcccaagtagctcggactacaggcgtcctccaccatgcctggctaatattttgtattttttagtagagacggggtttcaccgtgttagccaggatggtctcgatctcctaacctggtgatccgcccgcctcggcctcccaaagtattgggattacccgcgtgagccaccgcgcccggctgcaaataatctttctttttttctttttttctgagacagagtctcgctctgttgcccaggctggagtgcagtggcacgatctcggctcacggcacgctccgcctcccgggttcacgccattctcctgcctcagcttcccgagtagctgggactacaggggcccgccaccacgcccggctaactttttgtgtttttagtagagacggggtttcaccgtgttagccaggatggtctcgatctcctgaccttgtgatctgcccgcctcggcctcccaaagtgctgggattacaggcgtgagccaccgcgcccggcggcgaaacacgatattgtactaacatcttaattttgttataaaatctcacaaaccccctgacatagtctcagagatctgtagggccgaggttacatttggagaacccgtactctagggccaaatccattcttcttgccctggctcacttgtcccccccaccgccccgcgctggagccactgcctaccccgcggatcatgggctcctcgaggacagggaccggcctgtctgtccactgctgtaaccccgcgccggcatagggacctaaggcccactggagggcgctcatcaagtagctgctggatgttgacgaaggaagcggcggcgcagctcagggatctccgagtcaggacggtcggccagacccacggggtaacgggtctaatcgtgtaggaataaagctgtattccagtgctccaaa

SEQ ID NO: 299427 - DNA, 3996 bp, Homo sapiens
  misc_feature (3337)..(3337): n is a, c, g, or t
  misc_feature (3367)..(3367): n is a, c, g, or t
ggggacgcggcacagatagggggaagccggagtaatggttttcgggcaagtggatgttggagagcacacacaggagttggggggcgggggagggcctggggttggggagggctcgaactcggggctgctgggtagtccaggagggcgcggtaaggctggggtgtcctggtgagaactggagaggatctacccgggtccctgcctggccagtggggaaacaccggtcccccaggcaccttcacctaaccagagcggggatttccaccgcccctcatgccgccctttggaggaaagtgaaagtgaaaggaggaagaggaggcttcatggctgaggaggtcgcagcgccatgaagtccctgtctctgctcctcgctgtggctttgggcctggcgaccgccgtctcagcaggacccgcggtgatcgagtgttggttcgtggaggatgcgagcggaaagggcctggccaagagacccggtgcactgctgttgcgccagggaccgggggaaccgccgccccggccggacctcgaccctgagctctatctcagtgtacacgaccccgcgggcgccctccaggctgccttcaggcggtatccccggggcgcccccgcaccacactgcgagatgagccgcttcgtgcctctccccgcctctgcgaaatgggccagcggcctgacccccgcgcagaactgcccgcgggccctggatggggcttggctgatggtcagcatatccagcccagtcctcagcctctccagcctcttgcgaccacagccagagcctcagcaggagcctgttctcatcaccatggcaacagtggtactgactgtcctcacccacacccctgcccctcgagtgagactgggacaagatgctctgctggacttgagctttgcctacatgccccccacctccgaggccgcctcatctctggctccgggtccccctccctttgggctagagtggcgacgccagcacctgggtaagggacatctgctcctggctgcaactcctgggctgaatggccagatgccagcagcccaagaaggggccgtggcatttgctgcttgggatgatgatgagccatggggcccatggaccggaaatgggaccttctggctgcctagagttcaaccctttcaggagggcacctatctggccaccatacacctgccatacctgcaaggacaggtcaccctggagcttgctgtgtacaaaccccccaaagtgtccctgatgccagcaacccttgcacgggccgccccaggggaggcacccccggaattgctctgccttgtgtcccacttctacccttctgggggcctggaggtggagtgggaactccggggtggcccagggggccgctctcagaaggccgaggggcagaggtggctctcggccctgcgccaccattccgatggctctgtcagcctctctgggcacttgcagccgcccccagtcaccactgagcagcatggggcacgctatgcctgtcgaattcaccatcccagcctgcctgcctcggggcgcagcgctgaggtcaccctggaggtagcaggtctttcagggccctcccttgaggacagcgtaggccttttcctgtctgcctttcttctgcttgggctcttcaaggcactgggctgggctgctgtctacctgtccacctgcaaggattcaaagaagaaagcagagtgagggcactcactgccatcctgtggaagccaccatcatctctggcccaagcttctgtagtagctccctaaaataataccctatcatctgctcctaatccctccaatctctctccactgagtggctggaatgcttttttttttttctttcacttatataagggataatttttcttttttttttttttttgagacggagtctcacctcttccgcccaggctgcagtgcagtggcatgatcttggcttactgcaacctccgcctcctgggttcaagcaattctgtggcttcagcctccggagtagctgggattacaggcacatgccaccacacccagtgaatttttgtatttttagtagagacggggtttcaccatgttggccaggctggtcttgaattcctgacctcaggtgatctgcccacctcagcctcccaaagtgctgggattacaggcgtgagccaccacaccaggcccgagaaatgcttttttaaaaaacacacatcttatggcattcaccttcttggagctctaggacagtggttctcaaaatttttttctctcaggacctcttaaaaatcatcaaggaccccaaaaagcttttgggtatgtgggttatagctatcaatatttatggtactagaacttaaaagtgagaaaaatttaaaacacgagaatacataggcacacattctattcatcgtgggaaccatggtgtcaatacatatcatgtagcttctgaaaaactccactgtacacttatagaatgaagaaggcaaaaaactttttttttttttttttggagacggagtctcgctctgtcgcccaggctggagtgcagtggcgcgatctcggctcactgcaagctccgcctctcgggttcacgccattctcctgcctcagcctcccaagtagctcggactacaggcgtcctccaccatgcctggctaatattttgtattttttagtagagacggggtttcaccgtgttagccaggatggtctcgatctcctaacctggtgatccgcccgcctcggcctcccaaagtattgggattacccgcgtgagccaccgcgcccggctgcaaataatctttctttttttctttttttctgagacagagtctcgctctgttgcccaggctggagtgcagtggcacgatctcggctcacggcacgctccgcctcccgggttcacgccattctcctgcctcagcttcccgagtagctgggactacaggggcccgccaccacgcccggctaactttttgtgtttttagtagagacggggtttcaccgtgttagccaggatggtctcgatctcctgaccttgtgatctgcccgcctcggcctcccaaagtgctgggattacaggcgtgagccaccgcgcccggcggcgaaacacgatattgtactaacatcttaattttgttataaaatctcacaaaccccctgacatagtctcagagatctgtagggccgaggttacatttggagaacccgtactctagggccaaatccattcttcttgccctggctcacttgtcccccccaccgccccgcgctggagccactgcctagttcttcagccctagatggtgctcgccagacctcctctcaatgctcatcacacacagggctattccgttgntcctccagataaactccatgctcccccaangcagcaagaaaaagagaaagaaaaaaaaaacaacacaaaaaaaaaaaaaaaaaaaaaaaaaaaaaaaaaaaaaaaaaaaaaaaaaaaggggggggggcgccccataaagacaactccctcaggggggggccaccagtattacgcacccacgccgcgcatgtttggtgatacaagcgagtggcccccaaaaggagacggaggcgtctaagcggcgcgagacgagcgcgccgcgcgccgctataacacgcgtgtgagcgagcgggacgacaccacacacgcgcctacgcgagcgaaccacttcttggcgacacgccaacacccacactcactgccgggcggcggcgcgacacaaacgtggggggcacccaccacccaccccccgcgactactcgtcaacgaccccactggcggcgcgtccacacatcatccatgctttctgaagggttggtcgtactcaggcggggttgacactactcaccactctcccgcctctatatcgcgcgtgcgcgcgcccgtacagcaacaactagcttgcctactcccgcgcaggatctctcttgctttctctagtagctagataattttattacaccgagacggcatttcacgtttttgtaataaactcggga

SEQ ID NO: 299428 - DNA, 1074 bp, Homo sapiens
tgggacaaacctcaaccctatcccgggacaatcctttaaattaaaaaggaattttgcgaatttggcccattgggtaaaaaaagaacttattttacaaaaaatttcaccgaatttttaccaaaatttaacgccttcaattttccaattgccctttagggtgcgccactttttggaaaggccattggttcgggcctttttcctattaccccaacttgggaaaaggggattttcttcaaagcgatttaatttgggaaccccaaggtttttccaattccgacgtttttaaacggcggccaattaattgttaaaccgccccccataaggccaatttgggtccggggcccccccccaggttttttttttttttttttttttttttttttttttttttttttttttttttttttttttttttttttttttttttttttttttttttttttttttttttttttttttttgatctgtagggccgaggttacatttggagaacccgtactctagggccaaatccattcttcttgccctggctcacttgtcccccccaccgccccgcgctggagccactgcctagttcttcagccctagatggtgctcgccagacctcctctcaatgctcatcacacacagggctattcctttcctccaatgaaccaaacgcctcccgcccacctccaggtcccagtcctctgttccctttgcctggtccacccttgccctccctgggtcgcagacgaggtcggcctcgtcattccccgcagaccgccgcgcgtccctcttgtgcggttcaccacagttgtatttaagtgatcgtgtgagtcgtcgttaaatgcctgtctccccgcggatcatgggctcctcgaggacagggaccggcctgtctgtccactgctgtaaccccgcgccggcatagggacctaaggcccactggagggcgctcatcaagtagctgctggatgttgacgaaggaagcggcggcgcagctcagggatctccgagtcaggacggtcggccagacccacggggtaacgggtctaatcgtgtaggaataaagctgtattccagtgctccaaa

SEQ ID NO: 299429 - DNA, 807 bp, Homo sapiens
aaaaaaaaaaaaaaaaaaagaaagaaaagaaaataaattgcagcccttttctcaccttaagtattcaaacacaggtgtttattttaaatagtcagcacatctcaattcggactagccacatatcaaatgctcaatagcctaatgtgggtggtggctgtcatattggacagcggagcctgagaggacttttaggaggattaaggaagacagtgtatctccttaagaagatgcaggagatacagcactcagcacagtgtctggagggcagaaaatattagcctcatccttctcccatcatctgtgcccatgatagtttatatgtctctaaactgaccatgtacacctcaactgccttttaatatcctgaattcctttcctccaatgaaccaaacgcctcccgcccacctccaggtcccagtcctctgttccctttgcctggtccacccttgccctccctgggtcgcagacgaggtcggcctcgtcattccccgcagaccgccgcgcgtccctcttgtgcggttcaccacagttgtatttaagtgatcgtgtgagtcgtcgttaaatgcctgtctccccgcggatcatgggctcctcgaggacagggaccggcctgtctgtccactgctgtaaccccgcgccggcatagggacctaaggcccactggagggcgctcatcaagtagctgctggatgttgacgaaggaagcggcggcgcagctcagggatctccgagtcaggacggtcggccagacccacggggtaacgggtctaatcgtgtaggaataaagctgtattccagtgctccaaa

SEQ ID NO: 299430 - DNA, 1818 bp, Homo sapiens
  misc_feature (1795)..(1795): n is a, c, g, or t
ggggacgcggcacagatagggggaagccggagtaatggttttcgggcaagtggatgttggagagcacacacaggagttggggggcgggggagggcctggggttggggagggctcgaactcggggctgctgggtagtccaggagggcgcggtaaggctggggtgtcctggtgagaactggagaggatctacccgggtccctgcctggccagtggggaaacaccggtcccccaggcaccttcacctaaccagagcggggatttccaccgcccctcatgccgccctttggaggaaagtgaaagtgaaaggaggaagaggaggcttcatggctgaggaggtcgcagcgccatgaagtccctgtctctgctcctcgctgtggctttgggcctggcgaccgccgtctcagcaggacccgcggtgatcgagtgttggttcgtggaggatgcgagcggaaagggcctggccaagagacccggtgcactgctgttgcgccagggaccgggggaaccgccgccccggccggacctcgaccctgagctctatctcagtgtacacgaccccgcgggcgccctccaggctgccttcaggcggtatccccggggcgcccccgcaccacactgcgagatgagccgcttcgtgcctctccccgcctctgcgaaatgggccagcggcctgacccccgcgcagaactgcccgcgggccctggatggggcttggctgatggtcagcatatccagcccagtcctcagcctctccagcctcttgcgaccacagccagagcctcagcaggagcctgttctcatcaccatggcaacagtggtactgactgtcctcacccacacccctgcccctcgagtgagactgggacaagatgctctgctggacttgagctttgcctacatgccccccacctccgaggccgcctcatctctggctccgggtccccctccctttgggctagagtggcgacgccagcacctgggtaagggacatctgctcctggctgcaactcctgggctgaatggccagatgccagcagcccaagaaggggccgtggcatttgctgcttgggatgatgatgagccatggggcccatggaccggaaatgggaccttctggctgcctagagttcaaccctttcaggagggcacctatctggccaccatacacctgccatacctgcaaggacaggtcaccctggagcttgctgtgtacaaaccccccaaagtgtccctgatgccagcaacccttgcacgggccgccccaggggaggcacccccggaattgctctgccttgtgtcccacttctacccttctgggggcctggaggtggagtgggaactccggggtggcccagggggccgctctcagaaggccgaggggcagaggtggctctcggccctgcgccaccattccgatggctctgtcagcctctctgggcacttgcagccgcccccagtcaccactgagcagcatggggcacgctatgcctgtcgaattcaccatcccagcctgcctgcctcggggcgcagcgctgaggtcaccctggaggtagcaggtctttcagggccctcccttgaggacagcgtaggccttttcctgtctgcctttcttctgcttgggctcttcaaggcactgggctgggctgctgtctacctgtccacctgcaaggattcaaagaagaaagcagagtgagggcactcactgccatcctgtggaagccaccatcatctctggcccaagcttctgtagtagctccctaaaataatacccgtaatgatcatcataataatagcncgatactgtgaggccccatttat

SEQ ID NO: 299431 - DNA, 2673 bp, Homo sapiens
ggggacgcggcacagatagggggaagccggagtaatggttttcgggcaagtggatgttggagagcacacacaggagttggggggcgggggagggcctggggttggggagggctcgaactcggggctgctgggtagtccaggagggcgcggtaaggctggggtgtcctggtgagaactggagaggatctacccgggtccctgcctggccagtggggaaacaccggtcccccaggcaccttcacctaaccagagcggggatttccaccgcccctcatgccgccctttggaggaaagtgaaagtgaaaggaggaagaggaggcttcatggctgaggaggtcgcagcgccatgaagtccctgtctctgctcctcgctgtggctttgggcctggcgaccgccgtctcagcaggacccgcggtgatcgagtgttggttcgtggaggatgcgagcggaaagggcctggccaagagacccggtgcactgctgttgcgccagggaccgggggaaccgccgccccggccggacctcgaccctgagctctatctcagtgtacacgaccccgcgggcgccctccaggctgccttcaggcggtatccccggggcgcccccgcaccacactgcgagatgagccgcttcgtgcctctccccgcctctgcgaaatgggccagcggcctgacccccgcgcagaactgcccgcgggccctggatggggcttggctgatggtcagcatatccagcccagtcctcagcctctccagcctcttgcgaccacagccagagcctcagcaggagcctgttctcatcaccatggcaacagtggtactgactgtcctcacccacacccctgcccctcgagtgagactgggacaagatgctctgctggacttgagctttgcctacatgccccccacctccgaggccgcctcatctctggctccgggtccccctccctttgggctagagtggcgacgccagcacctgggtaagggacatctgctcctggctgcaactcctgggctgaatggccagatgccagcagcccaagaaggggccgtggcatttgctgcttgggatgatgatgagccatggggcccatggaccggaaatgggaccttctggctgcctagagttcaaccctttcaggagggcacctatctggccaccatacacctgccatacctgcaaggacaggtcaccctggagcttgctgtgtacaaaccccccaaagtgtccctgatgccagcaacccttgcacgggccgccccaggggaggcacccccggaattgctctgccttgtgtcccacttctacccttctgggggcctggaggtggagtgggaactccggggtggcccagggggccgctctcagaaggccgaggggcagaggtggctctcggccctgcgccaccattccgatggctctgtcagcctctctgggcacttgcagccgcccccagtcaccactgagcagcatggggcacgctatgcctgtcgaattcaccatcccagcctgcctgcctcggggcgcagcgctgaggtcaccctggaggtagcaggtaagagctgggagctctgcggaatctgagccagcacccaggaagacaggagctcactctcaccccttctgcctgccaggtctttcagggccctcccttgaggacagcgtaggccttttcctgtctgcctttcttctgcttgggctcttcaaggcactgggctgggctggtaagtgtcagccctaccctgaccatgacctgaggttggtggactttccccacctactcccaagagcctgacacccatccctctgccctccacctctaccactccagcatcccatcccttctcaatctttccccacagctgtctacctgtccacctgcaaggattcaaagaaggtacagtgctccacctctctgtatctttcccttgtcactttatctcctcatcctatctcaaaacccatggagggaggctgctggtgtggtaggcagaacctaggcttggaattcacactgatctgggttaaaacctggcactatatcctaactgtaggactctttgagcatgctacttaatctatatgtttccttgggtgtagggattttaaaaagttacttaggcagtgctgtccaatagaaagataatgcaagccacatatgtaaatttaaatactctagtactcacattaaaaaaataagcagaaacaggtaaaattaacttaataatataccttatttaatctaataattctggtcccttatctgaaatgcttgggtcagaagtgtttttggatgttggattttttcagactttggaatatttgcatatatttaatatctttgggatcagacccaaatctaaacacagaaatcatttatgtttcctatacactcacaccattgcactccagcctgggtgacaaaaggaaaacttcgtctcaacaacaaaaaaaaaagaaaaagaaattacagtcttggccaggtgcgttggttcacgcctgtaatcctagcactttgggaggctgaggagggcggatcacctgaggtcaggagttcaagaccagcctggcctcaggtgatcccgcctgcctccgccttcccagagtgctgggattacaggctgagccaccgtacctcgcacatttcgacatctgtaacaacgtcagacatg

SEQ ID NO: 299432 - DNA, 2715 bp, Homo sapiens
ggggacgcggcacagatagggggaagccggagtaatggttttcgggcaagtggatgttggagagcacacacaggagttggggggcgggggagggcctggggttggggagggctcgaactcggggctgctgggtagtccaggagggcgcggtaaggctggggtgtcctggtgagaactggagaggatctacccgggtccctgcctggccagtggggaaacaccggtcccccaggcaccttcacctaaccagagcggggatttccaccgcccctcatgccgccctttggaggaaagtgaaagtgaaaggaggaagaggaggcttcatggctgaggaggtcgcagcgccatgaagtccctgtctctgctcctcgctgtggctttgggcctggcgaccgccgtctcagcaggacccgcggtgatcgagtgttggttcgtggaggatgcgagcggaaagggcctggccaagagacccggtgcactgctgttgcgccagggaccgggggaaccgccgccccggccggacctcgaccctgagctctatctcagtgtacacgaccccgcgggcgccctccaggctgccttcaggcggtatccccggggcgcccccgcaccacactgcgagatgagccgcttcgtgcctctccccgcctctgcgaaatgggccagcggcctgacccccgcgcagaactgcccgcgggccctggatggggcttggctgatggtcagcatatccagcccagtcctcagcctctccagcctcttgcgaccacagccagagcctcagcaggagcctgttctcatcaccatggcaacagtggtactgactgtcctcacccacacccctgcccctcgagtgagactgggacaagatgctctgctggacttgagctttgcctacatgccccccacctccgaggccgcctcatctctggctccgggtccccctccctttgggctagagtggcgacgccagcacctgggtaagggacatctgctcctggctgcaactcctgggctgaatggccagatgccagcagcccaagaaggggccgtggcatttgctgcttgggatgatgatgagccatggggcccatggaccggaaatgggaccttctggctgcctagagttcaaccctttcaggagggcacctatctggccaccatacacctgccatacctgcaaggacaggtcaccctggagcttgctgtgtacaaaccccccaaagtgtccctgatgccagcaacccttgcacgggccgccccaggggaggcacccccggaattgctctgccttgtgtcccacttctacccttctgggggcctggaggtggagtgggaactccggggtggcccagggggccgctctcagaaggccgaggggcagaggtggctctcggccctgcgccaccattccgatggctctgtcagcctctctgggcacttgcagccgcccccagtcaccactgagcagcatggggcacgctatgcctgtcgaattcaccatcccagcctgcctgcctcggggcgcagcgctgaggtcaccctggaggtagcaggtaagagctgggagctctgcggaatctgagccagcacccaggaagacaggagctcactctcaccccttctgcctgccaggtctttcagggccctcccttgaggacagcgtaggccttttcctgtctgcctttcttctgcttgggctcttcaaggcactgggctgggctggtaagtgtcagccctaccctgaccatgacctgaggttggtggactttccccacctactcccaagagcctgacacccatccctctgccctccacctctaccactccagcatcccatcccttctcaatctttccccacagctgtctacctgtccacctgcaaggattcaaagaaggtacagtgctccacctctctgtatctttcccttgtcactttatctcctcatcctatctcaaaacccatggagggaggctgctggtgtggtaggcagaacctaggcttggaattcacactgatctgggttaaaacctggcactatatcctaactgtaggactctttgagcatgctacttaatctatatgtttccttgggtgtagggattttaaaaagttacttaggcagtgctgtccaatagaaagataatgcaagccacatatgtaaatttaaatactctagtactcacattaaaaaaataagcagaaacaggtaaaattaacttaataatataccttatttaatctaataattctggtcccttatctgaaatgcttgggtcagaagtgtttttggatgttggattttttcagactttggaatatttgcatatatttaatatctttgggatcagacccaaatctaaacacagaaatcatttatgtttcctatacaccttatacacatggcctgaagatttttttccttctcttttttttcacaccattgcactccagcctgggtgacaaaaggaaaacttcgtctcaacaacaaaaaaaaaagaaaaagaaattacagtcttggccaggtgcgttggttcacgcctgtaatcctagcactttgggaggctgaggagggcggatcacctgaggtcaggagttcaagaccagcctggcctcaggtgatcccgcctgcctccgccttcccagagtgctgggattacaggctgagccaccgtacctcgcacatttcgacatctgtaacaacgtcagacatg

SEQ ID NO: 299433 - DNA, 2535 bp, Homo sapiens
ggggacgcggcacagatagggggaagccggagtaatggttttcgggcaagtggatgttggagagcacacacaggagttggggggcgggggagggcctggggttggggagggctcgaactcggggctgctgggtagtccaggagggcgcggtaaggctggggtgtcctggtgagaactggagaggatctacccgggtccctgcctggccagtggggaaacaccggtcccccaggcaccttcacctaaccagagcggggatttccaccgcccctcatgccgccctttggaggaaagtgaaagtgaaaggaggaagaggaggcttcatggctgaggaggtcgcagcgccatgaagtccctgtctctgctcctcgctgtggctttgggcctggcgaccgccgtctcagcaggacccgcggtgatcgagtgttggttcgtggaggatgcgagcggaaagggcctggccaagagacccggtgcactgctgttgcgccagggaccgggggaaccgccgccccggccggacctcgaccctgagctctatctcagtgtacacgaccccgcgggcgccctccaggctgccttcaggcggtatccccggggcgcccccgcaccacactgcgagatgagccgcttcgtgcctctccccgcctctgcgaaatgggccagcggcctgacccccgcgcagaactgcccgcgggccctggatggggcttggctgatggtcagcatatccagcccagtcctcagcctctccagcctcttgcgaccacagccagagcctcagcaggagcctgttctcatcaccatggcaacagtggtactgactgtcctcacccacacccctgcccctcgagtgagactgggacaagatgctctgctggacttgagctttgcctacatgccccccacctccgaggccgcctcatctctggctccgggtccccctccctttgggctagagtggcgacgccagcacctgggtaagggacatctgctcctggctgcaactcctgggctgaatggccagatgccagcagcccaagaaggggccgtggcatttgctgcttgggatgatgatgagccatggggcccatggaccggaaatgggaccttctggctgcctagagttcaaccctttcaggagggcacctatctggccaccatacacctgccatacctgcaaggacaggtcaccctggagcttgctgtgtacaaaccccccaaagtgtccctgatgccagcaacccttgcacgggccgccccaggggaggcacccccggaattgctctgccttgtgtcccacttctacccttctgggggcctggaggtggagtgggaactccggggtggcccagggggccgctctcagaaggccgaggggcagaggtggctctcggccctgcgccaccattccgatggctctgtcagcctctctgggcacttgcagccgcccccagtcaccactgagcagcatggggcacgctatgcctgtcgaattcaccatcccagcctgcctgcctcggggcgcagcgctgaggtcaccctggaggtagcaggtaagagctgggagctctgcggaatctgagccagcacccaggaagacaggagctcactctcaccccttctgcctgccaggtctttcagggccctcccttgaggacagcgtaggccttttcctgtctgcctttcttctgcttgggctcttcaaggcactgggctgggctgctgtctacctgtccacctgcaaggattcaaagaaggtacagtgctccacctctctgtatctttcccttgtcactttatctcctcatcctatctcaaaacccatggagggaggctgctggtgtggtaggcagaacctaggcttggaattcacactgatctgggttaaaacctggcactatatcctaactgtaggactctttgagcatgctacttaatctatatgtttccttgggtgtagggattttaaaaagttacttaggcagtgctgtccaatagaaagataatgcaagccacatatgtaaatttaaatactctagtactcacattaaaaaaataagcagaaacaggtaaaattaacttaataatataccttatttaatctaataattctggtcccttatctgaaatgcttgggtcagaagtgtttttggatgttggattttttcagactttggaatatttgcatatatttaatatctttgggatcagacccaaatctaaacacagaaatcatttatgtttcctatacactcacaccattgcactccagcctgggtgacaaaaggaaaacttcgtctcaacaacaaaaaaaaaagaaaaagaaattacagtcttggccaggtgcgttggttcacgcctgtaatcctagcactttgggaggctgaggagggcggatcacctgaggtcaggagttcaagaccagcctggcctcaggtgatcccgcctgcctccgccttcccagagtgctgggattacaggctgagccaccgtacctcgcacatttcgacatctgtaacaacgtcagacatg

SEQ ID NO: 299434 - DNA, 2496 bp, Homo sapiens
ggggacgcggcacagatagggggaagccggagtaatggttttcgggcaagtggatgttggagagcacacacaggagttggggggcgggggagggcctggggttggggagggctcgaactcggggctgctgggtagtccaggagggcgcggtaaggctggggtgtcctggtgagaactggagaggatctacccgggtccctgcctggccagtggggaaacaccggtcccccaggcaccttcacctaaccagagcggggatttccaccgcccctcatgccgccctttggaggaaagtgaaagtgaaaggaggaagaggaggcttcatggctgaggaggtcgcagcgccatgaagtccctgtctctgctcctcgctgtggctttgggcctggcgaccgccgtctcagcaggacccgcggtgatcgagtgttggttcgtggaggatgcgagcggaaagggcctggccaagagacccggtgcactgctgttgcgccagggaccgggggaaccgccgccccggccggacctcgaccctgagctctatctcagtgtacacgaccccgcgggcgccctccaggctgccttcaggcggtatccccggggcgcccccgcaccacactgcgagatgagccgcttcgtgcctctccccgcctctgcgaaatgggccagcggcctgacccccgcgcagaactgcccgcgggccctggatggggcttggctgatggtcagcatatccagcccagtcctcagcctctccagcctcttgcgaccacagccagagcctcagcaggagcctgttctcatcaccatggcaacagtggtactgactgtcctcacccacacccctgcccctcgagtgagactgggacaagatgctctgctggacttgagctttgcctacatgccccccacctccgaggccgcctcatctctggctccgggtccccctccctttgggctagagtggcgacgccagcacctgggtaagggacatctgctcctggctgcaactcctgggctgaatggccagatgccagcagcccaagaaggggccgtggcatttgctgcttgggatgatgatgagccatggggcccatggaccggaaatgggaccttctggctgcctagagttcaaccctttcaggagggcacctatctggccaccatacacctgccatacctgcaaggacaggtcaccctggagcttgctgtgtacaaaccccccaaagtgtccctgatgccagcaacccttgcacgggccgccccaggggaggcacccccggaattgctctgccttgtgtcccacttctacccttctgggggcctggaggtggagtgggaactccggggtggcccagggggccgctctcagaaggccgaggggcagaggtggctctcggccctgcgccaccattccgatggctctgtcagcctctctgggcacttgcagccgcccccagtcaccactgagcagcatggggcacgctatgcctgtcgaattcaccatcccagcctgcctgcctcggggcgcagcgctgaggtcaccctggaggtagcaggtaagagctgggagctctgcggaatctgagccagcacccaggaagacaggagctcactctcaccccttctgcctgccaggtctttcagggccctcccttgaggacagcgtaggccttttcctgtctgcctttcttctgcttgggctcttcaaggcactgggctgggctggtaagtgtcagccctaccctgaccatgacctgaggttggtggactttccccacctactcccaagagcctgacacccatccctctgccctccacctctaccactccagcatcccatcccttctcaatctttccccacagctgtctacctgtccacctgcaaggattcaaagaaggtacagtgctccacctctctgtatctttcccttgtcactttatctcctcatcctatctcaaaacccatggagggaggctgctggtgtggtaggcagaacctaggcttggaattcacactgatctgggttaaaacctggcactatatcctaactgtaggactctttgagcatgctacttaatctatatgtttccttgggtgtagggattttaaaaagttacttaggcagtgctgtccaatagaaagataatgcaagccacatatgtaaatttaaatactctagtactcacattaaaaaaataagcagaaacaggtaaaattaacttaataatataccttatttaatctaataattctggtcccttatctgaaatgcttgggtcagaagtgtttttggatgttggattttttcagactttggaatatttgcatatatttaatatctttgggatcagacccaaatctaaacacagaaatcatttatgtttcctatacaccttatacacatggcctgaagatttttttccttctctttttttttgagacagagtctctgtcgcccaggctggggtgcagtggtgcgatctcggctcactgca

SEQ ID NO: 299435 - DNA, 3023 bp, Homo sapiens
ggggacgcggcacagatagggggaagccggagtaatggttttcgggcaagtggatgttggagagcacacacaggagttggggggcgggggagggcctggggttggggagggctcgaactcggggctgctgggtagtccaggagggcgcggtaaggctggggtgtcctggtgagaactggagaggatctacccgggtccctgcctggccagtggggaaacaccggtcccccaggcaccttcacctaaccagagcggggatttccaccgcccctcatgccgccctttggaggaaagtgaaagtgaaaggaggaagaggaggcttcatggctgaggaggtcgcagcgccatgaagtccctgtctctgctcctcgctgtggctttgggcctggcgaccgccgtctcagcaggacccgcggtgatcgagtgttggttcgtggaggatgcgagcggaaagggcctggccaagagacccggtgcactgctgttgcgccagggaccgggggaaccgccgccccggccggacctcgaccctgagctctatctcagtgtacacgaccccgcgggcgccctccaggctgccttcaggcggtatccccggggcgcccccgcaccacactgcgagatgagccgcttcgtgcctctccccgcctctgcgaaatgggccagcggcctgacccccgcgcagaactgcccgcgggccctggatggggcttggctgatggtcagcatatccagcccagtcctcagcctctccagcctcttgcgaccacagccagagcctcagcaggagcctgttctcatcaccatggcaacagtggtactgactgtcctcacccacacccctgcccctcgagtgagactgggacaagatgctctgctggacttgagctttgcctacatgccccccacctccgaggccgcctcatctctggctccgggtccccctccctttgggctagagtggcgacgccagcacctgggtaagggacatctgctcctggctgcaactcctgggctgaatggccagatgccagcagcccaagaaggggccgtggcatttgctgcttgggatgatgatgagccatggggcccatggaccggaaatgggaccttctggctgcctagagttcaaccctttcaggagggcacctatctggccaccatacacctgccatacctgcaaggacaggtcaccctggagcttgctgtgtacagtgagttgggggacagaggtctccaggggtagagggtgggcactggattgtggtgaccgtaatagggggagggatgatggataagagggtgcctgggcaagtaagtagagatagaaagaggttcctgggagttagaggggtaatgggaggctagaagtttcctggaaatttgaggggctttgacatgggtatttctgtgacgcaccaatggagagacagtgggttccctatttcaggagaagaaacctaaccttctttagttctgaggaagccagcaggcaaactgagggtctcttagggaggacagtatggactgatttccctatgctcatttcgtcctctttccccagaaccccccaaagtgtccctgatgccagcaacccttgcacgggccgccccaggggaggcacccccggaattgctctgccttgtgtcccacttctacccttctgggggcctggaggtggagtgggaactccggggtggcccagggggccgctctcagaaggccgaggggcagaggtggctctcggccctgcgccaccattccgatggctctgtcagcctctctgggcacttgcagccgcccccagtcaccactgagcagcatggggcacgctatgcctgtcgaattcaccatcccagcctgcctgcctcggggcgcagcgctgaggtcaccctggaggtagcaggtaagagctgggagctctgcggaatctgagccagcacccaggaagacaggagctcactctcaccccttctgcctgccaggtctttcagggccctcccttgaggacagcgtaggccttttcctgtctgcctttcttctgcttgggctcttcaaggcactgggctgggctggtaagtgtcagccctaccctgaccatgacctgaggttggtggactttccccacctactcccaagagcctgacacccatccctctgccctccacctctaccactccagcatcccatcccttctcaatctttccccacagctgtctacctgtccacctgcaaggattcaaagaaggtacagtgctccacctctctgtatctttcccttgtcactttatctcctcatcctatctcaaaacccatggagggaggctgctggtgtggtaggcagaacctaggcttggaattcacactgatctgggttaaaacctggcactatatcctaactgtaggactctttgagcatgctacttaatctatatgtttccttgggtgtagggattttaaaaagttacttaggcagtgctgtccaatagaaagataatgcaagccacatatgtaaatttaaatactctagtactcacattaaaaaaataagcagaaacaggtaaaattaacttaataatataccttatttaatctaataattctggtcccttatctgaaatgcttgggtcagaagtgtttttggatgttggattttttcagactttggaatatttgcatatatttaatatctttgggatcagacccaaatctaaacacagaaatcatttatgtttcctatacactcacaccattgcactccagcctgggtgacaaaaggaaaacttcgtctcaacaacaaaaaaaaaagaaaaagaaattacagtcttggccaggtgcgttggttcacgcctgtaatcctagcactttgggaggctgaggagggcggatcacctgaggtcaggagttcaagaccagcctggcctcaggtgatcccgcctgcctccgccttcccagagtgctgggattacaggctgagccaccgtacctcgcacatttcgacatctgtaacaacgtcagacatg

SEQ ID NO: 299436 - DNA, 1340 bp, Homo sapiens
ggggacgcggcacagatagggggaagccggagtaatggttttcgggcaagtggatgttggagagcacacacaggagttggggggcgggggagggcctggggttggggagggctcgaactcggggctgctgggtagtccaggagggcgcggtaaggctggggtgtcctggtgagaactggagaggatctacccgggtccctgcctggccagtggggaaacaccggtcccccaggcaccttcacctaaccagagcggggatttccaccgcccctcatgccgccctttggaggaaagtgaaagtgaaaggaggaagaggaggcttcatggctgaggaggtcgcagcgccatgaagtccctgtctctgctcctcgctgtggctttgggcctggcgaccgccgtctcagcaggacccgcggtgatcgagtgttggttcgtggaggatgcgagcggaaagggcctggccaagagacccggtgcactgctgttgcgccagggaccgggggaaccgccgccccggccggacctcgaccctgagctctatctcagtgtacacgaccccgcgggcgccctccaggctgccttcaggcggtatccccggggcgcccccgcaccacactgcgagatgagccgcttcgtgcctctccccgcctctgcgaaatgggccagcggcctgacccccgcgcagaactgcccgcgggccctggatggggcttggctgatggtcagcatatccagcccagtcctcagcctctccagcctcttgcgaccacagccagagcctcagcaggagcctgttctcatcaccatggcaacaggtagctggggaggggaggtggagaagggtgggtagattctaagggtccagatcagccggtggtctcgctttatggacttgagcaagacatttcgccaatcggggttcagtttcctttttttgttaagagaggtggtttggctagaatgaatcaatctctaccgctccttctagccctcacccagttaaaaaaaaaaaacaaaaaaaaaactgcagcttggcagggggtagggggaaagcagggccgggcaggggggttactttctggtgtttcgaagggcggggctttgaagaggtggggtttcccgacaccagaccttgagagacttgtcaggtgatgcgaggtgggaggggttcagaagcaggagcgttttttctctgctcttcccagatctgtgtcttgctctgcaccctcagctttgcgggtcactctttcaaaacccagcactctatccccacctgcgcccacacccggcgctgcggcaatccgcaaagcaaaggctcttgcactctagcgcgttgacct

SEQ ID NO: 299437 - DNA, 742 bp, Homo sapiens
cgggaggttgaggcaggagaattgcttgaacccgggaggcggaggttgcagtgagccaagatcgcgccattgcattccagcctggcgacagagcaagactccaactcaaaacaaacaaataacaacaacaacaacaaaaaggcattaacaacaacaacaaaaaggcattattaggaaatagttaaataaagatatcagggattgggccatgcacacatctgggggaacatgattcctgcaaagggaatagcaaatgcaatggctcttgtaggggcagagggttggagaaactgcaacagggccagtggggctgaagcacagagagagaggaaaaaaacaaggtaagagaagagacagttaacaaggggcccaagtcataaagcccatttgaagaacagtggctttcgctataagtgacaaggaaaaccactgaagtttttagcagaaagcagatgtcatctgacgtacattttgacaggatcactctacttgccacatagagcctggcatttagaaggtgctcaagaaacgaccagttgaaattgcataaaaattaaccaggccagggccgggcgcaaaggctcacacctataatcctagtactttgggaggctgaggtgggcggatcacgaggtcaggagatcgagaccatcctggctaacacggtgaaacccgtctccactaaaaatacaaaaaattagccgggcctggtggcgggggcctgtagtcccagctactcggg

SEQ ID NO: 299438 - DNA, 2372 bp, Homo sapiens
aaatgctctcagctgcactataccaaggcacgaggagctgagatgaataatgaacttaattttccataaagacattctgtttggcattccagctaataaggttccacaagatgaatggacagggtacaccccacgaggtaaagatgatgaaattccatgccgaagaatgcggagtggcagttatatcaaggccatgggggatgaagacagtggagactcagacacgagtcctaagccttctccaaaagttgctgcgcggagagaaagctatctcaaggctactcagccatcccttacagaactcaccacactcaaaatctccaatgaacactcacccaaactccagatccggagtcatagttacctgagggcagtgagtgaagtctccatcaaccggagcctggacagcctggaccctgcaggcttgctcacatcaccaaagttccgctccaggaatgagagctacatgcgagccatgagcaccatcagccaggtgagcgagatggaagtgaacgggcagttcgagtccgtgtgcgagtccgtgttcagcgagctggagtcgcaggccgtggaagcgctggacctgcccatgcccggctgcttccgcatgcggagccacagctatgtgcgggccattgagaaaggctgctcccaggacgacgagtgcgtgtccctgaggtcgtcctcgccgccgcgcaccaccaccaccgttaggaccatccagagcagcacggtgtcatcttgcattacaacatataagaagacaccacctccagtcccacccagaactaccacgaaacctttcatttctatcacagcccagagtagcacagagtcagcccaggatgcctacatggacggacagggccagcgaggagatattatcagccagtctggactcagcaactccaccgagagcctggacagtatgaaggctctgacagccgccatcgaagctgcaaacgcccagatccatggccctgccagtcaacacatgggcaataacactgccaccgtcaccaccacgactaccatagccaccgtcaccacggaggacaggaagaaggaccactttaagaaaaatcgatgcctgtctatcgggatacaggtggatgatgctgaagaacctgacaaaacaggggagaataaagcacccagtaagttccagtccgtgggagtgcaagtagaagaagagaagtgcttccgcaggttcactcgatccaacagtgtgacgacagcagtacaggccgacctggacttccatgataatctggaaaattctctggaatctatagaggacaattcgtgtcctggccccatggccagacagttctcccgcgatgccagcacctccacagtcagcattcagggctcaggaaaccattaccatgcctgtgccgccgatgatgactttgacacggattttgacccctctattctgcctcctccggacccctggattgactctatcactgaagaccctctggaggccgtgcaaaggtcagtgtgccaccgggatggccactggttcctgaagcttctccaggcagagcgagaccgcatggaggggtggtgtcaacagatggagcgggaagaacgggaaaacaacctgcccgaagacattctaggaaaaatccgaaccgcagtgggcagtgcccaacttctcatggcccagaaattctaccagttcagagaactgtgtgaagaaaacctgaatcctaatgctcatccaagacccacctcccaggatttggcggggttttgggacatgctgcagttgtccatagaaaatattagtatgaaatttgatgaacttcatcagttaaaggccaataattggaaacagatggatcctcttgacaagaaggtagaacaatgtagattttgtatggttcatttaaaaacctgcacaaacactggacagtctaaataggcttctgcattcagtcctgctgtttacaatgtgaaatggagctgatatcatattaatttcattgtaatgacaatgtttacatagtaatcatttgggatattatctgtaatatgtttcaggcatatttttaaagaaaaacctgtctttgtgaattggaaaatgggaatgtggctttttttgttaattaaactttaagttaaaccattttagtcactggaaggaactgcctccattttgctttttaaactaaaataaatgacatcttcagtgcatgaatccatagaacaagagttcaacttccttacacccctaggatgtgttttcaagaaaaataggatgccctgaaaaataactgactttgataatcatttcataaatatagtaataaagaaattactgttgttcaagtctaaaaatatataccataaagtttcacagt

SEQ ID NO: 299439 - DNA, 3445 bp, Homo sapiens
tgcccaagacgggtctggagcctgacttccgggtgtccatgaccctggcggctgcttccggtccgccatgaaagggctatcaggcagccgcagccatcaccacggggtcacctgcgactcggcctgtgactcgctgtcgcaccactccgaccgcaagccctacctgctgagcccagtggagcaccaccccgcagaccacccatactacacccagcggaactccttccaggctgagtgcgtgggccccttcagcgacccgctggccagcagcaccttcccccgcaggcactacacctcgcagcaagagctgaaggacgagtgtgccctggtgccccgcaccctggccaccaaggcgaaccgcatccccgccaacctgctggaccagttcgagcggcagctgccactcagccgcgatggctatcacaccctgcagtacaagcgcacggccgtggagcaccgcagcgacagccccggccgcatccgccacctggtgcactcggtccagaagctcttcaccaagtcgcactccctggaggggccgtccaagggcagcgtcaacgggggcaaggccagccctgacgaggcgcaggcggcgcgctatggcaaacgcagcaagagcaaggagcggcgcgcggagcccaaggcccggcccagcacctccccgggctggtggagctcggacgacaacctggatggtgacatgtgcatctaccacgccccctcgggcgtgatgaccatgggcaggtgccccgaccgctcggcctcacagtacttcctggaggcctacaacaccatcagcgagcaggcggtgaaggcctcccggagcaacaacgacgtcaagtgctccacctgcgccaacctgccggtcagcctggacaccccgctgctgaagaagagcgcctggtcctccacgctcaccgtgagccgggcccgggaggtttaccagaaggcctcggtgaacatggaccaggccatggtgaagtccgagtcgtgtcagcaagaacgctcctgccagtacctgcaggttccacaagatgaatggacagggtacaccccacgaggtaaagatgatgaaattccatgccgaagaatgcggagtggcagttatatcaaggccatgggggatgaagacagtggagactcagacacgagtcctaagccttctccaaaagttgctgcgcggagagaaagctatctcaaggctactcagccatcccttacagaactcaccacactcaaaatctccaatgaacactcacccaaactccagatccggagtcatagttacctgagggcagtgagtgaagtctccatcaaccggagcctggacagcctggaccctgcaggcttgctcacatcaccaaagttccgctccaggaatgagagctacatgcgagccatgagcaccatcagccaggtgagcgagatggaagtgaacgggcagttcgagtccgtgtgcgagtccgtgttcagcgagctggagtcgcaggccgtggaagcgctggacctgcccatgcccggctgcttccgcatgcggagccacagctatgtgcgggccattgagaaaggctgctcccaggacgacgagtgcgtgtccctgaggtcgtcctcgccgccgcgcaccaccaccaccgttaggaccatccagagcagcacggtgtcatcttgcattacaacatataagaagacaccacctccagtcccacccagaactaccacgaaacctttcatttctatcacagcccagagtagcacagagtcagcccaggatgcctacatggacggacagggccagcgaggagatattatcagccagtctggactcagcaactccaccgagagcctggacagtatgaaggctctgacagccgccatcgaagctgcaaacgcccagatccatggccctgccagtcaacacatgggcaataacactgccaccgtcaccaccacgactaccatagccaccgtcaccacggaggacaggaagaaggaccactttaagaaaaatcgatgcctgtctatcgggatacaggtggatgatgctgaagaacctgacaaaacaggggagaataaagcacccagtaagttccagtccgtgggagtgcaagtagaagaagagaagtgcttccgcaggttcactcgatccaacagtgtgacgacagcagtacaggccgacctggacttccatgataatctggaaaattctctggaatctatagaggacaattcgtgtcctggccccatggccagacagttctcccgcgatgccagcacctccacagtcagcattcagggctcaggaaaccattaccatgcctgtgccgccgatgatgactttgacacggattttgacccctctattctgcctcctccggacccctggattgactctatcactgaagaccctctggaggccgtgcaaaggtcagtgtgccaccgggatggccactggttcctgaagcttctccaggcagagcgagaccgcatggaggggtggtgtcaacagatggagcgggaagaacgggaaaacaacctgcccgaagacattctaggaaaaatccgaaccgcagtgggcagtgcccaacttctcatggcccagaaattctaccagttcagagaactgtgtgaagaaaacctgaatcctaatgctcatccaagacccacctcccaggatttggcggggttttgggacatgctgcagttgtccatagaaaatattagtatgaaatttgatgaacttcatcagttaaaggccaataattggaaacagatggatcctcttgacaagaaggagagaagggcccctcctccagtgccaaagaagccggcgaagggccccgcgccgctgatccgggagcgctcgctggagagctcgcagcgccaggaggcccgcaagcgcctgatggccgccaagcgcgccgcgtccgtccgccagaactcggccaccgagagcgccgagagcatcgagatctacatccccgaggcgcagacccggctctgagcgccccgcagcccggccgccgccgccaagcatctgtcccctcctcccccggccgctcctctgccggctgcctctccccctccgagcccgtccgctcccgagctcggtgacttccactgtcgcggtgtagttgtccacctcgcaggagccgccccccgggcccccctcagccccccacttcccgtacccgtttgcccatctccttcttcaccgagcttcgccccctgtcctgatgccgtcgccctgcctcatactgagatccaaccctttattttctgggcaaagccaaacccacctgtgtagaagtgatgcctttaggtcacccgccgtcctcagttctctcgagctagtctgttcagcaatataaaaccatagggtatttcagaaatccagtatcacagggtgatcctttgggacttaccgtcttccacgtgaaagaaacta

SEQ ID NO: 299440 - DNA, 2521 bp, Homo sapiens
aaatgctctcagctgcactataccaaggcacgaggagctgagatgaataatgaacttaattttccataaagacattctgtttggcattccagctaataaggttccacaagatgaatggacagggtacaccccacgaggtaaagatgatgaaattccatgccgaagaatgcggagtggcagttatatcaaggccatgggggatgaagacagtggagactcagacacgagtcctaagccttctccaaaagttgctgcgcggagagaaagctatctcaaggctactcagccatcccttacagaactcaccacactcaaaatctccaatgaacactcacccaaactccagatccggagtcatagttacctgagggcagtgagtgaagtctccatcaaccggagcctggacagcctggaccctgcaggcttgctcacatcaccaaagttccgctccaggaatgagagctacatgcgagccatgagcaccatcagccaggtgagcgagatggaagtgaacgggcagttcgagtccgtgtgcgagtccgtgttcagcgagctggagtcgcaggccgtggaagcgctggacctgcccatgcccggctgcttccgcatgcggagccacagctatgtgcgggccattgagaaaggctgctcccaggacgacgagtgcgtgtccctgaggtcgtcctcgccgccgcgcaccaccaccaccgttaggaccatccagagcagcacggtgtcatcttgcattacaacatataagaagacaccacctccagtcccacccagaactaccacgaaacctttcatttctatcacagcccagagtagcacagagtcagcccaggatgcctacatggacggacagggccagcgaggagatattatcagccagtctggactcagcaactccaccgagagcctggacagtatgaaggctctgacagccgccatcgaagctgcaaacgcccagatccatggccctgccagtcaacacatgggcaataacactgccaccgtcaccaccacgactaccatagccaccgtcaccacggaggacaggaagaaggaccactttaagaaaaatcgatgcctgtctatcgggatacaggtggatgatgctgaagaacctgacaaaacaggggagaataaagcacccagtaagttccagtccgtgggagtgcaagtagaagaagagaagtgcttccgcaggttcactcgatccaacagtgtgacgacagcagtacaggccgacctggacttccatgataatctggaaaattctctggaatctatagaggacaattcgtgtcctggccccatggccagacagttctcccgcgatgccagcacctccacagtcagcattcagggctcaggaaaccattaccatgcctgtgccgccgatgatgactttgacacggattttgacccctctattctgcctcctccggacccctggattgactctatcactgaagaccctctggaggccgtgcaaaggtcagtgtgccaccgggatggccactggttcctgaagcttctccaggcagagcgagaccgcatggaggggtggtgtcaacagatggagcgggaagaacgggaaaacaacctgcccgaagacattctaggaaaaatccgaaccgcagtgggcagtgcccaacttctcatggcccagaaattctaccagttcagagaactgtgtgaagaaaacctgaatcctaatgctcatccaagacccacctcccaggatttggcggggttttgggacatgctgcagttgtccatagaaaatattagtatgaaatttgatgaacttcatcagttaaaggccaataattggaaacagatggatcctcttgacaagaaggagagaagggcccctcctccagtgccaaagaagccggcgaagggccccgcgccgctgatccgggagcgctcgctggagagctcgcagcgccaggaggcccgcaagcgcctgatggccgccaagcgcgccgcgtccgtccgccagaactcggccaccgagagcgccgagagcatcgagatctacatccccgaggcgcagacccggctctgagcgccccgcagcccggccgccgccgccaagcatctgtcccctcctcccccggccgctcctctgccggctgcctctccccctccgagcccgtccgctcccgagctcggtgacttccactgtcgcggtgtagttgtccacctcgcaggagccgccccccgggcccccctcagccccccacttcccgtacccgtttgcccatctccttcttcaccgagcttcgccccctgtcctgatgccgtcgccctgcctcatactgagatccaaccctttattttctgggcaaagccaaacccacctgtgtagaagtgatgcctttaggtcacccgccgtcctcagttctctcgagctagtctgttcagcaatataaaaccatagggtatttcagaaatccagtatcacagggtgatcctttgggacttaccgtcttccacgtgaaagaaacta

SEQ ID NO: 299441 - DNA, 778 bp, Homo sapiens
aaatgctctcagctgcactataccaaggcacgaggagctgagatgaataatgaacttaattttccataaagacattctgtttggcattccagctaataaggttccacaagatgaatggacagggtacaccccacgaggtaaagatgatgaaattccatgccgaagaatgcggagtggcagttatatcaaggccatgggggatgaagacagtggagactcagacacgagtcctaagccttctccaaaagttgctgcgcggagagaaagctatctcaaggctactcagccatcccttacagaactcaccacactcaataaaaccgtatttttaagaagttaggccaaataaccgaatggaacgactgggcccaccaccactatcccccactagcccgtttcataagagacatcatctccaggagcgagaggcaaagcagcggtgagcaagccagcccttccagcaggacgaatatgtcacctttccatgacacagctcctgccatctgaaacagaacccctcagacatcccagacacagtctctcctaaatgggctaagaaaaggcatcactagtattccatccatctatcatgtcctatatgatactcacaccataacgacttctcagcacccctgcctctaagactccacagttaccacaagtcctgccgtcactgaccattacacattcttcctcttgaattaccttgtcactaacgagaaaaggctttgggtacctggcagacccaggttgaacttgaccaggcttttgctaagtc

SEQ ID NO: 299442 - DNA, 2477 bp, Homo sapiens
cgtcgacacggctgcgagagacgacagaaggggggtagaagtggagagagagagacagagggagcgagagagagagcaagacagaccgagaaggaaagcactcccagagatgaaattttaggaaagcaaaatgatcgacctttttaaggctgagtgggtttcttcagtttgtgtgcaagtttcaagaaatggaaggactgaccaggttccacaagatgaatggacagggtacaccccacgaggtaaagatgatgaaattccatgccgaagaatgcggagtggcagttatatcaaggccatgggggatgaagacagtggagactcagacacgagtcctaagccttctccaaaagttgctgcgcggagagaaagctatctcaaggctactcagccatcccttacagaactcaccacactcaaaatctccaatgaacactcacccaaactccagatccggagtcatagttacctgagggcagtgagtgaagtctccatcaaccggagcctggacagcctggaccctgcaggcttgctcacatcaccaaagttccgctccaggaatgagagctacatgcgagccatgagcaccatcagccaggtgagcgagatggaagtgaacgggcagttcgagtccgtgtgcgagtccgtgttcagcgagctggagtcgcaggccgtggaagcgctggacctgcccatgcccggctgcttccgcatgcggagccacagctatgtgcgggccattgagaaaggctgctcccaggacgacgagtgcgtgtccctgaggtcgtcctcgccgccgcgcaccaccaccaccgttaggaccatccagagcagcacggtgtcatcttgcattacaacatataagaagacaccacctccagtcccacccagaactaccacgaaacctttcatttctatcacagcccagagtagcacagagtcagcccaggatgcctacatggacggacagggccagcgaggagatattatcagccagtctggactcagcaactccaccgagagcctggacagtatgaaggctctgacagccgccatcgaagctgcaaacgcccagatccatggccctgccagtcaacacatgggcaataacactgccaccgtcaccaccacgactaccatagccaccgtcaccacggaggacaggaagaaggaccactttaagaaaaatcgatgcctgtctatcgggatacaggtggatgatgctgaagaacctgacaaaacaggggagaataaagcacccagtaagttccagtccgtgggagtgcaagtagaagaagagaagtgcttccgcaggttcactcgatccaacagtgtgacgacagcagtacaggccgacctggacttccatgataatctggaaaattctctggaatctatagaggacaattcgtgtcctggccccatggccagacagttctcccgcgatgccagcacctccacagtcagcattcagggctcaggaaaccattaccatgcctgtgccgccgatgatgactttgacacggattttgacccctctattctgcctcctccggacccctggattgactctatcactgaagaccctctggaggccgtgcaaaggtcagtgtgccaccgggatggccactggttcctgaagcttctccaggcagagcgagaccgcatggaggggtggtgtcaacagatggagcgggaagaacgggaaaacaacctgcccgaagacattctaggaaaaatccgaaccgcagtgggcagtgcccaacttctcatggcccagaaattctaccagttcagagaactgtgtgaagaaaacctgaatcctaatgctcatccaagacccacctcccaggatttggcggggttttgggacatgctgcagttgtccatagaaaatattagtatgaaatttgatgaacttcatcagttaaaggccaataattggaaacagatggatcctcttgacaagaaggtagaacaatgtagattttgtatggttcatttaaaaacctgcacaaacactggacagtctaaataggcttctgcattcagtcctgctgtttacaatgtgaaatggagctgatatcatattaatttcattgtaatgacaatgtttacatagtaatcatttgggatattatctgtaatatgtttcaggcatatttttaaagaaaaacctgtctttgtgaattggaaaatgggaatgtggctttttttgttaattaaactttaagttaaaccattttagtcactggaaggaactgcctccattttgctttttaaactaaaataaatgacatcttcagtgcatgaatccatagaacaagagttcaacttccttacacccctaggatgtgttttcaagaaaaataggatgccctgaaaaataactgactttgataatcatttcataaatatagtaataaagaaattactgttgttcaagtctaaaaatatataccataaagtttcacagt

SEQ ID NO: 299443 - DNA, 2379 bp, Homo sapiens
cgtcgacacggctgcgagagacgacagaaggggggtagaagtggagagagagagacagagggagcgagagagagagcaagacagaccgagaaggaaagcactcccagagatgaaattttaggaaagcaaaatgatcgacctttttaaggctgagtgggtttcttcagtttgtgtgcaagtttcaagaaatggaaggactgaccaggttccacaagatgaatggacagggtacaccccacgaggtaaagatgatgaaattccatgccgaagaatgcggagtggcagttatatcaaggccatgggggatgaagacagtggagactcagacacgagtcctaagccttctccaaaagttgctgcgcggagagaaagctatctcaaggctactcagccatcccttacagaactcaccacactcaaaatctccaatgaacactcacccaaactccagatccggagtcatagttacctgagggcagtgagtgaagtctccatcaaccggagcctggacagcctggaccctgcaggcttgctcacatcaccaaagttccgctccaggaatgagagctacatgcgagccatgagcaccatcagccaggtgagcgagatggaagtgaacgggcagttcgagtccgtgtgcgagtccgtgttcagcgagctggagtcgcaggccgtggaagcgctggacctgcccatgcccggctgcttccgcatgcggagccacagctatgtgcgggccattgagaaaggctgctcccaggacgacgagtgcgtgtccctgaggtcgtcctcgccgccgcgcaccaccaccaccgttaggaccatccagagcagcacggtgtcatcttgcattacaacatataagaagacaccacctccagtcccacccagaactaccacgaaacctttcatttctatcacagcccagagtagcacagagtcagcccaggatgcctacatggacggacagggccagcgaggagatattatcagccagtctggactcagcaactccaccgagagcctggacagtatgaaggctctgacagccgccatcgaagctgcaaacgcccagatccatggccctgccagtcaacacatgggcaataacactgccaccgtcaccaccacgactaccatagccaccgtcaccacggaggacaggaagaaggaccactttaagaaaaatcgatgcctgtctatcgggatacaggtggatgatgctgaagaacctgacaaaacaggggagaataaagcacccagtaagttccagtccgtgggagtgcaagtagaagaagagaagtgcttccgcaggttcactcgatccaacagtgtgacgacagcagtacaggccgacctggacttccatgataatctggaaaattctctggaatctatagaggacaattcgtgtcctggccccatggccagacagttctcccgcgatgccagcacctccacagtcagcattcagggctcaggaaaccattaccatgcctgtgccgccgatgatgactttgacacggattttgacccctctattctgcctcctccggacccctggattgactctatcactgaagaccctctggaggccgtgcaaaggtcagtgtgccaccgggatggccactggttcctgaagcttctccaggcagagcgagaccgcatggaggggtggtgtcaacagatggagcgggaagaacgggaaaacaacctgcccgaagacattctaggaaaaatccgaaccgcagtgggcagtgcccaacttctcatggcccagaaattctaccagttcagagaactgtgtgaagaaaacctgaatcctaatgctcatccaagacccacctcccaggatttggcggggttttgggacatgctgcagttgtccatagaaaatattagtatgaaatttgatgaacttcatcagttaaaggccaataattggaaacagatggatcctcttgacaagaaggtagaacaatgtagattttgtatggttcatttaaaaacctgcacaaacactggacagtctaaataggcttctgcattcagtcctgctgtttacaatgtgaaatggagctgatatcatattaatttcattgtaatgacaatgtttacatagtaatcatttgggatattatctgtaatatgtttcaggcatatttttaaagaaaaacctgtctttgtgaattggaaaatgggaatgtggctttttttgttaattaaactttaagttaaaccattttagtcactggaaggaactgcctccattttgctttttaaactaaaataaatgacatcttcagtgcatgaatgcttaataaaaacaaatacaaaagcagaccatgcaatacaaccaaaaggctcccttggcctcat

SEQ ID NO: 299444 - DNA, 1655 bp, Homo sapiens
cgtcgacacggctgcgagagacgacagaaggggggtagaagtggagagagagagacagagggagcgagagagagagcaagacagaccgagaaggaaagcactcccagagatgaaattttaggaaagcaaaatgatcgacctttttaaggctgagtgggtttcttcagtttgtgtgcaagtttcaagaaatggaaggactgaccaggttccacaagatgaatggacagggtacaccccacgaggtaaagatgatgaaattccatgccgaagaatgcggagtggcagttatatcaaggccatgggggatgaagacagtggagactcagacacgagtcctaagccttctccaaaagttgctgcgcggagagaaagctatctcaaggctactcagccatcccttacagaactcaccacactcaaaatctccaatgaacactcacccaaactccagatccggagtcatagttacctgagggcagtgagtgaagtctccatcaaccggagcctggacagcctggaccctgcaggcttgctcacatcaccaaagttccgctccaggaatgagagctacatgcgagccatgagcaccatcagccaggtgagcgagatggaagtgaacgggcagttcgagtccgtgtgcgagtccgtgttcagcgagctggagtcgcaggccgtggaagcgctggacctgcccatgcccggctgcttccgcatgcggagccacagctatgtgcgggccattgagaaaggctgctcccaggacgacgagtgcgtgtccctgaggtcgtcctcgccgccgcgcaccaccaccaccgttaggaccatccagagcagcacggtggaactggagacatcgcgtacttccacccttgcaggctcagacgaaagaaaaaagagcaagatttatgacacaacctactccttttgtgaggcaacttatccttgtctgctgttacattgaaggaaactgacagtgatgatttgcaggagacttttggttataacttctcctttcttctgtggggcactcgaggtaggattcctctataatattaggaagtcataaaaatgcaaaagtcctatcaggcacagagcaagatttaaaatctgaagaataccatgtgcttccatctcctgcagttgttttgaagtacataaatcacctcttgggaacggagtgccaaccttgaggggctatgcctcacagacagccaacaagcaagtccacctttgcccacattcggggttattgcatggcaaacagtgaaggggcttccagggttttctggcacactggccttaaaggctgttgtaaggttcacatgagatcattcacaaggaagcattatgcaaattacaaattagaatgccctactttggctttgattttaaatctctcaatgtggcttagtttaataataatgataatagctaacctttaagcacttattatttgacaagcatacaaacagctgcatacattgtctaatgtaaccgtaatgaatactctatgacttgcacatgatattatcatttaaatcaaacagagaaaaaaaaatgtaagacttagagaggttacacaacttgaccaggccacacagctagtaagtgaaattctctctgtaatcaccaataaatgccttggaaactaaata

SEQ ID NO: 299445 - DNA, 1208 bp, Homo sapiens
cgtcgacacggctgcgagagacgacagaaggggggtagaagtggagagagagagacagagggagcgagagagagagcaagacagaccgagaaggaaagcactcccagagatgaaattttaggaaagcaaaatgatcgacctttttaaggctgagtgggtttcttcagtttgtgtgcaagtttcaagaaatggaaggactgaccaggttccacaagatgaatggacagggtacaccccacgaggtaaagatgatgaaattccatgccgaagaatgcggagtggcagttatatcaaggccatgggggatgaagacagtggagactcagacacgagtcctaagccttctccaaaagttgctgcgcggagagaaagctatctcaaggctactcagccatcccttacagaactcaccacactcaaaatctccaatgaacactcacccaaactccagatccggagtcatagttacctgagggcagtgagtgaagtctccatcaaccggagcctggacagcctggaccctgcaggcttgctcacatcaccaaagttccgctccaggaatgagagctacatgcgagccatgagcaccatcagccaggtgagcgagatggaagtgaacgggcagttcgagtccgtgtgcgagtccgtgttcagcgagctggagtcgcaggccgtggaagcgctggacctgcccatgcccggctgcttccgcatgcggagccacagctatgtgcgggccattgagaaaggctgctcccaggacgacgagtgcgtgtccctgaggtcgtcctcgccgccgcgcaccaccaccaccgttaggaccatccagagcagcacgggtcccaaccataacagagatgacagatggagatgtccagccaggctgtcctgtcacctactggcctatcaccattttgccaaccgttagagagaggagggccacacagattctacaacctcgaccaagacccctggtgaagaatggccatgctattctcttgagaaatggttcacatttcatgctattctcgtgggaaatagctccaccacctagtaagaaacccatggctgggcatggtggctcacgtctgtaatcccaacactttgggaggctgaagtgggaagaccatttgagtccaggagttcaagaccagcctgaacaacatagcaagaacccatctctatttaaaaaaaaaaaagaaagaaag

SEQ ID NO: 299446 - DNA, 994 bp, Homo sapiens
cgtcgacacggctgcgagagacgacagaaggggggtagaagtggagagagagagacagagggagcgagagagagagcaagacagaccgagaaggaaagcactcccagagatgaaattttaggaaagcaaaatgatcgacctttttaaggctgagtgggtttcttcagtttgtgtgcaagtttcaagaaatggaaggactgaccaggttccacaagatgaatggacagggtacaccccacgaggtaaagatgatgaaattccatgccgaagaatgcggagtggcagttatatcaaggccatgggggatgaagacagtggagactcagacacgagtcctaagccttctccaaaagttgctgcgcggagagaaagctatctcaaggctactcagccatcccttacagaactcaccacactcaaaatctccaatgaacactcacccaaactccagatccggagtcatagttacctgagggcagtgagtgaagtctccatcaaccggagcctggacagcctggaccctgcaggcttgctcacatcaccaaagttccgctccaggaatgagagctacatgcgagccatgagcaccatcagccaggtgagcgagatggaagtgaacgggcagttcgagtccgtgtgcgagtccgtgttcagcgagctggagtcgcaggccgtggaagcgctggacctgcccatgcccggctgcttccgcatgcggagccacagctatgtgcgggccattgagaaaggctgctcccaggacgacgagtgcgtgtccctgaggtcgtcctcgccgccgcgcaccaccaccaccgttaggaccatccagagcagcacggggagccttgacaagaagctggaatcctgggcgctagggtaggaagacatgactcctccacccctgataccactcaggcaaaatgggtaaagatcaccccatatgaacttcaacttggtgaattcacagctctcacaataaaaaacattttgtttt

SEQ ID NO: 299447 - DNA, 1072 bp, Homo sapiens
cgtcgacacggctgcgagagacgacagaaggggggtagaagtggagagagagagacagagggagcgagagagagagcaagacagaccgagaaggaaagcactcccagagatgaaattttaggaaagcaaaatgatcgacctttttaaggctgagtgggtttcttcagtttgtgtgcaagtttcaagaaatggaaggactgaccaggttccacaagatgaatggacagggtacaccccacgaggtaaagatgatgaaattccatgccgaagaatgcggagtggcagttatatcaaggccatgggggatgaagacagtggagactcagacacgagtcctaagccttctccaaaagttgctgcgcggagagaaagctatctcaaggctactcagccatcccttacagaactcaccacactcaaaatctccaatgaacactcacccaaactccagatccggagtcatagttacctgagggcagtgagtgaagtctccatcaaccggagcctggacagcctggaccctgcaggcttgctcacatcaccaaagttccgctccaggaatgagagctacatgcgagccatgagcaccatcagccaggtgagcgagatggaagtgaacgggcagttcgagtccgtgtgcgagtccgtgttcagcgagctggagtcgcaggccgtggaagcgctggacctgcccatgcccggctgcttccgcatgcggagccacagctatgtgcgggccattgagaaaggctgctcccaggacgacgagtgcgtgtccctgaggtcgtcctcgccgccgcgcaccaccaccaccgttaggaccatccagagcagcacggactgaaatctcagtgttaggagaagagatgcttccagaccttgcgttggccaagcagctcagcagggagcccagcagctcagaccctggctggctacctccagaccagagatggtagatgtccgtatattcttgctcactaggaaattctctctccaagaacaaccacaggttaataaattaaatgagagttatttatgaagagaaaaatatatatatttttgaaaaatcaac

SEQ ID NO: 299448 - DNA, 628 bp, Homo sapiens
ggaggtgatctagaggtcccttcgattggcgggccacttagttatcaatttttttttctatcagctattctgttgtatttctaaaacattttttagatgactttttaaagtatatttagcagtaaccttatgaggttcaaattggtaaatctcttgtaatttagccttcatcgaataataggtaccagtgtattaaaaatgtgtattttttgcagccccttgaaccagagtaggttcagagaaactcccaaagtttgtactttagacacatcatgcttgattggtaacttccctccttttttggggaacatgtttgtgtcctattaacttaattggatagatttttaaatatttcttatttttggcacacggaaagggtagttcgagtacagaactttgatttttggtgtagatgcagagggaatgatgggtaaatttcctaggtttatgtgaatttagggggtgtatgcattttgaaacaatctactaacagatggtgctgaaatctattacctacatgttttctagttgttcagcattatgttaatgaagcctccatataaggagtgtttctctggcacagttggtaagttgcccgccaatcgaaggggatcctctagagcacaac

SEQ ID NO: 299449 - DNA, 1563 bp, Homo sapiens
  misc_feature (1375)..(1375): n is a, c, g, or t
  misc_feature (1378)..(1378): n is a, c, g, or t
cttcatgttcagtttttacttcactctttattcttttctttgattatggtatgcttatttggaaagtcagtgaaactgtcaaaatgttatctcaataagatacttatatgagaactacaatcaccgaatctactgtattcaatattagcagatctaatttgataaacaacatggcttgtgtgaaaactgagcaggtgtttgtttacccatagtgttctgtgtagttattgcttagtctgcagaaaataatgacttagatgagatgtctgacttgctttcacttattaaacatgttcaccatgggatgatgtctgtaacatcagatattgttcaactagactaggatttaataaaaattgtgaaagcttactggcctaacattttattttataatattgggtatgaattatatgtagccagagatgtcattaagctttactgttatagtaggtaatatggttagtttgtagggaaaagagcatatgagcacatgcttgtgtattttggcctttgccccagtagaacagaccaatggcattctagacttgatgatactaagttttagcagacactagtaagtggtttgtatttaaccatactgatgaagcagacagattgaggcacagattttagtggctttgtggcaataaatagggcatggtgtgccttaggaaaagaatgtttataaagggaattataactgaaattaaaggaggcggcagtgaagaggaaataattctcttctatctaaatgatatacatatgatattttgagatttttataacagcagtggaacacaattctaggtagagtagaaaaaggaaagttttaaagacatataaaagattcttgttgacaaattatttttggtagcaaatctcaaatggttacctgctattaaggtctgccatattagagttttgcactattttgctaccaagtttgattcatacatctaaaacattttgtagttacttgtcaaggacttaatttgaaaatcatttgccaggccacttagttatcaatttttttttctatcagctattctgttgtatttctaaaacattttttagatgactttttaaagtatatttagcagtaaccttatgaggttcaaattggtaaatctcttgtaatttagccttcatcgaataataggtaccagtgtattaaaaatgtgtattttttgcagccccttgaaccagagtaggttcagagaaactcccaaagtttgtactttagacacatcatgcttgattggtaacttccctccttttttggggaacatgtttgtgtcctattaacttaattggatagatttttaaatatttcttatttttggcacacggaaagggtagttcgagtacagaaccnttngatcttggcgggtacatcccacacgcaagcagggcaaaatccccaggggcctgttgagatacggcaggagcacactgcgaacacaccacacacaacggcagagactacacgcaaccgtccacgccccataataataaaacgccagaaacgagggtctagcgcacaagaagaccagacagacacac

SEQ ID NO: 299450 - DNA, 1288 bp, Homo sapiens
cttcatgttcagtttttacttcactctttattcttttctttgattatggtatgcttatttggaaagtcagtgaaactgtcaaaatgttatctcaataagatacttatatgagaactacaatcaccgaatctactgtattcaatattagcagatctaatttgataaacaacatggcttgtgtgaaaactgagcaggtgtttgtttacccatagtgttctgtgtagttattgcttagtctgcagaaaataatgacttagatgagatgtctgacttgctttcacttattaaacatgttcaccatgggatgatgtctgtaacatcagatattgttcaactagactaggatttaataaaaattgtgaaagcttactggcctaacattttattttataatattgggtatgaattatatgtagccagagatgtcattaagctttactgttatagtaggtaatatggttagtttgtagggaaaagagcatatgagcacatgcttgtgtattttggcctttgccccagtagaacagaccaatggcattctagacttgatgatactaagttttagcagacactagtaagtggtttgtatttaaccatactgatgaagcagacagattgaggcacagattttagtggctttgtggcaataaatagggcatggtgtgccttaggaaaagaatgtttataaagggaattataactgaaattaaaggaggcggcagtgaagaggaaataattctcttctatctaaatgatatacatatgatattttgagatttttataacagcagtggaacacaattctaggtagagtagaaaaaggaaagttttaaagacatataaaagattcttgttgacaaattatttttggtagcaaatctcaaatggttacctgctattaaggtctgccatattagagttttgcactattttgctaccaagtttgattcatacatctaaaacattttgtagttacttgtcaaggacttaatttgaaaatcatttgccaggccacttagttatcaatttttttttctatcagctattctgttgtatttctaaaacattttttagatgactttttaaagtatatttagcagtaaccttatgaggttcaaattggtaaatctcttgtaatttaaagtttgtagaattatgggtgactgtgatgaggatcaacgtgtatgcaactgtagacaccacgttcttgagataggcgtcggaggagggacaacattgtataccaacactatttggattgtttcgggtaatcctgtagtttattatt

SEQ ID NO: 299451 - DNA, 3022 bp, Homo sapiens
  misc_feature (2501)..(2501): n is a, c, g, or t
cttcatgttcagtttttacttcactctttattcttttctttgattatggtatgcttatttggaaagtcagtgaaactgtcaaaatgttatctcaataagatacttatatgagaactacaatcaccgaatctactgtattcaatattagcagatctaatttgataaacaacatggcttgtgtgaaaactgagcaggtgtttgtttacccatagtgttctgtgtagttattgcttagtctgcagaaaataatgacttagatgagatgtctgacttgctttcacttattaaacatgttcaccatgggatgatgtctgtaacatcagatattgttcaactagactaggatttaataaaaattgtgaaagcttactggcctaacattttattttataatattgggtatgaattatatgtagccagagatgtcattaagctttactgttatagtaggtaatatggttagtttgtagggaaaagagcatatgagcacatgcttgtgtattttggcctttgccccagtagaacagaccaatggcattctagacttgatgatactaagttttagcagacactagtaagtggtttgtatttaaccatactgatgaagcagacagattgaggcacagattttagtggctttgtggcaataaatagggcatggtgtgccttaggaaaagaatgtttataaagggaattataactgaaattaaaggaggcggcagtgaagaggaaataattctcttctatctaaatgatatacatatgatattttgagatttttataacagcagtggaacacaattctaggtagagtagaaaaaggaaagttttaaagacatataaaagattcttgttgacaaattatttttggtagcaaatctcaaatggttacctgctattaaggtctgccatattagagttttgcactattttgctaccaagtttgattcatacatctaaaacattttgtagttacttgtcaaggacttaatttgaaaatcatttgccaggccacttagttatcaatttttttttctatcagctattctgttgtatttctaaaacattttttagatgactttttaaagtatatttagcagtaaccttatgaggttcaaattggtaaatctcttgtaatttagccttcatcgaataataggtaccagtgtattaaaaatgtgtattttttgcagccccttgaaccagagtaggttcagagaaactcccaaagtttgtactttagacacatcatgcttgattggtaacttccctccttttttggggaacatgtttgtgtcctattaacttaattggatagatttttaaatatttcttatttttggcacacggaaagggtagttcgagtacagaactttgatttttggtgtagatgcagagggaatgatgggtaaatttcctaggtttatgtgaatttagggggtgtatgcattttgaaacaatctactaacagatggtgctgaaatctattacctacatgttttctagttgttcagcattatgttaatgaagcctccatataaggagtgtttctctggcacagttggtaagttgactgctaacttcatttaaatgtgttactggatatgcagtatactgaaattattaatcagtttgtgtataggaaaagagaactgggttaaaagcaaattaacttgttctgaaaagaaagtatagattaattttgttttctgtttaaattttatctccttggtaaagatttttttttcctgggcagaaaacttggcatttttaggcgtagataccttaccttacaatgccaaaatgaatttaattccagtactcaggtttttccctttaacagactctatgtgtatcagggctttctaatgggtttttcctcttcgtttttaaaatgtgagtagcatttgaccaatttccagtgctcttagcattttacttaaagaacaaccactacaaaagaaaatctttgtaatttgattgtcttttgctttgcttcattaatgcctaagaacttaagaatactcctacctcattagctactcaagatgctgtgacgatcaaatctattctacataatgcgtttagaaacaaagacttgggtgaaaaatgaaataagtatattctgacttggctattgaggggaaaattcagtattaagtgttcctcacaggagatatgttagcagaatactataaaagtttgaaatttttaaaaagtaaaagtacttaaatttaggtatctctcctgaaattctttgcagttcattttttatggcagttaatccagtgaaacactcaaaagtttttttttttttaaaagtgtttttccagataaactgtagggtgaacattcacataatcacaaatatgtaattctgtaattgtggaatgcttgtatgctttgttttcgtacatcttccatggagatgtctgaatataatactccatctgtgaatattttaaatgttgaaataaaagtaagaaatgtgaaaaacaaanaaaccaaaaaaaaaaaaaaaaaaaaatcgcacaccccagacaaacaacagaaaacagactaacaaaggcaagaccgacacagcaaacaatcccacgcacgagacagaaaaccaaccaaccaacacggcacacacctaccaccgcacaacataccgaacgcacatcctgacccaccacactgaccctacgacacaccccacaccaaaaaaccagcggcaacgccgcacccacccaacaccatgtggagacagaagacaggagggaaagaaaaaagagcaagcggagagaagaagaggaacaacaaaaaaacagggaaggaagaaaaaaaaacaagcaataatagagctagaagagaacagaacgcgtgcaacaattacgaaccgagcgacagacgaaggagcgggagcgagtgcagacacaagactagcgaaagctgaaagacacgtaccagcagaacggacaagcaggagaggcagggagagcagaccacaaagagcaaaacgcgaaaaccagaaaaggaa

SEQ ID NO: 299452 - DNA, 2967 bp, Homo sapiens
  misc_feature (2446)..(2446): n is a, c, g, or t
cttcatgttcagtttttacttcactctttattcttttctttgattatggtatgcttatttggaaagtcagtgaaactgtcaaaatgttatctcaataagatacttatatgagaactacaatcaccgaatctactgtattcaatattagcagatctaatttgataaacaacatggcttgtgtgaaaactgagcaggtgtttgtttacccatagtgttctgtgtagttattgcttagtctgcagaaaataatgacttagatgagatgtctgacttgctttcacttattaaacatgttcaccatgggatgatgtctgtaacatcagatattgttcaactagactaggatttaataaaaattgtgaaagcttactggcctaacattttattttataatattgggtatgaattatatgtagccagagatgtcattaagctttactgttatagtaggtaatatggttagtttgtagggaaaagagcatatgagcacatgcttgtgtattttggcctttgccccagtagaacagaccaatggcattctagacttgatgatactaagttttagcagacactagtaagtggtttgtatttaaccatactgatgaagcagacagattgaggcacagattttagtggctttgtggcaataaatagggcatggtgtgccttaggaaaagaatgtttataaagggaattataactgaaattaaaggaggcggcagtgaagaggaaataattctcttctatctaaatgatatacatatgatattttgagatttttataacagcagtggaacacaattctaggtagagtagaaaaaggaaagttttaaagacatataaaagattcttgttgacaaattatttttggtagcaaatctcaaatggttacctgctattaaggtctgccatattagagttttgcactattttgctaccaagtttgattcatacatctaaaacattttgtagttacttgtcaaggacttaatttgaaaatcatttgccaggccacttagttatcaatttttttttctatcagctattctgttgtatttctaaaacattttttagatgactttttaaagtatatttagcagtaaccttatgaggttcaaattggtaaatctcttgtaatttagccttcatcgaataataggtaccagtgtattaaaatttgtactttagacacatcatgcttgattggtaacttccctccttttttggggaacatgtttgtgtcctattaacttaattggatagatttttaaatatttcttatttttggcacacggaaagggtagttcgagtacagaactttgatttttggtgtagatgcagagggaatgatgggtaaatttcctaggtttatgtgaatttagggggtgtatgcattttgaaacaatctactaacagatggtgctgaaatctattacctacatgttttctagttgttcagcattatgttaatgaagcctccatataaggagtgtttctctggcacagttggtaagttgactgctaacttcatttaaatgtgttactggatatgcagtatactgaaattattaatcagtttgtgtataggaaaagagaactgggttaaaagcaaattaacttgttctgaaaagaaagtatagattaattttgttttctgtttaaattttatctccttggtaaagatttttttttcctgggcagaaaacttggcatttttaggcgtagataccttaccttacaatgccaaaatgaatttaattccagtactcaggtttttccctttaacagactctatgtgtatcagggctttctaatgggtttttcctcttcgtttttaaaatgtgagtagcatttgaccaatttccagtgctcttagcattttacttaaagaacaaccactacaaaagaaaatctttgtaatttgattgtcttttgctttgcttcattaatgcctaagaacttaagaatactcctacctcattagctactcaagatgctgtgacgatcaaatctattctacataatgcgtttagaaacaaagacttgggtgaaaaatgaaataagtatattctgacttggctattgaggggaaaattcagtattaagtgttcctcacaggagatatgttagcagaatactataaaagtttgaaatttttaaaaagtaaaagtacttaaatttaggtatctctcctgaaattctttgcagttcattttttatggcagttaatccagtgaaacactcaaaagtttttttttttttaaaagtgtttttccagataaactgtagggtgaacattcacataatcacaaatatgtaattctgtaattgtggaatgcttgtatgctttgttttcgtacatcttccatggagatgtctgaatataatactccatctgtgaatattttaaatgttgaaataaaagtaagaaatgtgaaaaacaaanaaaccaaaaaaaaaaaaaaaaaaaaatcgcacaccccagacaaacaacagaaaacagactaacaaaggcaagaccgacacagcaaacaatcccacgcacgagacagaaaaccaaccaaccaacacggcacacacctaccaccgcacaacataccgaacgcacatcctgacccaccacactgaccctacgacacaccccacaccaaaaaaccagcggcaacgccgcacccacccaacaccatgtggagacagaagacaggagggaaagaaaaaagagcaagcggagagaagaagaggaacaacaaaaaaacagggaaggaagaaaaaaaaacaagcaataatagagctagaagagaacagaacgcgtgcaacaattacgaaccgagcgacagacgaaggagcgggagcgagtgcagacacaagactagcgaaagctgaaagacacgtaccagcagaacggacaagcaggagaggcagggagagcagaccacaaagagcaaaacgcgaaaaccagaaaaggaa

SEQ ID NO: 299453 - DNA, 2491 bp, Homo sapiens
cttcatgttcagtttttacttcactctttattcttttctttgattatggtatgcttatttggaaagtcagtgaaactgtcaaaatgttatctcaataagatacttatatgagaactacaatcaccgaatctactgtattcaatattagcagatctaatttgataaacaacatggcttgtgtgaaaactgagcaggtgtttgtttacccatagtgttctgtgtagttattgcttagtctgcagaaaataatgacttagatgagatgtctgacttgctttcacttattaaacatgttcaccatgggatgatgtctgtaacatcagatattgttcaactagactaggatttaataaaaattgtgaaagcttactggcctaacattttattttataatattgggtatgaattatatgtagccagagatgtcattaagctttactgttatagtaggtaatatggttagtttgtagggaaaagagcatatgagcacatgcttgtgtattttggcctttgccccagtagaacagaccaatggcattctagacttgatgatactaagttttagcagacactagtaagtggtttgtatttaaccatactgatgaagcagacagattgaggcacagattttagtggctttgtggcaataaatagggcatggtgtgccttaggaaaagaatgtttataaagggaattataactgaaattaaaggaggcggcagtgaagaggaaataattctcttctatctaaatgatatacatatgatattttgagatttttataacagcagtggaacacaattctaggtagagtagaaaaaggaaagttttaaagacatataaaagattcttgttgacaaattatttttggtagcaaatctcaaatggttacctgctattaaggtctgccatattagagttttgcactattttgctaccaagtttgattcatacatctaaaacattttgtagttacttgtcaaggacttaatttgaaaatcatttgccaggccacttagttatcaatttttttttctatcagctattctgttgtatttctaaaacattttttagatgactttttaaagtatatttagcagtaaccttatgaggttcaaattggtaaatctcttgtaatttagccttcatcgaataataggtaccagtgtattaaaaatgtgtattttttgcagccccttgaaccagagtaggttcagagaaactcccaaagtttgtactttagacacatcatgcttgattggtaacttccctccttttttggggaacatgtttgtgtcctattaacttaattggatagatttttaaatatttcttatttttggcacacggaaagggtagttcgagtacagaactttgatttttggtgtagatgcagagggaatgatgggtaaatttcctaggtttatgtgaatttagggggtgtatgcattttgaaacaatctactaacagatggtgctgaaatctattacctacatgttttctagttgttcagcattatgttaatgaagcctccatataaggagtgtttctctggcacagttggtaagttgactgctaacttcatttaaatgtgttactggatatgcagtatactgaaattattaatcagtttgtgtataggaaaagagaactgggttaaaagcaaattaacttgttctgaaaagaaagtatagattaattttgttttctgtttaaattttatctccttggtaaagatttttttttcctgggcagaaaacttggcatttttaggcgtagataccttaccttacaatgccaaaatgaatttaattccagtactcaggtttttccctttaacagactctatgtgtatcagggctttctaatgggtttttcctcttcgtttttaaaatgtgagtagcatttgaccaatttccagtgctcttagcattttacttaaagaacaaccactacaaaagaaaatctttgtaatttgattgtcttttgctttgcttcattaatgcctaagaacttaagaatactcctacctcattagctactcaagatgctgtgacgatcaaatctattctacataatgcgtttagaaacaaagacttgggtgaaaaatgaaataagtatattctgacttggctattgaggggaaaattcagtattaagtgttcctcacaggagatatgttagcagaatactataaaagtttgaaatttttaaaaagtaaaagtacttaaatttaggtatctctcctgaaattctttgcagttcattttttatggcagttaatccagtgaaacactcaaaagtttttttttttttaaaagtgtttttccagataaactgtagggtgaacattcacataatcacaaatatgtaattctgtaattgtggaatgcttgtatgctttgttttcgtacatcttccatggagatgtctgaatataatactccatctgtgaatattttaaatgttgaaataaaagtaagaaatgtg

SEQ ID NO: 299454 - DNA, 2044 bp, Homo sapiens
  misc_feature (1523)..(1523): n is a, c, g, or t
tagcgattctacaggagcttatcgattggcgggccacttagttatcaatttttttttctatcagctattctgttgtatttctaaaacattttttagatgactttttaaagtatatttagcagtaaccttatgaggttcaaattggtaaatctcttgtaatttagccttcatcgaataataggtaccagtgtattaaaaatgtgtattttttgcagccccttgaaccagagtaggttcagagaaactcccaaagtttgtactttagacacatcatgcttgattggtaacttccctccttttttggggaacatgtttgtgtcctattaacttaattggatagatttttaaatatttcttatttttggcacacggaaagggtagttcgagtacagaactttgatttttggtgtagatgcagagggaatgatgggtaaatttcctaggtttatgtgaatttagggggtgtatgcattttgaaacaatctactaacagatggtgctgaaatctattacctacatgttttctagttgttcagcattatgttaatgaagcctccatataaggagtgtttctctggcacagttggtaagttgactgctaacttcatttaaatgtgttactggatatgcagtatactgaaattattaatcagtttgtgtataggaaaagagaactgggttaaaagcaaattaacttgttctgaaaagaaagtatagattaattttgttttctgtttaaattttatctccttggtaaagatttttttttcctgggcagaaaacttggcatttttaggcgtagataccttaccttacaatgccaaaatgaatttaattccagtactcaggtttttccctttaacagactctatgtgtatcagggctttctaatgggtttttcctcttcgtttttaaaatgtgagtagcatttgaccaatttccagtgctcttagcattttacttaaagaacaaccactacaaaagaaaatctttgtaatttgattgtcttttgctttgcttcattaatgcctaagaacttaagaatactcctacctcattagctactcaagatgctgtgacgatcaaatctattctacataatgcgtttagaaacaaagacttgggtgaaaaatgaaataagtatattctgacttggctattgaggggaaaattcagtattaagtgttcctcacaggagatatgttagcagaatactataaaagtttgaaatttttaaaaagtaaaagtacttaaatttaggtatctctcctgaaattctttgcagttcattttttatggcagttaatccagtgaaacactcaaaagtttttttttttttaaaagtgtttttccagataaactgtagggtgaacattcacataatcacaaatatgtaattctgtaattgtggaatgcttgtatgctttgttttcgtacatcttccatggagatgtctgaatataatactccatctgtgaatattttaaatgttgaaataaaagtaagaaatgtgaaaaacaaanaaaccaaaaaaaaaaaaaaaaaaaaatcgcacaccccagacaaacaacagaaaacagactaacaaaggcaagaccgacacagcaaacaatcccacgcacgagacagaaaaccaaccaaccaacacggcacacacctaccaccgcacaacataccgaacgcacatcctgacccaccacactgaccctacgacacaccccacaccaaaaaaccagcggcaacgccgcacccacccaacaccatgtggagacagaagacaggagggaaagaaaaaagagcaagcggagagaagaagaggaacaacaaaaaaacagggaaggaagaaaaaaaaacaagcaataatagagctagaagagaacagaacgcgtgcaacaattacgaaccgagcgacagacgaaggagcgggagcgagtgcagacacaagactagcgaaagctgaaagacacgtaccagcagaacggacaagcaggagaggcagggagagcagaccacaaagagcaaaacgcgaaaaccagaaaaggaa

SEQ ID NO: 299455 - DNA, 2044 bp, Homo sapiens
  misc_feature (1523)..(1523): n is a, c, g, or t
ggaggtgatctagaggtcccttcgattggcgggccacttagttatcaatttttttttctatcagctattctgttgtatttctaaaacattttttagatgactttttaaagtatatttagcagtaaccttatgaggttcaaattggtaaatctcttgtaatttagccttcatcgaataataggtaccagtgtattaaaaatgtgtattttttgcagccccttgaaccagagtaggttcagagaaactcccaaagtttgtactttagacacatcatgcttgattggtaacttccctccttttttggggaacatgtttgtgtcctattaacttaattggatagatttttaaatatttcttatttttggcacacggaaagggtagttcgagtacagaactttgatttttggtgtagatgcagagggaatgatgggtaaatttcctaggtttatgtgaatttagggggtgtatgcattttgaaacaatctactaacagatggtgctgaaatctattacctacatgttttctagttgttcagcattatgttaatgaagcctccatataaggagtgtttctctggcacagttggtaagttgactgctaacttcatttaaatgtgttactggatatgcagtatactgaaattattaatcagtttgtgtataggaaaagagaactgggttaaaagcaaattaacttgttctgaaaagaaagtatagattaattttgttttctgtttaaattttatctccttggtaaagatttttttttcctgggcagaaaacttggcatttttaggcgtagataccttaccttacaatgccaaaatgaatttaattccagtactcaggtttttccctttaacagactctatgtgtatcagggctttctaatgggtttttcctcttcgtttttaaaatgtgagtagcatttgaccaatttccagtgctcttagcattttacttaaagaacaaccactacaaaagaaaatctttgtaatttgattgtcttttgctttgcttcattaatgcctaagaacttaagaatactcctacctcattagctactcaagatgctgtgacgatcaaatctattctacataatgcgtttagaaacaaagacttgggtgaaaaatgaaataagtatattctgacttggctattgaggggaaaattcagtattaagtgttcctcacaggagatatgttagcagaatactataaaagtttgaaatttttaaaaagtaaaagtacttaaatttaggtatctctcctgaaattctttgcagttcattttttatggcagttaatccagtgaaacactcaaaagtttttttttttttaaaagtgtttttccagataaactgtagggtgaacattcacataatcacaaatatgtaattctgtaattgtggaatgcttgtatgctttgttttcgtacatcttccatggagatgtctgaatataatactccatctgtgaatattttaaatgttgaaataaaagtaagaaatgtgaaaaacaaanaaaccaaaaaaaaaaaaaaaaaaaaatcgcacaccccagacaaacaacagaaaacagactaacaaaggcaagaccgacacagcaaacaatcccacgcacgagacagaaaaccaaccaaccaacacggcacacacctaccaccgcacaacataccgaacgcacatcctgacccaccacactgaccctacgacacaccccacaccaaaaaaccagcggcaacgccgcacccacccaacaccatgtggagacagaagacaggagggaaagaaaaaagagcaagcggagagaagaagaggaacaacaaaaaaacagggaaggaagaaaaaaaaacaagcaataatagagctagaagagaacagaacgcgtgcaacaattacgaaccgagcgacagacgaaggagcgggagcgagtgcagacacaagactagcgaaagctgaaagacacgtaccagcagaacggacaagcaggagaggcagggagagcagaccacaaagagcaaaacgcgaaaaccagaaaaggaa

SEQ ID NO: 299456 - DNA, 1606 bp, Homo sapiens
cttcatgttcagtttttacttcactctttattcttttctttgattatggtatgcttatttggaaagtcagtgaaactgtcaaaatgttatctcaataagatacttatatgagaactacaatcaccgaatctactgtattcaatattagcagatctaatttgataaacaacatggcttgtgtgaaaactgagcaggtgtttgtttacccatagtgttctgtgtagttattgcttagtctgcagaaaataatgacttagatgagatgtctgacttgctttcacttattaaacatgttcaccatgggatgatgtctgtaacatcagatattgttcaactagactaggatttaataaaaattgtgaaagcttactggcctaacattttattttataatattgggtatgaattatatgtagccagagatgtcattaagctttactgttatagtaggtaatatggttagtttgtagggaaaagagcatatgagcacatgcttgtgtattttggcctttgccccagtagaacagaccaatggcattctagacttgatgatactaagttttagcagacactagtaagtggtttgtatttaaccatactgatgaagcagacagattgaggcacagattttagtggctttgtggcaataaatagggcatggtgtgccttaggaaaagaatgtttataaagggaattataactgaaattaaaggaggcggcagtgaagaggaaataattctcttctatctaaatgatatacatatgatattttgagatttttataacagcagtggaacacaattctaggtagagtagaaaaaggaaagttttaaagacatataaaagattcttgttgacaaattatttttggtagcaaatctcaaatggttacctgctattaaggtctgccatattagagttttgcactattttgctaccaagtttgattcatacatctaaaacattttgtagttacttgtcaaggacttaatttgaaaatcatttgccaggccacttagttatcaatttttttttctatcagctattctgttgtatttctaaaacattttttagatgactttttaaagtatatttagcagtaaccttatgaggttcaaattggtaaatctcttgtaatttagccttcatcgaataataggtaccagtgtattaaaaatgtgtattttttgcagccccttgaaccagagtaggttcagagaaactcccaaagtttgtactttagacacatcatgcttgattggtaacttccctccttttttggggaacatgtttgtgtcctattaacttaattggatagatttttaaatatttcttatttttggcacacggaaagggtagttcgagtacagaactttgatttttggtgtagatgcagagggaatgatgggtaaatttcctaggtttatgtgaatttagggggtgtatgcattttgaaacaatctactaacagatggtgctgaaatctattacctacatgttttctagttgttcagcattatgttaatgaagcctccatataaggagtgtttctctggcacagttggtaagttgcccgccaatcgaaggggatcctctagagcacaac

SEQ ID NO: 299457 - DNA, 205 bp, Homo sapiens
aaaagtgtttttccagataaactgtagggtgaacattcacataatcacaaatatgtaattctgtaattgtggaatgcttgtatgctttgttttcgtacatcttccatggagatgtctgaatataatactccatctgtgaatattttaaatgttgaaataaaagtaagaaatgtgccctttgtgttatcccggtttcacaaacctg

SEQ ID NO: 299458 - DNA, 3389 bp, Homo sapiens
ggctcctcccccaccggccttcaccttttgttccctatcctgggccagttctctcgcaggtcccagatgtccagttccagatgcctggacccagagtgtgggggaaatatctctggagaagccctcactccaaaggctgtccaggcgcaatgtggtggctgcttctctggggagtcctccaggcttgcccaacccggggctccgtcctcttggcccaagagctaccccagcagctgacatcccccgggtacccagagccgtatggcaaaggccaagagagcagcacggacatcaaggctccagagggctttgctgtgaggctcgtcttccaggacttcgacctggagccgtcccaggactgtgcaggggactctgtcacaatctcattcgtcggttcggatccaagccagttctgtggtcagcaaggctcccctctgggcaggccccctggtcagagggagtttgtatcctcagggaggagtttgcggctgaccttccgcacacagccttcctcggagaacaagactgcccacctccacaagggcttcctggccctctaccaaaccgtggctgtgaactatagtcagcccatcagcgaggccagcaggggctctgaggccatcaacgcacctggagacaaccctgccaaggtccagaaccactgccaggagccctattatcaggccgcggcagcaggggcactcacctgtgcaaccccagggacctggaaagacagacaggatggggaggaggttcttcagtgtatgcctgtctgcggacggccagtcacccccattgcccagaatcagacgaccctcggttcttccagagccaagctgggcaacttcccctggcaagccttcaccagtatccacggccgtgggggcggggccctgctgggggacagatggatcctcactgctgcccacaccgtctaccccaaggacagtgtttctctcaggaagaaccagagtgtgaatgtgttcttgggccacacagccatagatgagatgctgaaactggggaaccaccctgtccaccgtgtcgttgtgcaccccgactaccgtcagaatgagtcccataactttagcggggacatcgccctcctggagctgcagcacagcatccccctgggccccaacgtcctcccggtctgtctgcccgataatgagaccctctaccgcagcggcttgttgggctacgtcagtgggtttggcatggagatgggctggctaactactgagctgaagtactcgaggctgcctgtagctcccagggaggcctgcaacgcctggctccaaaagagacagagacccgaggtgttttctgacaatatgttctgtgttggggatgagacgcaaaggcacagtgtctgccagggggacagtggcagcgtctatgtggtatgggacaatcatgcccatcactgggtggccacgggcattgtgtcctggggcatagggtgtggcgaagggtatgacttctacaccaaggtgctcagctatgtggactggatcaagggagtgatgaatggcaagaattgaccctgggggcttgaacagggactgaccagcacagtggaggccccaggcaacagagggcctggagtgaggactgaacactggggtaggggttgggggtggggggttgggggaggcagggaaatcctattcacatcactgttgcaccaagccactgcaagagaaacccccacccggcaagcccgccccatcccagacaggaagcagagtcccacagaccgctcctcctcaccctctacctccctgtgctcatgcactaggccccgggaagcctgtacatctcaacaactttcgccttgaatgtccttagaaccaccttcccctacttcatctgttgacacagcttttatactcacctgtggaagagtcagctactcacccgctattagagtatggaggaaggggttttcattgcattgcatttctgaaacattcctaagaccctttagttgaccttcaaatattcaagctattctgcagctccaagatgcaattatagaaacagctccttttttattttatgtcctctatatgccaggtgcttcacctgttatttcacttaatcctcataccatatttgcaaaggatgtgttattatctatgtgtgacaaatgaggaaactgaggctcaggggataaagggacttgcccaagtcccacagctggtgtgtgactgcagagactgtgctcttcccagtgtgctgcaatacttctcaaccctcctctaacctgctgtgtcacccgctttccctcccagcccccacatccttaccattttccctccctgggaattcctgcttctgcgaaaatggtatcctctagctcacactttcctaatggccccatctcctgcagaagccaggtgagcccagcactggactgaagttcttgcagacaccccacctgtgcccctatcatcaggggaactgctccacctgagaggaccaactctttaatttttagtaaaacctggaggtgatgggccgggcgcagtggctcacgcctgtaatcccaacaccttaggagtccgaggtgggtggatcacgaggtcaggagatccagcccatcctggccaacatggtgaaaccccatctctactaaaaatacaaaaattagccgggcgtggtgacacgtgcctgtagtcccagctactcgggaggctgaggcaggagaatcacttgaacctgggaggcggaggttgcagtgagctaagatcacgccactgcactccagcctgcggacagaccaagacttcatcccccccaaaaaaaaaagattggaggtgatttacagtgaaagacacaaataaaatacaactgttcaatggaaatagaaaataaacaccataaaagagagaagagaggtaatttgttagcatcaagagtcaagttgctatatggtcaaaggttaaatttatctctaaaaaatggcaggattcaaagttgtacatacatgtgattacttctgttttttacacccacatacagtacaaaagattattaaaaatattcccaaaaggcaggtgcaatgatgcacacttatacccccagccactcaggaggctgatgcaagaggatcgcttgagcccaggagttgaagtccagcctaagcaacatagtgaaaccccatctccaaaaatataataataattctctcaaaatactaaacagaggtggttttattgataagattttggctgtttggttttccactattctctattggctaaaatttgtttaatgagcatgaaatgtttttattttattttgcttatttttatgattgcaaaaaatgatatgagtttctccctgccaaggcaaaaaatatatatatatacctataaaaatat

SEQ ID NO: 299459 - DNA, 287 bp, Homo sapiens
ctatttcttgcctattatgaatgatgctgctatgagcatttgtgtacaagtttttatatcaacgtacgtttctaaatctcctgggtatatacctagcagtagacttgctggattgtataataattctgtttaactttttgaggaaccaccaaactgtcttcaacagcagcagcaccaagttacatctcaccggcaatacatgagggttcaagcccaccatttttgagatccacgcttttgaatgaaagcattgccttctaaagttttgtttgtttgtttgttttgag

SEQ ID NO: 299460 - DNA, 2794 bp, Homo sapiens
  misc_feature (66)..(66): n is a, c, g, or t
  misc_feature (86)..(86): n is a, c, g, or t
  misc_feature (102)..(102): n is a, c, g, or t
  misc_feature (118)..(118): n is a, c, g, or t
ggggggggggggtcccccccccccctctcccccggggtggttcccaaaaagaacccaaaaaggggnggggggggggggcccaaaanctttttccaacccccnttgggtggccaaaaancccccagggacctggaaagacagacaggatggggaggaggttcttcagtgtatgcctgtctgcggacggccagtcacccccattgcccagaatcagacgaccctcggttcttccagagccaagctgggcaacttcccctggcaagccttcaccagtatccacggccgtgggggcggggccctgctgggggacagatggatcctcactgctgcccacaccgtctaccccaaggacagtgtttctctcaggaagaaccagagtgtgaatgtgttcttgggccacacagccatagatgagatgctgaaactggggaaccaccctgtccaccgtgtcgttgtgcaccccgactaccgtcagaatgagtcccataactttagcggggacatcgccctcctggagctgcagcacagcatccccctgggccccaacgtcctcccggtctgtctgcccgataatgagaccctctaccgcagcggcttgttgggctacgtcagtgggtttggcatggagatgggctggctaactactgagctgaagtactcgaggctgcctgtagctcccagggaggcctgcaacgcctggctccaaaagagacagagacccgaggtgttttctgacaatatgttctgtgttggggatgagacgcaaaggcacagtgtctgccagggggacagtggcagcgtctatgtggtatgggacaatcatgcccatcactgggtggccacgggcattgtgtcctggggcatagggtgtggcgaagggtatgacttctacaccaaggtgctcagctatgtggactggatcaagggagtgatgaatggcaagaattgaccctgggggcttgaacagggactgaccagcacagtggaggccccaggcaacagagggcctggagtgaggactgaacactggggtaggggttgggggtggggggttgggggaggcagggaaatcctattcacatcactgttgcaccaagccactgcaagagaaacccccacccggcaagcccgccccatcccagacaggaagcagagtcccacagaccgctcctcctcaccctctacctccctgtgctcatgcactaggccccgggaagcctgtacatctcaacaactttcgccttgaatgtccttagaaccaccttcccctacttcatctgttgacacagcttttatactcacctgtggaagagtcagctactcacccgctattagagtatggaggaaggggttttcattgcattgcatttctgaaacattcctaagaccctttagttgaccttcaaatattcaagctattctgcagctccaagatgcaattatagaaacagctccttttttattttatgtcctctatatgccaggtgcttcacctgttatttcacttaatcctcataccatatttgcaaaggatgtgttattatctatgtgtgacaaatgaggaaactgaggctcaggggataaagggacttgcccaagtcccacagctggtgtgtgactgcagagactgtgctcttcccagtgtgctgcaatacttctcaaccctcctctaacctgctgtgtcacccgctttccctcccagcccccacatccttaccattttccctccctgggaattcctgcttctgcgaaaatggtatcctctagctcacactttcctaatggccccatctcctgcagaagccaggtgagcccagcactggactgaagttcttgcagacaccccacctgtgcccctatcatcaggggaactgctccacctgagaggaccaactctttaatttttagtaaaacctggaggtgatgggccgggcgcagtggctcacgcctgtaatcccaacaccttaggagtccgaggtgggtggatcacgaggtcaggagatccagcccatcctggccaacatggtgaaaccccatctctactaaaaatacaaaaattagccgggcgtggtgacacgtgcctgtagtcccagctactcgggaggctgaggcaggagaatcacttgaacctgggaggcggaggttgcagtgagctaagatcacgccactgcactccagcctgcggacagaccaagacttcatcccccccaaaaaaaaaagattggaggtgatttacagtgaaagacacaaataaaatacaactgttcaatggaaatagaaaataaacaccataaaagagagaagagaggtaatttgttagcatcaagagtcaagttgctatatggtcaaaggttaaatttatctctaaaaaatggcaggattcaaagttgtacatacatgtgattacttctgttttttacacccacatacagtacaaaagattattaaaaatattcccaaaaggcaggtgcaatgatgcacacttatacccccagccactcaggaggctgatgcaagaggatcgcttgagcccaggagttgaagtccagcctaagcaacatagtgaaaccccatctccaaaaatataataataattctctcaaaatactaaacagaggtggttttattgataagattttggctgtttggttttccactattctctattggctaaaatttgtttaatgagcatgaaatgtttttattttattttgcttatttttatgattgcaaaaaatgatatgagtttctccctgccaaggcaaaaaatatatatatatacctataaaaatat

SEQ ID NO: 299461 - DNA, 2037 bp, Homo sapiens
ggctcctcccccaccggccttcaccttttgttccctatcctgggccagttctctcgcaggtcccagatgtccagttccagatgcctggacccagagtgtgggggaaatatctctggagaagccctcactccaaaggctgtccaggcgcaatgtggtggctgcttctctggggagtcctccaggcttgcccaacccggggctccgtcctcttggcccaagagctaccccagcagctgacatcccccgggtacccagagccgtatggcaaaggccaagagagcagcacggacatcaaggctccagagggctttgctgtgaggctcgtcttccaggacttcgacctggagccgtcccaggactgtgcaggggactctgtcacaatctcattcgtcggttcggatccaagccagttctgtggtcagcaaggctcccctctgggcaggccccctggtcagagggagtttgtatcctcagggaggagtttgcggctgaccttccgcacacagccttcctcggagaacaagactgcccacctccacaagggcttcctggccctctaccaaaccgtggctgtgaactatagtcagcccatcagcgaggccagcaggggctctgaggccatcaacgcacctggagacaaccctgccaaggtccagaaccactgccaggagccctattatcaggccgcggcagcaggggcactcacctgtgcaaccccagggacctggaaagacagacaggatggggaggaggttcttcagtgtatgcctgtctgcggacggccagtcacccccattgcccagaatcagacgaccctcggttcttccagagccaagctgggcaacttcccctggcaagccttcaccagtatccacggccgtgggggcggggccctgctgggggacagatggatcctcactgctgcccacaccgtctaccccaaggacagtgtttctctcaggaagaaccagagtgtgaatgtgttcttgggccacacagccatagatgagatgctgaaactggggaaccaccctgtccaccgtgtcgttgtgcaccccgactaccgtcagaatgagtcccataactttagcggggacatcgccctcctggagctgcagcacagcatccccctgggccccaacgtcctcccggtctgtctgcccgataatgagaccctctaccgcagcggcttgttgggctacgtcagtgggtttggcatggagatgggctggctaactactgagctgaagtactcgaggctgcctgtagctcccagggaggcctgcaacgcctggctccaaaagagacagagacccgaggtgttttctgacaatatgttctgtgttggggatgagaggagaatcacttgaacctgggaggcggaggttgcagtgagctaagatcacgccactgcactccagcctgcggacagaccaagacttcatcccccccaaaaaaaaaagattggaggtgatttacagtgaaagacacaaataaaatacaactgttcaatggaaatagaaaataaacaccataaaagagagaagagaggtaatttgttagcatcaagagtcaagttgctatatggtcaaaggttaaatttatctctaaaaaatggcaggattcaaagttgtacatacatgtgattacttctgttttttacacccacatacagtacaaaagattattaaaaatattcccaaaaggcaggtgcaatgatgcacacttatacccccagccactcaggaggctgatgcaagaggatcgcttgagcccaggagttgaagtccagcctaagcaacatagtgaaaccccatctccaaaaatataataataattctctcaaaatactaaacagaggtggttttattgataagattttggctgtttggttttccactattctctattggctaaaatttgtttaatgagcatgaaatgtttttattttattttgcttatttttatgattgcaaaaaatgatatgagtttctccctgccaaggcaaaaaatatatatatatacctataaaaatat

SEQ ID NO: 299462 - DNA, 1764 bp, Homo sapiens
gtgatctagcaggatcttcaaagacagacagtcggggaaatcctattcacatcactgttgcaccaagccactgcaagagaaacccccacccggcaagcccgccccatcccagacaggaagcagagtcccacagaccgctcctcctcaccctctacctccctgtgctcatgcactaggccccgggaagcctgtacatctcaacaactttcgccttgaatgtccttagaaccaccttcccctacttcatctgttgacacagcttttatactcacctgtggaagagtcagctactcacccgctattagagtatggaggaaggggttttcattgcattgcatttctgaaacattcctaagaccctttagttgaccttcaaatattcaagctattctgcagctccaagatgcaattatagaaacagctccttttttattttatgtcctctatatgccaggtgcttcacctgttatttcacttaatcctcataccatatttgcaaaggatgtgttattatctatgtgtgacaaatgaggaaactgaggctcaggggataaagggacttgcccaagtcccacagctggtgtgtgactgcagagactgtgctcttcccagtgtgctgcaatacttctcaaccctcctctaacctgctgtgtcacccgctttccctcccagcccccacatccttaccattttccctccctgggaattcctgcttctgcgaaaatggtatcctctagctcacactttcctaatggccccatctcctgcagaagccaggtgagcccagcactggactgaagttcttgcagacaccccacctgtgcccctatcatcaggggaactgctccacctgagaggaccaactctttaatttttagtaaaacctggaggtgatgggccgggcgcagtggctcacgcctgtaatcccaacaccttaggagtccgaggtgggtggatcacgaggtcaggagatccagcccatcctggccaacatggtgaaaccccatctctactaaaaatacaaaaattagccgggcgtggtgacacgtgcctgtagtcccagctactcgggaggctgaggcaggagaatcacttgaacctgggaggcggaggttgcagtgagctaagatcacgccactgcactccagcctgcggacagaccaagacttcatcccccccaaaaaaaaaagattggaggtgatttacagtgaaagacacaaataaaatacaactgttcaatggaaatagaaaataaacaccataaaagagagaagagaggtaatttgttagcatcaagagtcaagttgctatatggtcaaaggttaaatttatctctaaaaaatggcaggattcaaagttgtacatacatgtgattacttctgttttttacacccacatacagtacaaaagattattaaaaatattcccaaaaggcaggtgcaatgatgcacacttatacccccagccactcaggaggctgatgcaagaggatcgcttgagcccaggagttgaagtccagcctaagcaacatagtgaaaccccatctccaaaaatataataataattctctcaaaatactaaacagaggtggttttattgataagattttggctgtttggttttccactattctctattggctaaaatttgtttaatgagcatgaaatgtttttattttattttgcttatttttatgattgcaaaaaatgatatgagtttctccctgccaaggcaaaaaatatatatatatacctataaaaatat

SEQ ID NO: 299463 - DNA, 886 bp, Homo sapiens
  misc_feature (179)..(179): n is a, c, g, or t
  misc_feature (215)..(215): n is a, c, g, or t
  misc_feature (224)..(224): n is a, c, g, or t
  misc_feature (235)..(235): n is a, c, g, or t
agtaatggctctgcttaattttagctgttctttttagagagccatgacagttattaccaagtttgtcattagaaaataatattaggttggagcaaaagtaattgcagtttttgccattgctttcaatggtaaaaggcaccattacttttgcagccacgtaatattataaatttgttccntaaagtgtatttttgataagaaagcccttttgtttntctttctgntaattttttgnttttttcttggtagagacagagttttgcactccagcctgcggacagaccaagacttcatcccccccaaaaaaaaaagattggaggtgatttacagtgaaagacacaaataaaatacaactgttcaatggaaatagaaaataaacaccataaaagagagaagagaggtaatttgttagcatcaagagtcaagttgctatatggtcaaaggttaaatttatctctaaaaaatggcaggattcaaagttgtacatacatgtgattacttctgttttttacacccacatacagtacaaaagattattaaaaatattcccaaaaggcaggtgcaatgatgcacacttatacccccagccactcaggaggctgatgcaagaggatcgcttgagcccaggagttgaagtccagcctaagcaacatagtgaaaccccatctccaaaaatataataataattctctcaaaatactaaacagaggtggttttattgataagattttggctgtttggttttccactattctctattggctaaaatttgtttaatgagcatgaaatgtttttattttattttgcttatttttatgattgcaaaaaatgatatgagtttctccctgccaaggcaaaaaatatatatatatacctataaaaatat

SEQ ID NO: 299464 - DNA, 714 bp, Homo sapiens
gcgtcccctaccacagcacttcagagaagcagaggagaatcacttgaacctgggaggcggaggttgcagtgagctaagatcacgccactgcactccagcctgcggacagaccaagacttcatcccccccaaaaaaaaaagattggaggtgatttacagtgaaagacacaaataaaatacaactgttcaatggaaatagaaaataaacaccataaaagagagaagagaggtaatttgttagcatcaagagtcaagttgctatatggtcaaaggttaaatttatctctaaaaaatggcaggattcaaagttgtacatacatgtgattacttctgttttttacacccacatacagtacaaaagattattaaaaatattcccaaaaggcaggtgcaatgatgcacacttatacccccagccactcaggaggctgatgcaagaggatcgcttgagcccaggagttgaagtccagcctaagcaacatagtgaaaccccatctccaaaaatataataataattctctcaaaatactaaacagaggtggttttattgataagattttggctgtttggttttccactattctctattggctaaaatttgtttaatgagcatgaaatgtttttattttattttgcttatttttatgattgcaaaaaatgatatgagtttctccctgccaaggcaaaaaatatatatatatacctataaaaatat

SEQ ID NO: 299465 - DNA, 916 bp, Homo sapiens
ggctcctcccccaccggccttcaccttttgttccctatcctgggccagttctctcgcaggtcccagatgtccagttccagatgcctggacccagagtgtgggggaaatatctctggagaagccctcactccaaaggctgtccaggcgcaatgtggtggctgcttctctggggagtcctccaggcttgcccaacccggggctccgtcctcttggcccaagagctaccccagcagctgacatcccccgggtacccagagccgtatggcaaaggccaagagagcagcacggacatcaaggctccagagggctttgctgtgaggctcgtcttccaggacttcgacctggagccgtcccaggactgtgcaggggactctgtcacaatctcattcgtcggttcggatccaagccagttctgtggtcagcaaggctcccctctgggcaggccccctggtcagagggagtttgtatcctcagggaggagtttgcggctgaccttccgcacacagccttcctcggagaacaagactgcccacctccacaagggcttcctggccctctaccaaaccgtggctgtgaactatagtcagcccatcagcgaggccagcaggggctctgaggccatcaacgcacctggagacaaccctgccaaggtccagaaccactgccaggagccctattatcaggccgcggcagcaggggcactcacctgtgcaaccccagggacctggaaagacagacaggatggggaggaggttcttcagtgtatgcctggaaccaccaaactgtcttcaacagcagcagcaccaagttacatctcaccggcaatacatgagggttcaagcccaccatttttgagatccacgcttttgaatgaaagcattgccttctaaagttttgtttgtttgtttgttttgag

SEQ ID NO: 299466 - DNA, 892 bp, Homo sapiens
ggctcctcccccaccggccttcaccttttgttccctatcctgggccagttctctcgcaggtcccagatgtccagttccagatgcctggacccagagtgtgggggaaatatctctggagaagccctcactccaaaggctgtccaggcgcaatgtggtggctgcttctctggggagtcctccaggcttgcccaacccggggctccgtcctcttggcccaagagctaccccagcagctgacatcccccgggtacccagagccgtatggcaaaggccaagagagcagcacggacatcaaggctccagagggctttgctgtgaggctcgtcttccaggacttcgacctggagccgtcccaggactgtgcaggggactctgtcacaatctcattcgtcggttcggatccaagccagttctgtggtcagcaaggctcccctctgggcaggccccctggtcagagggagtttgtatcctcagggaggagtttgcggctgaccttccgcacacagccttcctcggagaacaagactgcccacctccacaagggcttcctggccctctaccaaaccgtggctgtgaactatagtcagcccatcagcgaggccagcaggggctctgaggccatcaacgcacctggagacaaccctgccaaggtccagaaccactgccaggagccctattatcaggccgcggcagcaggggcactcacctgtgcaaccccagggacctggaaagacagacaggatggggaggaggttcttcagtgtatgcctgcagcagcaccaagttacatctcaccggcaatacatgagggttcaagcccaccatttttgagatccacgcttttgaatgaaagcattgccttctaaagttttgtttgtttgtttgttttgag

SEQ ID NO: 299467 - DNA, 778 bp, Homo sapiens
ggctcctcccccaccggccttcaccttttgttccctatcctgggccagttctctcgcaggtcccagatgtccagttccagatgcctggacccagagtgtgggggaaatatctctggagaagccctcactccaaaggctgtccaggcgcaatgtggtggctgcttctctggggagtcctccaggcttgcccaacccggggctccgtcctcttggcccaagagctaccccagcagctgacatcccccgggtacccagagccgtatggcaaaggccaagagagcagcacggacatcaaggctccagagggctttgctgtgaggctcgtcttccaggacttcgacctggagccgtcccaggactgtgcaggggactctgtcacagtgagctggggatggggggggtcccgccaggactgtggccagggagattcccggggttgtgggaagtggcggtgccctgaatcccccatctggaggagggatgaattttccatgtaggggcagtcgggcttggcttaccggggagcagtggtggaccccaggacacagcctcccaccagcgcctccggggctgccatctgggccccacagagcaaagagggcagcaagcaggccctgcgtttggaaggcttatgaatggacacacaaatcttgcaaatctatggagccaggggcagggacgcacatattggttgttaaaaatatgtcatcatgtatttgttgagtgcctgctctatcaggtgaggaagctggacacaaataataacaaaagattaagt

SEQ ID NO: 299468 - DNA, 788 bp, Homo sapiens
ggctcctcccccaccggccttcaccttttgttccctatcctgggccagttctctcgcaggtcccagatgtccagttccagatgcctggacccagagtgtgggggaaatatctctggagaagccctcactccaaaggctgtccaggcgcaatgtggtggctgcttctctggggagtcctccaggcttgcccaacccggggctccgtcctcttggcccaagagctaccccagcagctgacatcccccgggtacccagagccgtatggcaaaggccaagagagcagcacggacatcaaggctccagagggctttgctgtgaggctcgtcttccaggacttcgacctggagccgtcccaggactgtgcaggggactctgtcacagtgagctggggatggggggggtcccgccaggactgtggccagggagattcccggggttgtgggaagtggcggtgccctgaatcccccatctggaggagggatgaattttccatgtaggggcagtcgggcttggcttaccggggagcagtggtggaccccagccatgaccctggtatcttcaagccttaagtggaagcttgagtgacagctgaggctggggactcagggacacctgggctggatcccagccctgcccctgctggcaagcaaccctattaagagacagccgtagctgagcccccagcggttgtttccatgcagatttacaggcccagtgtttgcagatcatctcatttttaaagagatgccaaaaatccagatttttaagtaaaattataaattttcaaa

SEQ ID NO: 299469 - DNA, 614 bp, Homo sapiens
tatcttcaaactctttgagtgttgtcaatctgatcggtgaaaacgaactcaaatgttttaaaaaaactaaaaataaaaaataaaacactgtgcaagtcaaaccaagtatagccatgggccagaatcagcccctgggttgccagttggcaagtctgtgctaggtgctgttttcctatagctgtgaactatagtcagcccatcagcgaggccagcaggggctctgaggccatcaacgcacctggagacaaccctgccaaggtccagaaccactgccaggagccctattatcaggccgcggcagcaggtgagtccccacctgccgaggggtggcttccatccacctcattcccacccaaatgcctgacaccctctgagcacctgcttcgttaaccaacagcttcaactccgagcctatttctttgcctctcctcatttacgccacaggggcactcacctgtgcaaccccagggacctggaaagacagacaggatggggaggaggttcttcagtgtatgcctggtgagtagccacctgctagcaccattcccccaacaagcctcagctgcaactgggacctacaggacacaggggttaaaggaaagccttagaataga

SEQ ID NO: 299470 - DNA, 325 bp, Homo sapiens
cagcacttcagagaagcaggtctttaatcagtgtgtctagatgcagctgctgactgtcacccctaccccgcctctctcccagtctgcggacggccagtcacccccattgcccagaatcagacgaccctcggttcttccagagccaagctgggcaacttcccctggcaagccttcaccagtatccacggccgtgggggcggggccctgctgggggacagatggatcctcactgctgcccacaccgtctaccccaaggacagtgtttctctcaggaagaaccagagtgtgaatgtgttcttgggccacacagccatagatgagatgc

SEQ ID NO: 299471 - DNA, 3608 bp, Homo sapiens
gaattcttcgtaggaattatcttttccctcctctcacccgacagcctgcctatttccaaaggaaaaaaaaaaagcgtgttgagtacgttctggattactcataagaccttttttttttccttccgggcgcaaaaccgtgagctggatttataatcgccctataaagctccagaggcggtcaggcacctgcagaggagccccgccgctccgccgactagctgcccccgcgagcaacggcctcgtgatttccccgccgatccggtccccgcctccccactctgcccccgcctaccccggagccgtgcagccgcctctccgaatctctctcttctcctggcgctcgcgtgcgagagggaactagcgagaacgaggaagcagctggaggtgacgccgggcagattacgcctgtcagggccgagccgagcggatcgctgggcgctgtgcagaggaaaggcgggagtgcccggctcgctgtcgcagagccgagcctgtttctgcgccggaccagtcgaggactctggacagtagaggccccgggacgaccgagctgatggcgtcttcgaccccatcttcgtccgcaacctcctcgaacgcgggagcggaccccaataccactaacctgcgccccacaacgtacgatacctggtgcggcgtggcccatggatgcaccagaaaactggggctcaagatctgcggcttcttgcaaaggaccaacagcctggaagagaagagtcgccttgtgagtgccttcaaggagaggcaatcctccaagaacctgctttcctgtgaaaacagcgaccgggatgcccgcttccggcgcacagagactgacttctctaatctgtttgctagagatctgcttccggctaagaacggtgaggagcaaaccgtgcaattcctcctggaagtggtggacatactcctcaactatgtccgcaagacatttgatcgctccaccaaggtgctggactttcatcacccacaccagttgctggaaggcatggagggcttcaacttggagctctctgaccaccccgagtccctggagcagatcctggttgactgcagagacaccttgaagtatggggttcgcacaggtcatcctcgatttttcaaccagctctccactggattggatattattggcctagctggagaatggctgacatcaacggccaataccaacatgtttacatatgaaattgcaccagtgtttgtcctcatggaacaaataacacttaagaagatgagagagatagttggatggtcaagtaaagatggtgatgggatattttctcctgggggcgccatatccaacatgtacagcatcatggctgctcgctacaagtacttcccggaagttaagacaaagggcatggcggctgtgcctaaactggtcctcttcacctcagaacagagtcactattccataaagaaagctggggctgcacttggctttggaactgacaatgtgattttgataaagtgcaatgaaagggggaaaataattccagctgattttgaggcaaaaattcttgaagccaaacagaagggatatgttcccttttatgtcaatgcaactgctggcacgactgtttatggagcttttgatccgatacaagagattgcagatatatgtgagaaatataacctttggttgcatgtcgatgctgcctggggaggtgggctgctcatgtccaggaagcaccgccataaactcaacggcatagaaagggccaactcagtcacctggaaccctcacaagatgatgggcgtgctgttgcagtgctctgccattctcgtcaaggaaaagggtatactccaaggatgcaaccagatgtgtgcaggatacctcttccagccagacaagcagtatgatgtctcctacgacaccggggacaaggcaattcagtgtggccgccacgtggatatcttcaagttctggctgatgtggaaagcaaagggcacagtgggatttgaaaaccagatcaacaaatgcctggaactggctgaatacctctatgccaagattaaaaacagagaagaatttgagatggttttcaatggcgagcctgagcacacaaacgtctgtttttggtatattccacaaagcctcaggggtgtgccagacagccctcaacgacgggaaaagctacacaaggtggctccaaaaatcaaagccctgatgatggagtcaggtacgaccatggttggctaccagccccaaggggacaaggccaacttcttccggatggtcatctccaacccagccgctacccagtctgacattgacttcctcattgaggagatagaaagactgggccaggatctgtaatcatccttcgcagaacatgagtttatgggaatgccttttccctctggcactccagaacaaacctctatatgttgctgaaacacacaggccatttcattgagggaaaacataatatcttgaagaatattgttaaaaccttacttaaagcttgtttgttctagttagcaggaaatagtgttctttttaaaaagttgcacattaggaacagagtatatatgtacagttatacatacctctctctatatatacatgtatagtgagtgtggcttagtaatagatcacggcatgtttcccgctccaagagaattcactttaccttcagcagttaccgaggagctaaacatgctgccaaccagcttgtccaacaactccaggaaaactgtttttcaaaacgccatgtcctaggggccaagggaaatgctgttggtgagaatcgacctcactgtcagcgtttctccacctgaagtgatgatggatgagaaaaaacaccaccaaatgacaagtcacaccctccccattagtatcctgttaggggaaaatagtagcagagtcattgttacaggtgtactatggctgtatttttagagattaatttgtgtagattgtgtaaattcctgttgtctgaccttggtggtgggagggggagactatgtgtcatgatttcaatgattgtttaattgtaggtcaatgaaatatttgcttatttatattcagagatgtaccatgttaaagaggcgtcttgtattttcttcccatttgtaatgtatcttatttatatatgaagtaagttctgaaaactgtttatggtattttcgtgcatttgtgagccaaagagaaaagattaaaattagtgagatttgtatttatattagagtgcccttaaaataatgatttaagcattttactgtctgtaagagaattctaagattgtacataaagtcatatatatggaaatcctgttacttaaatagcatctgctcttctcttacgctctctgtctggctgtacgtctggtgttctcaatgcttttctagcaactgttggataataactagatctcctgtaattttgtagtagttgatgaccaatctctgtgactcgcttagctgaaacctaaggcaacatttccgaagaccttctgaagatctcagataaagtgaccaggctcacaactgtttttgaagaagggaaattcacactgtgcgttttagagtatgcaagaagaatataaataaataaaaatattctccatggagattgacaaaaaaaaaaa

SEQ ID NO: 299472 - DNA, 1385 bp, Homo sapiens
gaattcttcgtaggaattatcttttccctcctctcacccgacagcctgcctatttccaaaggaaaaaaaaaaagcgtgttgagtacgttctggattactcataagaccttttttttttccttccgggcgcaaaaccgtgagctggatttataatcgccctataaagctccagaggcggtcaggcacctgcagaggagccccgccgctccgccgactagctgcccccgcgagcaacggcctcgtgatttccccgccgatccggtccccgcctccccactctgcccccgcctaccccggagccgtgcagccgcctctccgaatctctctcttctcctggcgctcgcgtgcgagagggaactagcgagaacgaggaagcagctggaggtgacgccgggcagattacgcctgtcagggccgagccgagcggatcgctgggcgctgtgcagaggaaaggcgggagtgcccggctcgctgtcgcagagccgagcctgtttctgcgccggaccagtcgaggactctggacagtagaggccccgggacgaccgagctgatggcgtcttcgaccccatcttcgtccgcaacctcctcgaacgcgggagcggaccccaataccactaacctgcgccccacaacgtacgatacctggtgcggcgtggcccatggatgcaccagaaaactggggctcaagatctgcggcttcttgcaaaggaccaacagcctggaagagaagagtcgccttgtgagtgccttcaaggagaggcaatcctccaagaacctgctttcctgtgaaaacagcgaccgggatgcccgcttccggcgcacagagactgacttctctaatctgtttgctagagatctgcttccggctaagaacggtgaggagcaaaccgtgcaattcctcctggaagtggtggacatactcctcaactatgtccgcaagacatttgatcgctccaccaaggtgctggactttcatcacccacaccagttgctggaaggcatggagggcttcaacttggagctctctgaccaccccgagtccctggagcagatcctggttgactgcagagacaccttgaagtatggggttcgcacaggtcatcctcgatttttcaaccagctctccactggattggatattattggcctagctggagaatggctgacatcaacggccaataccaacatgccatcagacatgagggagtgttggttgctacggtgatggggctcagagcagaaccaaagcatgattgtgacctccagaggtgatggtaactgcacacatggtttccaagggtcttcctcctaaatttccaggggcctcccaaggaaaatggacatattctttttggaaataaaatacttctaccaacataaaaaaa

SEQ ID NO: 299473 - DNA, 3553 bp, Homo sapiens
gaattcttcgtaggaattatcttttccctcctctcacccgacagcctgcctatttccaaaggaaaaaaaaaaagcgtgttgagtacgttctggattactcataagaccttttttttttccttccgggcgcaaaaccgtgagctggatttataatcgccctataaagctccagaggcggtcaggcacctgcagaggagccccgccgctccgccgactagctgcccccgcgagcaacggcctcgtgatttccccgccgatccggtccccgcctccccactctgcccccgcctaccccggagccgtgcagccgcctctccgaatctctctcttctcctggcgctcgcgtgcgagagggaactagcgagaacgaggaagcagctggaggtgacgccgggcagattacgcctgtcagggccgagccgagcggatcgctgggcgctgtgcagaggaaaggcgggagtgcccggctcgctgtcgcagagccgagcctgtttctgcgccggaccagtcgaggactctggacagtagaggccccgggacgaccgagctgatggcgtcttcgaccccatcttcgtccgcaacctcctcgaacgcgggagcggaccccaataccactaacctgcgccccacaacgtacgatacctggtgcggcgtggcccatggatgcaccagaaaactggggctcaagatctgcggcttcttgcaaaggaccaacagcctggaagagaagagtcgccttgtgagtgccttcaaggagaggcaatcctccaagaacctgctttcctgtgaaaacagcgaccgggatgcccgcttccggcgcacagagactgacttctctaatctgtttgctagagatctgcttccggctaagaacggtgaggagcaaaccgtgcaattcctcctggaagtggtggacatactcctcaactatgtccgcaagacatttgatcgctccaccaaggtgctggactttcatcacccacaccagttgctggaaggcatggagggcttcaacttggagctctctgaccaccccgagtccctggagcagatcctggttgactgcagagacaccttgaagtatggggttcgcacaggtcatcctcgatttttcaaccagctctccactggattggatattattggcctagctggagaatggctgacatcaacggccaataccaacatgtttacatatgaaattgcaccagtgtttgtcctcatggaacaaataacacttaagaagatgagagagatagttggatggtcaagtaaagatggtgatgggatattttctcctgggggcgccatatccaacatgtacagcatcatggctgctcgctacaagtacttcccggaagttaagacaaagggcatggcggctgtgcctaaactggtcctcttcacctcagaacagagtcactattccataaagaaagctggggctgcacttggctttggaactgacaatgtgattttgataaagtgcaatgaaagggggaaaataattccagctgattttgaggcaaaaattcttgaagccaaacagaagggatatgttcccttttatgtcaatgcaactgctggcacgactgtttatggagcttttgatccgatacaagagattgcagatatatgtgagaaatataacctttggttgcatgtcgatgctgcctggggaggtgggctgctcatgtccaggaagcaccgccataaactcaacggcatagaaagggccaactcagtcacctggaaccctcacaagatgatgggcgtgctgttgcagtgctctgccattctcgtcaaggaaaagggtatactccaaggatgcaaccagatgtgtgcaggatacctcttccagccagacaagcagtatgatgtctcctacgacaccggggacaaggcaattcagtgtggccgccacgtggatatcttcaagttctggctgatgtggaaagcaaagggcacagtgggatttgaaaaccagatcaacaaatgcctggaactggctgaatacctctatgccaagattaaaaacagagaagaatttgagatggttttcaatggcgagcctgagcacacaaacgtctgtttttggtatattccacaaagcctcaggggtgtgccagacagccctcaacgacgggaaaagctacacaaggtggctccaaaaatcaaagccctgatgatggagtcaggtacgaccatggttggctaccagccccaaggggacaaggccaacttcttccggatggtcatctccaacccagccgctacccagtctgacattgacttcctcattgaggagatagaaagactgggccaggatctgtaatcatccttcgcagaacatgagtttatgggaatgccttttccctctggcactccagaacaaacctctatatgttgctgaaacacacaggccatttcattgagggaaaacataatatcttgaagaatattgttaaaaccttacttaaagcttgtttgttctagttagcaggaaatagtgttctttttaaaaagttgcacattaggaacagagtatatatgtacagttatacatacctctctctatatatacatgtatagtgagtgtggcttagtaatagatcacggcatgtttcccgctccaagagaattcactttaccttcagcagttaccgaggagctaaacatgctgccaaccagcttgtccaacaactccaggaaaactgtttttcaaaacgccatgtcctaggggccaagggaaatgctgttggtgagaatcgacctcactgtcagcgtttctccacctgaagtgatgatggatgagaaaaaacaccaccaaatgacaagtcacaccctccccattagtatcctgttaggggaaaatagtagcagagtcattgttacaggtgtactatggctgtatttttagagattaatttgtgtagattgtgtaaattcctgttgtctgaccttggtggtgggagggggagactatgtgtcatgatttcaatgattgtttaattgtaggtcaatgaaatatttgcttatttatattcagagatgtaccatgttaaagaggcgtcttgtattttcttcccatttgtaatgtatcttatttatatatgaagtaagttctgaaaactgtttatggtattttcgtgcatttgtgagccaaagagaaaagattaaaattagtgagatttgtatttatattagagtgccataaagtcatatatatggaaatcctgttacttaaatagcatctgctcttctcttacgctctctgtctggctgtacgtctggtgttctcaatgcttttctagcaactgttggataataactagatctcctgtaattttgtagtagttgatgaccaatctctgtgactcgcttagctgaaacctaaggcaacatttccgaagaccttctgaagatctcagataaagtgaccaggctcacaactgtttttgaagaagggaaattcacactgtgcgttttagagtatgcaagaagaatataaataaataaaaatattctccatggagattgacaaaaaaaaaaa

SEQ ID NO: 299474 - DNA, 2039 bp, Homo sapiens
agcggactccgagagccgcagcggcagcggcgcgtcctgcctgcagagagccaggccggagaagccgagcggcgcagaggacgccagggcgcgcgccgcagccacccaccctccggaccgcggcagctgctgacccgccatcgccatggcccgcgggaaagccaaggccaactcagtcacctggaaccctcacaagatgatgggcgtgctgttgcagtgctctgccattctcgtcaaggaaaagggtatactccaaggatgcaaccagatgtgtgcaggatacctcttccagccagacaagcagtatgatgtctcctacgacaccggggacaaggcaattcagtgtggccgccacgtggatatcttcaagttctggctgatgtggaaagcaaagggcacagtgggatttgaaaaccagatcaacaaatgcctggaactggctgaatacctctatgccaagattaaaaacagagaagaatttgagatggttttcaatggcgagcctgagcacacaaacgtctgtttttggtatattccacaaagcctcaggggtgtgccagacagccctcaacgacgggaaaagctacacaaggtggctccaaaaatcaaagccctgatgatggagtcaggtacgaccatggttggctaccagccccaaggggacaaggccaacttcttccggatggtcatctccaacccagccgctacccagtctgacattgacttcctcattgaggagatagaaagactgggccaggatctgtaatcatccttcgcagaacatgagtttatgggaatgccttttccctctggcactccagaacaaacctctatatgttgctgaaacacacaggccatttcattgagggaaaacataatatcttgaagaatattgttaaaaccttacttaaagcttgtttgttctagttagcaggaaatagtgttctttttaaaaagttgcacattaggaacagagtatatatgtacagttatacatacctctctctatatatacatgtatagtgagtgtggcttagtaatagatcacggcatgtttcccgctccaagagaattcactttaccttcagcagttaccgaggagctaaacatgctgccaaccagcttgtccaacaactccaggaaaactgtttttcaaaacgccatgtcctaggggccaagggaaatgctgttggtgagaatcgacctcactgtcagcgtttctccacctgaagtgatgatggatgagaaaaaacaccaccaaatgacaagtcacaccctccccattagtatcctgttaggggaaaatagtagcagagtcattgttacaggtgtactatggctgtatttttagagattaatttgtgtagattgtgtaaattcctgttgtctgaccttggtggtgggagggggagactatgtgtcatgatttcaatgattgtttaattgtaggtcaatgaaatatttgcttatttatattcagagatgtaccatgttaaagaggcgtcttgtattttcttcccatttgtaatgtatcttatttatatatgaagtaagttctgaaaactgtttatggtattttcgtgcatttgtgagccaaagagaaaagattaaaattagtgagatttgtatttatattagagtgcccttaaaataatgatttaagcattttactgtctgtaagagaattctaagattgtacataaagtcatatatatggaaatcctgttacttaaatagcatctgctcttctcttacgctctctgtctggctgtacgtctggtgttctcaatgcttttctagcaactgttggataataactagatctcctgtaattttgtagtagttgatgaccaatctctgtgactcgcttagctgaaacctaaggcaacatttccgaagaccttctgaagatctcagataaagtgaccaggctcacaactgtttttgaagaagggaaattcacactgtgcgttttagagtatgcaagaagaatataaataaataaaaatattctccatggagattgacaaaaaaaaaaa

SEQ ID NO: 299475 - DNA, 499 bp, Homo sapiens
atataactcacctatccctttgcagccctgatgcagctacctcttatatttctgtctagacttcaggtggaaagcgcactgaagtacacgaatcacctccagccaaattgcctagatagctttggtaataagtgtgactacttgtattcccagggtaaagggtccagtgggaagccccagcaatagggaagccagcaaaacctatcaggatattatcctttcgcttcctgacctcccttgtctcttgagacaccagctcagcgttcgtttttagaaacaataatcaaagagccccaacacctcccaatatgtccgcttgctgacagggggcgccatatccaacatgtacagcatcatggctgctcgctacaagtacttcccggaagttaagacaaagggcatggcggctgtgcctaaactggtcctcttcacctcagaacaggtgagtcggggatgctttctcatggatagtggtgttttttaggggactttccaactt

SEQ ID NO: 299476 - DNA, 505 bp, Homo sapiens
tataactcacctatccctttgcagccctgatgcagctacctcttatatttctgtctagacttcaggtggaaagcgcactgaagtacacgaatcacctccagccaaattgcctagatagctttggtaataagtgtgactacttgtattcccagggtaaagggtccagtgggaagccccagcaatagggaagccagcaaaacctatcaggatattatcctttcgcttcctgacctcccttgtctcttgagacaccagctcagcgttcgtttttagaaacaataatcaaagagccccaacacctcccaatatgtccgcttgctgacagggggcgccatatccaacatgtacagcatcatggctgctcgctacaagtacttcccggaagttaagacaaagggcatggcggctgtgcctaaactggtcctcttcacctcagaacaggtgagtcggggatgctttctcatggatagtggtgttttttaggggactttccaacttctaacct

SEQ ID NO: 299477 - DNA, 791 bp, Homo sapiens
cgtgtgtttgtgtgtgtgtatgtgtgctggtgaatgtgagtacagggaagcagcggccgccatttcagggagcttgtcgacgctgtcgcaggggtggatcctgagctgccgaagccgccgtcctgctctcccgcgtgggcttctctaattccattgttttttttagattctctcgggcctagccgtccttggaacccgatattcgggctgggcggttccgcggcctgggcctaggggcttaacagtagcaacagaagcggcggcggcggcagcagcagcagcagcagcagcaatctcttcccgaacacgagcaccacaggcgcccgaaggccggaacaggcgtttagagaaaatggcagacgatattgatattgaagcaatgcttgaggctccttacaagaagacttgcctaacgatatctcacctctactcccatgaattcacctttgattccagtgtgaactgtcaatcataaggtagtaattgagtgacttatcgctgtaccgtggtcccctaggtaaaatgactcaactaagaattaccacctccagtttggtatagcaaaaaggtgaatgtagtggtttgggaaaaagcaggggtccaagaataacaaagcatgaccagtctgtggcaagttaaatcttctaatagtcttataagaagaaatgggtgagattttaaaatttatgtatctatgtaagactggtgatagtaaatcttaaaacagtccagtggcaatctgctgctcagttaataattactaaaattcttggatccctgaatagaaatta

SEQ ID NO: 299478 - DNA, 1102 bp, Homo sapiens
tgtgtgtgtttttttttttttaattctcaagactgtatatatatatgtagcttacaaagatatctaaagtctgaaaatgggtgtgtgcattttcagaatctaaaaattttgaggctgtaacctttggtcttggcacctctcagtggtccaggatggataaatacaagggcagcttgcctgggaataaagttaagagacaagtatttttgtttcctcttcataactgaggtggaaaagcagtagcctaaacaatgttagtcttgctggagagcgcatgaatgcgatcttagcaagaccctaaacctgtaactagtgtaattttgtgtttcctttttagctccggaccaaaatttaacagtgccatccgaggaaagattgggttgcctcatagcatcaaattaaggtttttaaacatacttctgaattgtttaaattgtttttcaaggaactaacatgctgtacttgtttggataacttctgaaactttttaactttgcagcagacgacgttcccgaagcaaaagtccattcagaaaagacaagagccctgtgaggtagtttacttctttaaagcctttagctcttaaaaagcttttgcagcttatggtactgttaaatttgatgatatttagtaatttggaccatattaaatcttgcttttgctttcttttgcacttccagtactttaaggtcaagtgaatttctactgagttttcagtagttttcactttaatttcatataattaaagcaacagttatatatttatttatttatttatttattttgagacggagtctcactcagtcacccaggatggagtgcagtagtgcagtcttggcttactgcaacctccgcctcctgggttcaagcagttcttctacctcagccctccaagtagctgggattacaggcatgcaccaccatgcctcgctatttttttattttagtagcgatgggatttcaccatgttggctagcctagtgttgagctccggacctcagatggtccacccaccttggcctctcaaagtggtaggattgcaggtgtgagccaacacacccggccacaaaagttatttatttatgagatggagtctcgctct

SEQ ID NO: 299479 - DNA, 306 bp, Homo sapiens
tagccgccgtgacggcggaatcgtcgggtggtccggaatcgtcgtcgtcgtgcggaattcgtcgtcgtggctgttttcagctgaaatgtcaggccagttgtgaatttgttgtgtatgctcattgataaagatccttttttgggctcatctgtatttaaggtttgttaataataataaaaggtattccaaactaaaagtgttttgaagattagatcactagaaatttggatgtggatatttaaagttggaaacaaatatattatggttattaaataactatattaaccacctacaattctaaggatt

SEQ ID NO: 299480 - DNA, 834 bp, Homo sapiens
gtactcttgaagctgtaactccctaatttcctgcaggcccttggtaaaatgttatctacctcctctttctgaattttgcatattctagatgcctcctattaagttgatatgtagtatctgacttacgtagggtagtatttttatcactctaaactttaacattagttgttatgcaaatggaaggtgtatgtctttaaactgctgtgtgttatctctgtgtgacgtgtattttgtcttctaggcagaaaaaaacagagctgcagcaatggcaaacaatttacaaaagggaagtgctggacctatgaggctttatgtgggctcattacacttcaacataactgaagatatgcttcgtgggatctttgagccttttggaagagtaagtccaggttcttcaatgaatcttcagtaggttgttgatctgagtataactacataatttctgtatgtcttgctttgttatctttctgtgagttaatattaagaggataagggctggttttataaaaatttctgtgacaacatagattaaaataggtcacttgatagattcttaaaagaatgttactgttattcataatgccatgtgaaatgcataatgggtattagagttaataaaaagtccacattggctgggcatggtggctcatgcctgtaatcccagctacttggggtgctgaggcaggaggatgacattagcccaggatttcaaggttgcagtgagccatgattatgccacttcactccaccttgggtaacagtgtgatcctgtgtcaaaagaaggaaaattgttaaatcatacgaagactattattttttagtaggatttttttt

SEQ ID NO: 299481 - DNA, 502 bp, Homo sapiens
ctattttatccttcatctgtttggattgatgtgtattgagattttgtctaattgaactgattttgataacacataaagtttaatttccctgttaaaataggactcccaaatttctgaatgtctgtttcaagtattaggttacctcagttttctggcacctaaaagctactgataacatacattagtagcaatattaaataaggtaaaataactccagtgacatcctagttacatgcttggggtgggtttttggtttcgttttaaagtatttatgagggatactttcatgcattttccatgaaactaatttttctctttctttttttagcttcagctttagctgcagctgcctctgttcagccacttgcaacacaatgtttccaactctctaacatgtttaaccctcaaacagaagaagaagttggatgggataccgagattaaggatagagagattaaggatagagagattaacggagggactcctctagacctcaccctct

SEQ ID NO: 299482 - DNA, 491 bp, Homo sapiens
ataaaattctagtatacctattagccagtggaaccattatggtaaaccagtttgtggttatagagcactaagtttctacaggcaacttgaataaacataacttgggtccattttgcatacagcaacatctttaccttttttttcattttttctgtagggcaatgtgtatgtgaagtgcccatcaattgctgcagctattgctgctgtcaatgcattgcatggcaggtggtttgctggtaaaatgataacagcagcatatgtacctcttccaacttaccacaacctgtttcctgattctatgacagcaacacagctactggttccaagtagacgatgaaggaagatatagtcccttatgtatatagctttttttctttcttgagaattcatcttgagttatcttttatttagataaaaataaagaggcaaggatctactgtcatttgtatgcaatttcctgttaccttgaaaaaataaaaatgttaacagga

SEQ ID NO: 299483 - DNA, 2809 bp, Homo sapiens
  misc_feature (27)..(27): n is a, c, g, or t
  misc_feature (34)..(34): n is a, c, g, or t
  misc_feature (47)..(47): n is a, c, g, or t
  misc_feature (56)..(56): n is a, c, g, or t
cagtcgacttactgcgcctacacctanattgaanacaccgctttgcntcagtatanaaaacggcaagtgtacgtcgatacggagcttgtcgacgctgtcgcaggggtggatcctgagctgccgaagccgccgtcctgctctcccgcgtgggcttctctaattccattgttttttttagattctctcgggcctagccgtccttggaacccgatattcgggctgggcggttccgcggcctgggcctaggggcttaacagtagcaacagaagcggcggcggcggcagcagcagcagcagcagcagcaatctcttcccgaacacgagcaccacaggcgcccgaaggccggaacaggcgtttagagaaaatggcagacgatattgatattgaagcaatgcttgaggctccttacaagaaggatgagaacaagttgagcagtgccaacggccatgaagaacgtagcaaaaagaggaaaaaaagcaagagcagaagtcgtagtcatgaacgaaagagaagcaaaagtaaggaacggaagcgaagtagagacagagaaaggaaaaagagcaaaagccgtgaaagaaagcgaagtagaagcaaagagaggcgacggagccgctcaagaagtcgagatcgaagatttagaggccgctacagaagtccttactccggaccaaaatttaacagtgccatccgaggaaagattgggttgcctcatagcatcaaattaagcagacgacgttcccgaagcaaaagtccattcagaaaagacaagagccctgtgagagaacctattgataatttaactcctgaggaaagagatgcaaggacagtcttctgtatgcagctggcggcaagaattcgaccaagggatttggaagagtttttctctacagtaggaaaggttcgagatgtgaggatgatttctgacagaaattcaagacgttccaaaggaattgcttatgtggagttcgtcgatgttagctcagtgcctctagcaataggattaactggccaacgagttttaggcgtgccaatcatagtacaggcatcacaggcagaaaaaaacagagctgcagcaatggcaaacaatttacaaaagggaagtgctggacctatgaggctttatgtgggctcattacacttcaacataactgaagatatgcttcgtgggatctttgagccttttggaagaattgaaagtatccagctgatgatggacagtgaaactggtcgatccaagggatatggatttattacattttctgactcagaatgtgccaaaaaggctttggaacaacttaatggatttgaactagcaggaagaccaatgaaagttggtcatgttactgaacgtactgatgcttcgagtgctagttcatttttggacagtgatgaactggaaaggactggaattgatttgggaacaactggtcgtcttcagttaatggcaagacttgcagagggtacaggtttgcagattccgccagcagcacagcaagctctacagatgagtggctctttggcatttggtgctgtggcagatttgcaaacaagactttcccagcagactgaagcttcagctttagctgcagctgcctctgttcagccacttgcaacacaatgtttccaactctctaacatgtttaaccctcaaacagaagaagaagttggatgggataccgagattaaggatgatgtgattgaagaatgtaataaacatggaggagttattcatatttatgttgacaaaaattcagctcagggcaatgtgtatgtgaagtgcccatcaattgctgcagctattgctgctgtcaatgcattgcatggcaggtggtttgctggtaaaatgataacagcagcatatgtacctcttccaacttaccacaacctgtttcctgattctatgacagcaacacagctactggttccaagtagacgatgaaggaagatatagtcccttatgtatatagctttttttctttcttgagaattcatcttgagttatcttttatttagataaaaataaagaggcaaggatctactgtcatttgtatgcaatttcctgttaccttgaaaaaataaaaatgttaacaggaatgcagtgtgctcattctccctaaatagtaaatcccactgtatacaaaactgttctcttgttctgccttttaaaatgttcatgtagaaaattaatgaactataggaatagctctaggagaacaaatgtgctttctgtaaaaaggcagaccagggatgtaatgtttttaatgtttcagaagcctaactttttacacagtggttacatttcacatttcactaatgttgatatttggctgatggttgagcagtttctgaaatacacatttagtgtatggaaatacaagacagctaaagggctgtttggttagcatctcatcttgcattctgatcaattggcaagaaagggagatttcaaaattatatttcttgatggtatcttttcaattaatgtatctgtaaaagtttctttgtaaatactatgtgttctggtgtgtcttaaaattccaaacaaaatgatccctgcatttcctgaagatgtttaaacgtgagagtctggtaggcaaagcagtctgagaaagaaataggaaatgcagaaataggttttgtctggttgcatataatctttgctctttttaagctctgtgagctctgaaatatatttttgggttacttcagtgtgtttgacaagacagcttgatatttctatcaaacaaatgactttcatattgcaacaatctttgtaagaaccactcaaataaaagtctcttaaaaaggc

SEQ ID NO: 299484 - DNA, 2827 bp, Homo sapiens
  misc_feature (27)..(27): n is a, c, g, or t
  misc_feature (34)..(34): n is a, c, g, or t
  misc_feature (47)..(47): n is a, c, g, or t
  misc_feature (56)..(56): n is a, c, g, or t
cagtcgacttactgcgcctacacctanattgaanacaccgctttgcntcagtatanaaaacggcaagtgtacgtcgatacggagcttgtcgacgctgtcgcaggggtggatcctgagctgccgaagccgccgtcctgctctcccgcgtgggcttctctaattccattgttttttttagattctctcgggcctagccgtccttggaacccgatattcgggctgggcggttccgcggcctgggcctaggggcttaacagtagcaacagaagcggcggcggcggcagcagcagcagcagcagcagcaatctcttcccgaacacgagcaccacaggcgcccgaaggccggaacaggcgtttagagaaaatggcagacgatattgatattgaagcaatgcttgaggctccttacaagaaggatgagaacaagttgagcagtgccaacggccatgaagaacgtagcaaaaagaggaaaaaaagcaagagcagaagtcgtagtcatgaacgaaagagaagcaaaagtaaggaacggaagcgaagtagagacagagaaaggaaaaagagcaaaagccgtgaaagaaagcgaagtagaagcaaagagaggcgacggagccgctcaagaagtcgagatcgaagatttagaggccgctacagaagtccttactccggaccaaaatttaacagtgccatccgaggaaagattgggttgcctcatagcatcaaattaagcagacgacgttcccgaagcaaaagtccattcagaaaagacaagagccctgtgagagaacctattgataatttaactcctgaggaaagagatgcaaggacagtcttctgtatgcagctggcggcaagaattcgaccaagggatttggaagagtttttctctacagtaggaaaggttcgagatgtgaggatgatttctgacagaaattcaagacgttccaaaggaattgcttatgtggagttcgtcgatgttagctcagtgcctctagcaataggattaactggccaacgagttttaggcgtgccaatcatagtacaggcatcacaggcagaaaaaaacagagctgcagcaatggcaaacaatttacaaaagggaagtgctggacctatgaggctttatgtgggctcattacacttcaacataactgaagatatgcttcgtgggatctttgagccttttggaagaattgaaagtatccagctgatgatggacagtgaaactggtcgatccaagggatatggatttattacattttctgactcagaatgtgccaaaaaggctttggaacaacttaatggatttgaactagcaggaagaccaatgaaagttggtcatgttactgaacgtactgatgcttcgagtgctagttcatttttggacagtgatgaactggaaaggactggaattgatttgggaacaactggtcgtcttcagttaatggcaagacttgcagagggtacaggtttgcagattccgccagcagcacagcaagctctacagatgagtggctctttggcatttggtgctgtggcagaattctcttttgttatagatttgcaaacaagactttcccagcagactgaagcttcagctttagctgcagctgcctctgttcagccacttgcaacacaatgtttccaactctctaacatgtttaaccctcaaacagaagaagaagttggatgggataccgagattaaggatgatgtgattgaagaatgtaataaacatggaggagttattcatatttatgttgacaaaaattcagctcagggcaatgtgtatgtgaagtgcccatcaattgctgcagctattgctgctgtcaatgcattgcatggcaggtggtttgctggtaaaatgataacagcagcatatgtacctcttccaacttaccacaacctgtttcctgattctatgacagcaacacagctactggttccaagtagacgatgaaggaagatatagtcccttatgtatatagctttttttctttcttgagaattcatcttgagttatcttttatttagataaaaataaagaggcaaggatctactgtcatttgtatgcaatttcctgttaccttgaaaaaataaaaatgttaacaggaatgcagtgtgctcattctccctaaatagtaaatcccactgtatacaaaactgttctcttgttctgccttttaaaatgttcatgtagaaaattaatgaactataggaatagctctaggagaacaaatgtgctttctgtaaaaaggcagaccagggatgtaatgtttttaatgtttcagaagcctaactttttacacagtggttacatttcacatttcactaatgttgatatttggctgatggttgagcagtttctgaaatacacatttagtgtatggaaatacaagacagctaaagggctgtttggttagcatctcatcttgcattctgatcaattggcaagaaagggagatttcaaaattatatttcttgatggtatcttttcaattaatgtatctgtaaaagtttctttgtaaatactatgtgttctggtgtgtcttaaaattccaaacaaaatgatccctgcatttcctgaagatgtttaaacgtgagagtctggtaggcaaagcagtctgagaaagaaataggaaatgcagaaataggttttgtctggttgcatataatctttgctctttttaagctctgtgagctctgaaatatatttttgggttacttcagtgtgtttgacaagacagcttgatatttctatcaaacaaatgactttcatattgcaacaatctttgtaagaaccactcaaataaaagtctcttaaaaaggc

SEQ ID NO: 299485 - DNA, 4348 bp, Homo sapiens
  misc_feature (27)..(27): n is a, c, g, or t
  misc_feature (34)..(34): n is a, c, g, or t
  misc_feature (47)..(47): n is a, c, g, or t
  misc_feature (56)..(56): n is a, c, g, or t
cagtcgacttactgcgcctacacctanattgaanacaccgctttgcntcagtatanaaaacggcaagtgtacgtcgatacggagcttgtcgacgctgtcgcaggggtggatcctgagctgccgaagccgccgtcctgctctcccgcgtgggcttctctaattccattgttttttttagattctctcgggcctagccgtccttggaacccgatattcgggctgggcggttccgcggcctgggcctaggggcttaacagtagcaacagaagcggcggcggcggcagcagcagcagcagcagcagcaatctcttcccgaacacgagcaccacaggcgcccgaaggccggaacaggcgtttagagaaaatggcagacgatattgatattgaagcaatgcttgaggctccttacaagaagacttgcctaacgatatctcacctctactcccatgaattcacctttgattccagtgtgaactgtcaatcataaggtagtaattgagtgacttatcgctgtaccgtggtcccctaggtaaaatgactcaactaagaattaccacctccagtttggtatagcaaaaaggtgaatgtagtggtttgggaaaaagcaggggtccaagaataacaaagcatgaccagtctgtggcaagttaaatcttctaatagtcttataagaagaaatgggtgagattttaaaatttatgtatctatgtaagactggtgatagtaaatcttaaaacagtccagtggcaatctgctgctcagttaataattactaaaattcttggatccctgaatagaaattaaaaaaaaaaatacaagaggcagtagagtcaatacaagcttaatacaagcttagagtaaatacaagcttagagtcacttgatgactgttttactgttctccatattgtttttatttttaattaggccctaccatagtatttcacactaaaaacaaaggaattatattggctaatatagtctttgactcatttcggtatctcagtaaaagtaaactgtcttttcattgtttcaccagttggtggtgaaaatagcagtatgcatgcattatcactggtgtcacaaactgtaagctttgtaagttagcactttactcctatagctgatgtaatcaaacttttaaacatttcactaaaccttttaatgaattcttgatagatttaaatagtgtatgtaattttgtaatgcttagactcttgaagagctactttctgttttaatgttaagattcttgtgtcttagttttttttaacatggatgtaattccatgtaaacaggtatggaagtaggaaatgtttaggctggacttggtggattattaattgactttcttgggttcttgggagtcaacattactaaagcagtgtgaatccctgtttgcttcagggcgagatgtgtgacagaggtggcatcaagctcttacagtcccaaccctccaacggaaatgggcgaagatctcaggaatggcatcggtcacaggaaatcgatagtggctggctgctagcatggccacttggggcttaggcagaaatagagccatggtactgaccaaagggaccatagcacatggaataaaactcaaaacaggacttcatgttttatggaaattatatttaaccacttcaacattgtaaatctggataacttttaatatctaaactatataagaaagtaaaatttaacatgttaatatggaaaatttttttatttttgtatcttgatgacttaaatgtaagcaacaaagtggttaaacacatacccatctaaatttttttatagccttccatgttaaactataagtaaataattagttttaaaattgttttgtattttcttattcctgttccctttaccctttgacaacttgaaatgttaccacttcgtcctcatgatgttcttctatcaaccctgcttaggatgagaacaagttgagcagtgccaacggccatgaagaacgtagcaaaaagaggaaaaaaagcaagagcagaagtcgtagtcatgaacgaaagagaagcaaaagtaaggaacggaagcgaagtagagacagagaaaggaaaaagagcaaaagccgtgaaagaaagcgaagtagaagcaaagagaggcgacggagccgctcaagaagtcgagatcgaagatttagaggccgctacagaagtccttactccggaccaaaatttaacagtgccatccgaggaaagattgggttgcctcatagcatcaaattaagcagacgacgttcccgaagcaaaagtccattcagaaaagacaagagccctgtgagagaacctattgataatttaactcctgaggaaagagatgcaaggacagtcttctgtatgcagctggcggcaagaattcgaccaagggatttggaagagtttttctctacagtaggaaaggttcgagatgtgaggatgatttctgacagaaattcaagacgttccaaaggaattgcttatgtggagttcgtcgatgttagctcagtgcctctagcaataggattaactggccaacgagttttaggcgtgccaatcatagtacaggcatcacaggcagaaaaaaacagagctgcagcaatggcaaacaatttacaaaagggaagtgctggacctatgaggctttatgtgggctcattacacttcaacataactgaagatatgcttcgtgggatctttgagccttttggaagaattgaaagtatccagctgatgatggacagtgaaactggtcgatccaagggatatggatttattacattttctgactcagaatgtgccaaaaaggctttggaacaacttaatggatttgaactagcaggaagaccaatgaaagttggtcatgttactgaacgtactgatgcttcgagtgctagttcatttttggacagtgatgaactggaaaggactggaattgatttgggaacaactggtcgtcttcagttaatggcaagacttgcagagggtacaggtttgcagattccgccagcagcacagcaagctctacagatgagtggctctttggcatttggtgctgtggcagaattctcttttgttatagatttgcaaacaagactttcccagcagactgaagcttcagctttagctgcagctgcctctgttcagccacttgcaacacaatgtttccaactctctaacatgtttaaccctcaaacagaagaagaagttggatgggataccgagattaaggatgatgtgattgaagaatgtaataaacatggaggagttattcatatttatgttgacaaaaattcagctcagggcaatgtgtatgtgaagtgcccatcaattgctgcagctattgctgctgtcaatgcattgcatggcaggtggtttgctggtaaaatgataacagcagcatatgtacctcttccaacttaccacaacctgtttcctgattctatgacagcaacacagctactggttccaagtagacgatgaaggaagatatagtcccttatgtatatagctttttttctttcttgagaattcatcttgagttatcttttatttagataaaaataaagaggcaaggatctactgtcatttgtatgcaatttcctgttaccttgaaaaaataaaaatgttaacaggaatgcagtgtgctcattctccctaaatagtaaatcccactgtatacaaaactgttctcttgttctgccttttaaaatgttcatgtagaaaattaatgaactataggaatagctctaggagaacaaatgtgctttctgtaaaaaggcagaccagggatgtaatgtttttaatgtttcagaagcctaactttttacacagtggttacatttcacatttcactaatgttgatatttggctgatggttgagcagtttctgaaatacacatttagtgtatggaaatacaagacagctaaagggctgtttggttagcatctcatcttgcattctgatcaattggcaagaaagggagatttcaaaattatatttcttgatggtatcttttcaattaatgtatctgtaaaagtttctttgtaaatactatgtgttctggtgtgtcttaaaattccaaacaaaatgatccctgcatttcctgaagatgtttaaacgtgagagtctggtaggcaaagcagtctgagaaagaaataggaaatgcagaaataggttttgtctggttgcatataatctttgctctttttaagctctgtgagctctgaaatatatttttgggttacttcagtgtgtttgacaagacagcttgatatttctatcaaacaaatgactttcatattgcaacaatctttgtaagaaccactcaaataaaagtctcttaaaaaggc

SEQ ID NO: 299486 - DNA, 4402 bp, Homo sapiens
  misc_feature (27)..(27): n is a, c, g, or t
  misc_feature (34)..(34): n is a, c, g, or t
  misc_feature (47)..(47): n is a, c, g, or t
  misc_feature (56)..(56): n is a, c, g, or t
cagtcgacttactgcgcctacacctanattgaanacaccgctttgcntcagtatanaaaacggcaagtgtacgtcgatacggagcttgtcgacgctgtcgcaggggtggatcctgagctgccgaagccgccgtcctgctctcccgcgtgggcttctctaattccattgttttttttagattctctcgggcctagccgtccttggaacccgatattcgggctgggcggttccgcggcctgggcctaggggcttaacagtagcaacagaagcggcggcggcggcagcagcagcagcagcagcagcaatctcttcccgaacacgagcaccacaggcgcccgaaggccggaacaggcgtttagagaaaatggcagacgatattgatattgaagcaatgcttgaggctccttacaagaagacttgcctaacgatatctcacctctactcccatgaattcacctttgattccagtgtgaactgtcaatcataaggtagtaattgagtgacttatcgctgtaccgtggtcccctaggtaaaatgactcaactaagaattaccacctccagtttggtatagcaaaaaggtgaatgtagtggtttgggaaaaagcaggggtccaagaataacaaagcatgaccagtctgtggcaagttaaatcttctaatagtcttataagaagaaatgggtgagattttaaaatttatgtatctatgtaagactggtgatagtaaatcttaaaacagtccagtggcaatctgctgctcagttaataattactaaaattcttggatccctgaatagaaattaaaaaaaaaaatacaagaggcagtagagtcaatacaagcttaatacaagcttagagtaaatacaagcttagagtcacttgatgactgttttactgttctccatattgtttttatttttaattaggccctaccatagtatttcacactaaaaacaaaggaattatattggctaatatagtctttgactcatttcggtatctcagtaaaagtaaactgtcttttcattgtttcaccagttggtggtgaaaatagcagtatgcatgcattatcactggtgtcacaaactgtaagctttgtaagttagcactttactcctatagctgatgtaatcaaacttttaaacatttcactaaaccttttaaaaataatacatttgttttggattgtatagcacgaccatgtggtaccaatttggatgaattcttgatagatttaaatagtgtatgtaattttgtaatgcttagactcttgaagagctactttctgttttaatgttaagattcttgtgtcttagttttttttaacatggatgtaattccatgtaaacaggtatggaagtaggaaatgtttaggctggacttggtggattattaattgactttcttgggttcttgggagtcaacattactaaagcagtgtgaatccctgtttgcttcagggcgagatgtgtgacagaggtggcatcaagctcttacagtcccaaccctccaacggaaatgggcgaagatctcaggaatggcatcggtcacaggaaatcgatagtggctggctgctagcatggccacttggggcttaggcagaaatagagccatggtactgaccaaagggaccatagcacatggaataaaactcaaaacaggacttcatgttttatggaaattatatttaaccacttcaacattgtaaatctggataacttttaatatctaaactatataagaaagtaaaatttaacatgttaatatggaaaatttttttatttttgtatcttgatgacttaaatgtaagcaacaaagtggttaaacacatacccatctaaatttttttatagccttccatgttaaactataagtaaataattagttttaaaattgttttgtattttcttattcctgttccctttaccctttgacaacttgaaatgttaccacttcgtcctcatgatgttcttctatcaaccctgcttaggatgagaacaagttgagcagtgccaacggccatgaagaacgtagcaaaaagaggaaaaaaagcaagagcagaagtcgtagtcatgaacgaaagagaagcaaaagtaaggaacggaagcgaagtagagacagagaaaggaaaaagagcaaaagccgtgaaagaaagcgaagtagaagcaaagagaggcgacggagccgctcaagaagtcgagatcgaagatttagaggccgctacagaagtccttactccggaccaaaatttaacagtgccatccgaggaaagattgggttgcctcatagcatcaaattaagcagacgacgttcccgaagcaaaagtccattcagaaaagacaagagccctgtgagagaacctattgataatttaactcctgaggaaagagatgcaaggacagtcttctgtatgcagctggcggcaagaattcgaccaagggatttggaagagtttttctctacagtaggaaaggttcgagatgtgaggatgatttctgacagaaattcaagacgttccaaaggaattgcttatgtggagttcgtcgatgttagctcagtgcctctagcaataggattaactggccaacgagttttaggcgtgccaatcatagtacaggcatcacaggcagaaaaaaacagagctgcagcaatggcaaacaatttacaaaagggaagtgctggacctatgaggctttatgtgggctcattacacttcaacataactgaagatatgcttcgtgggatctttgagccttttggaagaattgaaagtatccagctgatgatggacagtgaaactggtcgatccaagggatatggatttattacattttctgactcagaatgtgccaaaaaggctttggaacaacttaatggatttgaactagcaggaagaccaatgaaagttggtcatgttactgaacgtactgatgcttcgagtgctagttcatttttggacagtgatgaactggaaaggactggaattgatttgggaacaactggtcgtcttcagttaatggcaagacttgcagagggtacaggtttgcagattccgccagcagcacagcaagctctacagatgagtggctctttggcatttggtgctgtggcagaattctcttttgttatagatttgcaaacaagactttcccagcagactgaagcttcagctttagctgcagctgcctctgttcagccacttgcaacacaatgtttccaactctctaacatgtttaaccctcaaacagaagaagaagttggatgggataccgagattaaggatgatgtgattgaagaatgtaataaacatggaggagttattcatatttatgttgacaaaaattcagctcagggcaatgtgtatgtgaagtgcccatcaattgctgcagctattgctgctgtcaatgcattgcatggcaggtggtttgctggtaaaatgataacagcagcatatgtacctcttccaacttaccacaacctgtttcctgattctatgacagcaacacagctactggttccaagtagacgatgaaggaagatatagtcccttatgtatatagctttttttctttcttgagaattcatcttgagttatcttttatttagataaaaataaagaggcaaggatctactgtcatttgtatgcaatttcctgttaccttgaaaaaataaaaatgttaacaggaatgcagtgtgctcattctccctaaatagtaaatcccactgtatacaaaactgttctcttgttctgccttttaaaatgttcatgtagaaaattaatgaactataggaatagctctaggagaacaaatgtgctttctgtaaaaaggcagaccagggatgtaatgtttttaatgtttcagaagcctaactttttacacagtggttacatttcacatttcactaatgttgatatttggctgatggttgagcagtttctgaaatacacatttagtgtatggaaatacaagacagctaaagggctgtttggttagcatctcatcttgcattctgatcaattggcaagaaagggagatttcaaaattatatttcttgatggtatcttttcaattaatgtatctgtaaaagtttctttgtaaatactatgtgttctggtgtgtcttaaaattccaaacaaaatgatccctgcatttcctgaagatgtttaaacgtgagagtctggtaggcaaagcagtctgagaaagaaataggaaatgcagaaataggttttgtctggttgcatataatctttgctctttttaagctctgtgagctctgaaatatatttttgggttacttcagtgtgtttgacaagacagcttgatatttctatcaaacaaatgactttcatattgcaacaatctttgtaagaaccactcaaataaaagtctcttaaaaaggc

SEQ ID NO: 299487 - DNA, 4572 bp, Homo sapiens
  misc_feature (27)..(27): n is a, c, g, or t
  misc_feature (34)..(34): n is a, c, g, or t
  misc_feature (47)..(47): n is a, c, g, or t
  misc_feature (56)..(56): n is a, c, g, or t
cagtcgacttactgcgcctacacctanattgaanacaccgctttgcntcagtatanaaaacggcaagtgtacgtcgatacggagcttgtcgacgctgtcgcaggggtggatcctgagctgccgaagccgccgtcctgctctcccgcgtgggcttctctaattccattgttttttttagattctctcgggcctagccgtccttggaacccgatattcgggctgggcggttccgcggcctgggcctaggggcttaacagtagcaacagaagcggcggcggcggcagcagcagcagcagcagcagcaatctcttcccgaacacgagcaccacaggcgcccgaaggccggaacaggcgtttagagaaaatggcagacgatattgatattgaagcaatgcttgaggctccttacaagaaggtgagaaaaaacatgtcggtgaggtttatatatttcttaatttagcattattcacgaaactactgctgaaatgtaaactaacctccccggagccctcttgatttatcttatcagagatgcattacgtgtaacttacaaaagtaaatatatgctattgatgtaataatattgtgcagtagtttcacttcagcgtgatgaataaatgcccatctatctctctttgtacttgcctaacgatatctcacctctactcccatgaattcacctttgattccagtgtgaactgtcaatcataaggtagtaattgagtgacttatcgctgtaccgtggtcccctaggtaaaatgactcaactaagaattaccacctccagtttggtatagcaaaaaggtgaatgtagtggtttgggaaaaagcaggggtccaagaataacaaagcatgaccagtctgtggcaagttaaatcttctaatagtcttataagaagaaatgggtgagattttaaaatttatgtatctatgtaagactggtgatagtaaatcttaaaacagtccagtggcaatctgctgctcagttaataattactaaaattcttggatccctgaatagaaattaaaaaaaaaaatacaagaggcagtagagtcaatacaagcttaatacaagcttagagtaaatacaagcttagagtcacttgatgactgttttactgttctccatattgtttttatttttaattaggccctaccatagtatttcacactaaaaacaaaggaattatattggctaatatagtctttgactcatttcggtatctcagtaaaagtaaactgtcttttcattgtttcaccagttggtggtgaaaatagcagtatgcatgcattatcactggtgtcacaaactgtaagctttgtaagttagcactttactcctatagctgatgtaatcaaacttttaaacatttcactaaaccttttaatgaattcttgatagatttaaatagtgtatgtaattttgtaatgcttagactcttgaagagctactttctgttttaatgttaagattcttgtgtcttagttttttttaacatggatgtaattccatgtaaacaggtatggaagtaggaaatgtttaggctggacttggtggattattaattgactttcttgggttcttgggagtcaacattactaaagcagtgtgaatccctgtttgcttcagggcgagatgtgtgacagaggtggcatcaagctcttacagtcccaaccctccaacggaaatgggcgaagatctcaggaatggcatcggtcacaggaaatcgatagtggctggctgctagcatggccacttggggcttaggcagaaatagagccatggtactgaccaaagggaccatagcacatggaataaaactcaaaacaggacttcatgttttatggaaattatatttaaccacttcaacattgtaaatctggataacttttaatatctaaactatataagaaagtaaaatttaacatgttaatatggaaaatttttttatttttgtatcttgatgacttaaatgtaagcaacaaagtggttaaacacatacccatctaaatttttttatagccttccatgttaaactataagtaaataattagttttaaaattgttttgtattttcttattcctgttccctttaccctttgacaacttgaaatgttaccacttcgtcctcatgatgttcttctatcaaccctgcttaggatgagaacaagttgagcagtgccaacggccatgaagaacgtagcaaaaagaggaaaaaaagcaagagcagaagtcgtagtcatgaacgaaagagaagcaaaagtaaggaacggaagcgaagtagagacagagaaaggaaaaagagcaaaagccgtgaaagaaagcgaagtagaagcaaagagaggcgacggagccgctcaagaagtcgagatcgaagatttagaggccgctacagaagtccttactccggaccaaaatttaacagtgccatccgaggaaagattgggttgcctcatagcatcaaattaagcagacgacgttcccgaagcaaaagtccattcagaaaagacaagagccctgtgagagaacctattgataatttaactcctgaggaaagagatgcaaggacagtcttctgtatgcagctggcggcaagaattcgaccaagggatttggaagagtttttctctacagtaggaaaggttcgagatgtgaggatgatttctgacagaaattcaagacgttccaaaggaattgcttatgtggagttcgtcgatgttagctcagtgcctctagcaataggattaactggccaacgagttttaggcgtgccaatcatagtacaggcatcacaggcagaaaaaaacagagctgcagcaatggcaaacaatttacaaaagggaagtgctggacctatgaggctttatgtgggctcattacacttcaacataactgaagatatgcttcgtgggatctttgagccttttggaagaattgaaagtatccagctgatgatggacagtgaaactggtcgatccaagggatatggatttattacattttctgactcagaatgtgccaaaaaggctttggaacaacttaatggatttgaactagcaggaagaccaatgaaagttggtcatgttactgaacgtactgatgcttcgagtgctagttcatttttggacagtgatgaactggaaaggactggaattgatttgggaacaactggtcgtcttcagttaatggcaagacttgcagagggtacaggtttgcagattccgccagcagcacagcaagctctacagatgagtggctctttggcatttggtgctgtggcagaattctcttttgttatagatttgcaaacaagactttcccagcagactgaagcttcagctttagctgcagctgcctctgttcagccacttgcaacacaatgtttccaactctctaacatgtttaaccctcaaacagaagaagaagttggatgggataccgagattaaggatgatgtgattgaagaatgtaataaacatggaggagttattcatatttatgttgacaaaaattcagctcagggcaatgtgtatgtgaagtgcccatcaattgctgcagctattgctgctgtcaatgcattgcatggcaggtggtttgctggtaaaatgataacagcagcatatgtacctcttccaacttaccacaacctgtttcctgattctatgacagcaacacagctactggttccaagtagacgatgaaggaagatatagtcccttatgtatatagctttttttctttcttgagaattcatcttgagttatcttttatttagataaaaataaagaggcaaggatctactgtcatttgtatgcaatttcctgttaccttgaaaaaataaaaatgttaacaggaatgcagtgtgctcattctccctaaatagtaaatcccactgtatacaaaactgttctcttgttctgccttttaaaatgttcatgtagaaaattaatgaactataggaatagctctaggagaacaaatgtgctttctgtaaaaaggcagaccagggatgtaatgtttttaatgtttcagaagcctaactttttacacagtggttacatttcacatttcactaatgttgatatttggctgatggttgagcagtttctgaaatacacatttagtgtatggaaatacaagacagctaaagggctgtttggttagcatctcatcttgcattctgatcaattggcaagaaagggagatttcaaaattatatttcttgatggtatcttttcaattaatgtatctgtaaaagtttctttgtaaatactatgtgttctggtgtgtcttaaaattccaaacaaaatgatccctgcatttcctgaagatgtttaaacgtgagagtctggtaggcaaagcagtctgagaaagaaataggaaatgcagaaataggttttgtctggttgcatataatctttgctctttttaagctctgtgagctctgaaatatatttttgggttacttcagtgtgtttgacaagacagcttgatatttctatcaaacaaatgactttcatattgcaacaatctttgtaagaaccactcaaataaaagtctcttaaaaaggc

SEQ ID NO: 299488 - DNA, 4284 bp, Homo sapiens
  misc_feature (27)..(27): n is a, c, g, or t
  misc_feature (34)..(34): n is a, c, g, or t
  misc_feature (47)..(47): n is a, c, g, or t
  misc_feature (56)..(56): n is a, c, g, or t
cagtcgacttactgcgcctacacctanattgaanacaccgctttgcntcagtatanaaaacggcaagtgtacgtcgatacggagcttgtcgacgctgtcgcaggggtggatcctgagctgccgaagccgccgtcctgctctcccgcgtgggcttctctaattccattgttttttttagattctctcgggcctagccgtccttggaacccgatattcgggctgggcggttccgcggcctgggcctaggggcttaacagtagcaacagaagcggcggcggcggcagcagcagcagcagcagcagcaatctcttcccgaacacgagcaccacaggcgcccgaaggccggaacagacttgcctaacgatatctcacctctactcccatgaattcacctttgattccagtgtgaactgtcaatcataaggtagtaattgagtgacttatcgctgtaccgtggtcccctaggtaaaatgactcaactaagaattaccacctccagtttggtatagcaaaaaggtgaatgtagtggtttgggaaaaagcaggggtccaagaataacaaagcatgaccagtctgtggcaagttaaatcttctaatagtcttataagaagaaatgggtgagattttaaaatttatgtatctatgtaagactggtgatagtaaatcttaaaacagtccagtggcaatctgctgctcagttaataattactaaaattcttggatccctgaatagaaattaaaaaaaaaaatacaagaggcagtagagtcaatacaagcttaatacaagcttagagtaaatacaagcttagagtcacttgatgactgttttactgttctccatattgtttttatttttaattaggccctaccatagtatttcacactaaaaacaaaggaattatattggctaatatagtctttgactcatttcggtatctcagtaaaagtaaactgtcttttcattgtttcaccagttggtggtgaaaatagcagtatgcatgcattatcactggtgtcacaaactgtaagctttgtaagttagcactttactcctatagctgatgtaatcaaacttttaaacatttcactaaaccttttaatgaattcttgatagatttaaatagtgtatgtaattttgtaatgcttagactcttgaagagctactttctgttttaatgttaagattcttgtgtcttagttttttttaacatggatgtaattccatgtaaacaggtatggaagtaggaaatgtttaggctggacttggtggattattaattgactttcttgggttcttgggagtcaacattactaaagcagtgtgaatccctgtttgcttcagggcgagatgtgtgacagaggtggcatcaagctcttacagtcccaaccctccaacggaaatgggcgaagatctcaggaatggcatcggtcacaggaaatcgatagtggctggctgctagcatggccacttggggcttaggcagaaatagagccatggtactgaccaaagggaccatagcacatggaataaaactcaaaacaggacttcatgttttatggaaattatatttaaccacttcaacattgtaaatctggataacttttaatatctaaactatataagaaagtaaaatttaacatgttaatatggaaaatttttttatttttgtatcttgatgacttaaatgtaagcaacaaagtggttaaacacatacccatctaaatttttttatagccttccatgttaaactataagtaaataattagttttaaaattgttttgtattttcttattcctgttccctttaccctttgacaacttgaaatgttaccacttcgtcctcatgatgttcttctatcaaccctgcttaggatgagaacaagttgagcagtgccaacggccatgaagaacgtagcaaaaagaggaaaaaaagcaagagcagaagtcgtagtcatgaacgaaagagaagcaaaagtaaggaacggaagcgaagtagagacagagaaaggaaaaagagcaaaagccgtgaaagaaagcgaagtagaagcaaagagaggcgacggagccgctcaagaagtcgagatcgaagatttagaggccgctacagaagtccttactccggaccaaaatttaacagtgccatccgaggaaagattgggttgcctcatagcatcaaattaagcagacgacgttcccgaagcaaaagtccattcagaaaagacaagagccctgtgagagaacctattgataatttaactcctgaggaaagagatgcaaggacagtcttctgtatgcagctggcggcaagaattcgaccaagggatttggaagagtttttctctacagtaggaaaggttcgagatgtgaggatgatttctgacagaaattcaagacgttccaaaggaattgcttatgtggagttcgtcgatgttagctcagtgcctctagcaataggattaactggccaacgagttttaggcgtgccaatcatagtacaggcatcacaggcagaaaaaaacagagctgcagcaatggcaaacaatttacaaaagggaagtgctggacctatgaggctttatgtgggctcattacacttcaacataactgaagatatgcttcgtgggatctttgagccttttggaagaattgaaagtatccagctgatgatggacagtgaaactggtcgatccaagggatatggatttattacattttctgactcagaatgtgccaaaaaggctttggaacaacttaatggatttgaactagcaggaagaccaatgaaagttggtcatgttactgaacgtactgatgcttcgagtgctagttcatttttggacagtgatgaactggaaaggactggaattgatttgggaacaactggtcgtcttcagttaatggcaagacttgcagagggtacaggtttgcagattccgccagcagcacagcaagctctacagatgagtggctctttggcatttggtgctgtggcagaattctcttttgttatagatttgcaaacaagactttcccagcagactgaagcttcagctttagctgcagctgcctctgttcagccacttgcaacacaatgtttccaactctctaacatgtttaaccctcaaacagaagaagaagttggatgggataccgagattaaggatgatgtgattgaagaatgtaataaacatggaggagttattcatatttatgttgacaaaaattcagctcagggcaatgtgtatgtgaagtgcccatcaattgctgcagctattgctgctgtcaatgcattgcatggcaggtggtttgctggtaaaatgataacagcagcatatgtacctcttccaacttaccacaacctgtttcctgattctatgacagcaacacagctactggttccaagtagacgatgaaggaagatatagtcccttatgtatatagctttttttctttcttgagaattcatcttgagttatcttttatttagataaaaataaagaggcaaggatctactgtcatttgtatgcaatttcctgttaccttgaaaaaataaaaatgttaacaggaatgcagtgtgctcattctccctaaatagtaaatcccactgtatacaaaactgttctcttgttctgccttttaaaatgttcatgtagaaaattaatgaactataggaatagctctaggagaacaaatgtgctttctgtaaaaaggcagaccagggatgtaatgtttttaatgtttcagaagcctaactttttacacagtggttacatttcacatttcactaatgttgatatttggctgatggttgagcagtttctgaaatacacatttagtgtatggaaatacaagacagctaaagggctgtttggttagcatctcatcttgcattctgatcaattggcaagaaagggagatttcaaaattatatttcttgatggtatcttttcaattaatgtatctgtaaaagtttctttgtaaatactatgtgttctggtgtgtcttaaaattccaaacaaaatgatccctgcatttcctgaagatgtttaaacgtgagagtctggtaggcaaagcagtctgagaaagaaataggaaatgcagaaataggttttgtctggttgcatataatctttgctctttttaagctctgtgagctctgaaatatatttttgggttacttcagtgtgtttgacaagacagcttgatatttctatcaaacaaatgactttcatattgcaacaatctttgtaagaaccactcaaataaaagtctcttaaaaaggc

SEQ ID NO: 299489 - DNA, 3430 bp, Homo sapiens
  misc_feature (27)..(27): n is a, c, g, or t
  misc_feature (34)..(34): n is a, c, g, or t
  misc_feature (47)..(47): n is a, c, g, or t
  misc_feature (56)..(56): n is a, c, g, or t
cagtcgacttactgcgcctacacctanattgaanacaccgctttgcntcagtatanaaaacggcaagtgtacgtcgatacggagcttgtcgacgctgtcgcaggggtggatcctgagctgccgaagccgccgtcctgctctcccgcgtgggcttctctaattccattgttttttttagattctctcgggcctagccgtccttggaacccgatattcgggctgggcggttccgcggcctgggcctaggggcttaacagtagcaacagaagcggcggcggcggcagcagcagcagcagcagcagcaatctcttcccgaacacgagcaccacaggcgcccgaaggccggaacaggcgtttagagaaaatggcagacgatattgatattgaagcaatgcttgaggctccttacaagaagacttgcctaacgatatctcacctctactcccatgaattcacctttgattccagtgtgaactgtcaatcataagggcgagatgtgtgacagaggtggcatcaagctcttacagtcccaaccctccaacggaaatgggcgaagatctcaggaatggcatcggtcacaggaaatcgatagtggctggctgctagcatggccacttggggcttaggcagaaatagagccatggtactgaccaaagggaccatagcacatggaataaaactcaaaacaggacttcatgttttatggaaattatatttaaccacttcaacattgtaaatctggataacttttaatatctaaactatataagaaagtaaaatttaacatgttaatatggaaaatttttttatttttgtatcttgatgacttaaatgtaagcaacaaagtggttaaacacatacccatctaaatttttttatagccttccatgttaaactataagtaaataattagttttaaaattgttttgtattttcttattcctgttccctttaccctttgacaacttgaaatgttaccacttcgtcctcatgatgttcttctatcaaccctgcttaggatgagaacaagttgagcagtgccaacggccatgaagaacgtagcaaaaagaggaaaaaaagcaagagcagaagtcgtagtcatgaacgaaagagaagcaaaagtaaggaacggaagcgaagtagagacagagaaaggaaaaagagcaaaagccgtgaaagaaagcgaagtagaagcaaagagaggcgacggagccgctcaagaagtcgagatcgaagatttagaggccgctacagaagtccttactccggaccaaaatttaacagtgccatccgaggaaagattgggttgcctcatagcatcaaattaagcagacgacgttcccgaagcaaaagtccattcagaaaagacaagagccctgtgagagaacctattgataatttaactcctgaggaaagagatgcaaggacagtcttctgtatgcagctggcggcaagaattcgaccaagggatttggaagagtttttctctacagtaggaaaggttcgagatgtgaggatgatttctgacagaaattcaagacgttccaaaggaattgcttatgtggagttcgtcgatgttagctcagtgcctctagcaataggattaactggccaacgagttttaggcgtgccaatcatagtacaggcatcacaggcagaaaaaaacagagctgcagcaatggcaaacaatttacaaaagggaagtgctggacctatgaggctttatgtgggctcattacacttcaacataactgaagatatgcttcgtgggatctttgagccttttggaagaattgaaagtatccagctgatgatggacagtgaaactggtcgatccaagggatatggatttattacattttctgactcagaatgtgccaaaaaggctttggaacaacttaatggatttgaactagcaggaagaccaatgaaagttggtcatgttactgaacgtactgatgcttcgagtgctagttcatttttggacagtgatgaactggaaaggactggaattgatttgggaacaactggtcgtcttcagttaatggcaagacttgcagagggtacaggtttgcagattccgccagcagcacagcaagctctacagatgagtggctctttggcatttggtgctgtggcagaattctcttttgttatagatttgcaaacaagactttcccagcagactgaagcttcagctttagctgcagctgcctctgttcagccacttgcaacacaatgtttccaactctctaacatgtttaaccctcaaacagaagaagaagttggatgggataccgagattaaggatgatgtgattgaagaatgtaataaacatggaggagttattcatatttatgttgacaaaaattcagctcagggcaatgtgtatgtgaagtgcccatcaattgctgcagctattgctgctgtcaatgcattgcatggcaggtggtttgctggtaaaatgataacagcagcatatgtacctcttccaacttaccacaacctgtttcctgattctatgacagcaacacagctactggttccaagtagacgatgaaggaagatatagtcccttatgtatatagctttttttctttcttgagaattcatcttgagttatcttttatttagataaaaataaagaggcaaggatctactgtcatttgtatgcaatttcctgttaccttgaaaaaataaaaatgttaacaggaatgcagtgtgctcattctccctaaatagtaaatcccactgtatacaaaactgttctcttgttctgccttttaaaatgttcatgtagaaaattaatgaactataggaatagctctaggagaacaaatgtgctttctgtaaaaaggcagaccagggatgtaatgtttttaatgtttcagaagcctaactttttacacagtggttacatttcacatttcactaatgttgatatttggctgatggttgagcagtttctgaaatacacatttagtgtatggaaatacaagacagctaaagggctgtttggttagcatctcatcttgcattctgatcaattggcaagaaagggagatttcaaaattatatttcttgatggtatcttttcaattaatgtatctgtaaaagtttctttgtaaatactatgtgttctggtgtgtcttaaaattccaaacaaaatgatccctgcatttcctgaagatgtttaaacgtgagagtctggtaggcaaagcagtctgagaaagaaataggaaatgcagaaataggttttgtctggttgcatataatctttgctctttttaagctctgtgagctctgaaatatatttttgggttacttcagtgtgtttgacaagacagcttgatatttctatcaaacaaatgactttcatattgcaacaatctttgtaagaaccactcaaataaaagtctcttaaaaaggc

SEQ ID NO: 299490 - DNA, 5244 bp, Homo sapiens
  misc_feature (27)..(27): n is a, c, g, or t
  misc_feature (34)..(34): n is a, c, g, or t
  misc_feature (47)..(47): n is a, c, g, or t
  misc_feature (56)..(56): n is a, c, g, or t
cagtcgacttactgcgcctacacctanattgaanacaccgctttgcntcagtatanaaaacggcaagtgtacgtcgatacggagcttgtcgacgctgtcgcaggggtggatcctgagctgccgaagccgccgtcctgctctcccgcgtgggcttctctaattccattgttttttttagattctctcgggcctagccgtccttggaacccgatattcgggctgggcggttccgcggcctgggcctaggggcttaacagtagcaacagaagcggcggcggcggcagcagcagcagcagcagcagcaatctcttcccgaacacgagcaccacaggcgcccgaaggccggaacaggcgtttagagaaaatggcagacgatattgatattgaagcaatgcttgaggctccttacaagaagacttgcctaacgatatctcacctctactcccatgaattcacctttgattccagtgtgaactgtcaatcataaggtagtaattgagtgacttatcgctgtaccgtggtcccctaggtaaaatgactcaactaagaattaccacctccagtttggtatagcaaaaaggtgaatgtagtggtttgggaaaaagcaggggtccaagaataacaaagcatgaccagtctgtggcaagttaaatcttctaatagtcttataagaagaaatgggtgagattttaaaatttatgtatctatgtaagactggtgatagtaaatcttaaaacagtccagtggcaatctgctgctcagttaataattactaaaattcttggatccctgaatagaaattaaaaaaaaaaatacaagaggcagtagagtcaatacaagcttaatacaagcttagagtaaatacaagcttagagtcacttgatgactgttttactgttctccatattgtttttatttttaattaggccctaccatagtatttcacactaaaaacaaaggaattatattggctaatatagtctttgactcatttcggtatctcagtaaaagtaaactgtcttttcattgtttcaccagttggtggtgaaaatagcagtatgcatgcattatcactggtgtcacaaactgtaagctttgtaagttagcactttactcctatagctgatgtaatcaaacttttaaacatttcactaaaccttttaatgaattcttgatagatttaaatagtgtatgtaattttgtaatgcttagactcttgaagagctactttctgttttaatgttaagattcttgtgtcttagttttttttaacatggatgtaattccatgtaaacaggtatggaagtaggaaatgtttaggctggacttggtggattattaattgactttcttgggttcttgggagtcaacattactaaagcagtgtgaatccctgtttgcttcagggcgagatgtgtgacagaggtggcatcaagctcttacagtcccaaccctccaacggaaatgggcgaagatctcaggaatggcatcggtcacaggaaatcgatagtggctggctgctagcatggccacttggggcttaggcagaaatagagccatggtactgaccaaagggaccatagcacatggaataaaactcaaaacaggacttcatgttttatggaaattatatttaaccacttcaacattgtaaatctggataacttttaatatctaaactatataagaaagtaaaatttaacatgttaatatggaaaatttttttatttttgtatcttgatgacttaaatgtaagcaacaaagtggttaaacacatacccatctaaatttttttatagccttccatgttaaactataagtaaataattagttttaaaattgttttgtattttcttattcctgttccctttaccctttgacaacttgaaatgttaccacttcgtcctcatgatgttcttctatcaaccctgcttaggatgagaacaagttgagcagtgccaacggccatgaagaacgtagcaaaaaaatactttgcattaaaaatttagatcttcttacatggaagaggtcaaatccagttatagcaaaacacctttactgcagaggccatataaccaaaaagtccaaaggcccagcccagtggaccatttacttcagtgatgttcagtacaaaatttcactgccattaaagactttggaaagtcccttttaagttgtaacaggatttgactattagtgtggatttcgataacccttctttagttaatgtaataaatgctctttgaagctggaaatatactggtttcttgcacccttgtagttttctctgggcttttatgcaaaagattgtattttctgaatgtcttagtatgttgctgtctttttacctgcctggggttgccttcagatgtgggtgaggacttgtttacaaaaagtcctagaagaccttaagttaaaattagctctccaattttcaagtgttttcttttggcagaataagttttgggtcctatgagaggtaaataggttggttgcctctcttgctatagcccatctagagcagaacaaaaactttgtttttgagggggatggagttactttttaccttgttccctaattgaatatatttaggacttttggttttagaaatctcagagttctatagttggaatagtgtcacagagatagtgttaggtttcttaggcaacaaaattggagtgttacctattgcccatctgggcatggctttgatgagttctatataaataatgagtgtagcctaattttctgtcatgtgctacctagcatatacatttctgacagtcaggtggattatcttgaaattttagacaaactttctgcctccttggaaagctctacatctccttgtgattggagtgtgggtttcaagattccagaaggaggaaaaaaagcaagagcagaagtcgtagtcatgaacgaaagagaagcaaaagtaaggaacggaagcgaagtagagacagagaaaggaaaaagagcaaaagccgtgaaagaaagcgaagtagaagcaaagagaggcgacggagccgctcaagaagtcgagatcgaagatttagaggccgctacagaagtccttactccggaccaaaatttaacagtgccatccgaggaaagattgggttgcctcatagcatcaaattaagcagacgacgttcccgaagcaaaagtccattcagaaaagacaagagccctgtgagagaacctattgataatttaactcctgaggaaagagatgcaaggacagtcttctgtatgcagctggcggcaagaattcgaccaagggatttggaagagtttttctctacagtaggaaaggttcgagatgtgaggatgatttctgacagaaattcaagacgttccaaaggaattgcttatgtggagttcgtcgatgttagctcagtgcctctagcaataggattaactggccaacgagttttaggcgtgccaatcatagtacaggcatcacaggcagaaaaaaacagagctgcagcaatggcaaacaatttacaaaagggaagtgctggacctatgaggctttatgtgggctcattacacttcaacataactgaagatatgcttcgtgggatctttgagccttttggaagaattgaaagtatccagctgatgatggacagtgaaactggtcgatccaagggatatggatttattacattttctgactcagaatgtgccaaaaaggctttggaacaacttaatggatttgaactagcaggaagaccaatgaaagttggtcatgttactgaacgtactgatgcttcgagtgctagttcatttttggacagtgatgaactggaaaggactggaattgatttgggaacaactggtcgtcttcagttaatggcaagacttgcagagggtacaggtttgcagattccgccagcagcacagcaagctctacagatgagtggctctttggcatttggtgctgtggcagaattctcttttgttatagatttgcaaacaagactttcccagcagactgaagcttcagctttagctgcagctgcctctgttcagccacttgcaacacaatgtttccaactctctaacatgtttaaccctcaaacagaagaagaagttggatgggataccgagattaaggatgatgtgattgaagaatgtaataaacatggaggagttattcatatttatgttgacaaaaattcagctcagggcaatgtgtatgtgaagtgcccatcaattgctgcagctattgctgctgtcaatgcattgcatggcaggtggtttgctggtaaaatgataacagcagcatatgtacctcttccaacttaccacaacctgtttcctgattctatgacagcaacacagctactggttccaagtagacgatgaaggaagatatagtcccttatgtatatagctttttttctttcttgagaattcatcttgagttatcttttatttagataaaaataaagaggcaaggatctactgtcatttgtatgcaatttcctgttaccttgaaaaaataaaaatgttaacaggaatgcagtgtgctcattctccctaaatagtaaatcccactgtatacaaaactgttctcttgttctgccttttaaaatgttcatgtagaaaattaatgaactataggaatagctctaggagaacaaatgtgctttctgtaaaaaggcagaccagggatgtaatgtttttaatgtttcagaagcctaactttttacacagtggttacatttcacatttcactaatgttgatatttggctgatggttgagcagtttctgaaatacacatttagtgtatggaaatacaagacagctaaagggctgtttggttagcatctcatcttgcattctgatcaattggcaagaaagggagatttcaaaattatatttcttgatggtatcttttcaattaatgtatctgtaaaagtttctttgtaaatactatgtgttctggtgtgtcttaaaattccaaacaaaatgatccctgcatttcctgaagatgtttaaacgtgagagtctggtaggcaaagcagtctgagaaagaaataggaaatgcagaaataggttttgtctggttgcatataatctttgctctttttaagctctgtgagctctgaaatatatttttgggttacttcagtgtgtttgacaagacagcttgatatttctatcaaacaaatgactttcatattgcaacaatctttgtaagaaccactcaaataaaagtctcttaaaaaggc

SEQ ID NO: 299491 - DNA, 4420 bp, Homo sapiens
  misc_feature (27)..(27): n is a, c, g, or t
  misc_feature (34)..(34): n is a, c, g, or t
  misc_feature (47)..(47): n is a, c, g, or t
  misc_feature (56)..(56): n is a, c, g, or t
cagtcgacttactgcgcctacacctanattgaanacaccgctttgcntcagtatanaaaacggcaagtgtacgtcgatacggagcttgtcgacgctgtcgcaggggtggatcctgagctgccgaagccgccgtcctgctctcccgcgtgggcttctctaattccattgttttttttagattctctcgggcctagccgtccttggaacccgatattcgggctgggcggttccgcggcctgggcctaggggcttaacagtagcaacagaagcggcggcggcggcagcagcagcagcagcagcagcaatctcttcccgaacacgagcaccacaggcgcccgaaggccggaacaggcgtttagagaaaatggcagacgatattgatattgaagcaatgcttgaggctccttacaagaagacttgcctaacgatatctcacctctactcccatgaattcacctttgattccagtgtgaactgtcaatcataaggtagtaattgagtgacttatcgctgtaccgtggtcccctaggtaaaatgactcaactaagaattaccacctccagtttggtatagcaaaaaggtgaatgtagtggtttgggaaaaagcaggggtccaagaataacaaagcatgaccagtctgtggcaagttaaatcttctaatagtcttataagaagaaatgggtgagattttaaaatttatgtatctatgtaagactggtgatagtaaatcttaaaacagtccagtggcaatctgctgctcagttaataattactaaaattcttggatccctgaatagaaattaaaaaaaaaaatacaagaggcagtagagtcaatacaagcttaatacaagcttagagtaaatacaagcttagagtcacttgatgactgttttactgttctccatattgtttttatttttaattaggccctaccatagtatttcacactaaaaacaaaggaattatattggctaatatagtctttgactcatttcggtatctcagtaaaagtaaactgtcttttcattgtttcaccagttggtggtgaaaatagcagtatgcatgcattatcactggtgtcacaaactgtaagctttgtaagttagcactttactcctatagctgatgtaatcaaacttttaaacatttcactaaaccttttaatgaattcttgatagatttaaatagtgtatgtaattttgtaatgcttagactcttgaagagctactttctgttttaatgttaagattcttgtgtcttagttttttttaacatggatgtaattccatgtaaacaggtatggaagtaggaaatgtttaggctggacttggtggattattaattgactttcttgggttcttgggagtcaacattactaaagcagtgtgaatccctgtttgcttcagggcgagatgtgtgacagaggtggcatcaagctcttacagtcccaaccctccaacggaaatgggcgaagatctcaggaatggcatcggtcacaggaaatcgatagtggctggctgctagcatggccacttggggcttaggcagaaatagagccatggtactgaccaaagggaccatagcacatggaataaaactcaaaacaggacttcatgttttatggaaattatatttaaccacttcaacattgtaaatctggataacttttaatatctaaactatataagaaagtaaaatttaacatgttaatatggaaaatttttttatttttgtatcttgatgacttaaatgtaagcaacaaagtggttaaacacatacccatctaaatttttttatagccttccatgttaaactataagtaaataattagttttaaaattgttttgtattttcttattcctgttccctttaccctttgacaacttgaaatgttaccacttcgtcctcatgatgttcttctatcaaccctgcttaggatgagaacaagttgagcagtgccaacggccatgaagaacgtagcaaaaaacaaactttctgcctccttggaaagctctacatctccttgtgattggagtgtgggtttcaagattccagaaggaggaaaaaaagcaagagcagaagtcgtagtcatgaacgaaagagaagcaaaagtaaggaacggaagcgaagtagagacagagaaaggaaaaagagcaaaagccgtgaaagaaagcgaagtagaagcaaagagaggcgacggagccgctcaagaagtcgagatcgaagatttagaggccgctacagaagtccttactccggaccaaaatttaacagtgccatccgaggaaagattgggttgcctcatagcatcaaattaagcagacgacgttcccgaagcaaaagtccattcagaaaagacaagagccctgtgagagaacctattgataatttaactcctgaggaaagagatgcaaggacagtcttctgtatgcagctggcggcaagaattcgaccaagggatttggaagagtttttctctacagtaggaaaggttcgagatgtgaggatgatttctgacagaaattcaagacgttccaaaggaattgcttatgtggagttcgtcgatgttagctcagtgcctctagcaataggattaactggccaacgagttttaggcgtgccaatcatagtacaggcatcacaggcagaaaaaaacagagctgcagcaatggcaaacaatttacaaaagggaagtgctggacctatgaggctttatgtgggctcattacacttcaacataactgaagatatgcttcgtgggatctttgagccttttggaagaattgaaagtatccagctgatgatggacagtgaaactggtcgatccaagggatatggatttattacattttctgactcagaatgtgccaaaaaggctttggaacaacttaatggatttgaactagcaggaagaccaatgaaagttggtcatgttactgaacgtactgatgcttcgagtgctagttcatttttggacagtgatgaactggaaaggactggaattgatttgggaacaactggtcgtcttcagttaatggcaagacttgcagagggtacaggtttgcagattccgccagcagcacagcaagctctacagatgagtggctctttggcatttggtgctgtggcagaattctcttttgttatagatttgcaaacaagactttcccagcagactgaagcttcagctttagctgcagctgcctctgttcagccacttgcaacacaatgtttccaactctctaacatgtttaaccctcaaacagaagaagaagttggatgggataccgagattaaggatgatgtgattgaagaatgtaataaacatggaggagttattcatatttatgttgacaaaaattcagctcagggcaatgtgtatgtgaagtgcccatcaattgctgcagctattgctgctgtcaatgcattgcatggcaggtggtttgctggtaaaatgataacagcagcatatgtacctcttccaacttaccacaacctgtttcctgattctatgacagcaacacagctactggttccaagtagacgatgaaggaagatatagtcccttatgtatatagctttttttctttcttgagaattcatcttgagttatcttttatttagataaaaataaagaggcaaggatctactgtcatttgtatgcaatttcctgttaccttgaaaaaataaaaatgttaacaggaatgcagtgtgctcattctccctaaatagtaaatcccactgtatacaaaactgttctcttgttctgccttttaaaatgttcatgtagaaaattaatgaactataggaatagctctaggagaacaaatgtgctttctgtaaaaaggcagaccagggatgtaatgtttttaatgtttcagaagcctaactttttacacagtggttacatttcacatttcactaatgttgatatttggctgatggttgagcagtttctgaaatacacatttagtgtatggaaatacaagacagctaaagggctgtttggttagcatctcatcttgcattctgatcaattggcaagaaagggagatttcaaaattatatttcttgatggtatcttttcaattaatgtatctgtaaaagtttctttgtaaatactatgtgttctggtgtgtcttaaaattccaaacaaaatgatccctgcatttcctgaagatgtttaaacgtgagagtctggtaggcaaagcagtctgagaaagaaataggaaatgcagaaataggttttgtctggttgcatataatctttgctctttttaagctctgtgagctctgaaatatatttttgggttacttcagtgtgtttgacaagacagcttgatatttctatcaaacaaatgactttcatattgcaacaatctttgtaagaaccactcaaataaaagtctcttaaaaaggc

SEQ ID NO: 299492 - DNA, 2900 bp, Homo sapiens
  misc_feature (27)..(27): n is a, c, g, or t
  misc_feature (34)..(34): n is a, c, g, or t
  misc_feature (47)..(47): n is a, c, g, or t
  misc_feature (56)..(56): n is a, c, g, or t
cagtcgacttactgcgcctacacctanattgaanacaccgctttgcntcagtatanaaaacggcaagtgtacgtcgatacggagcttgtcgacgctgtcgcaggggtggatcctgagctgccgaagccgccgtcctgctctcccgcgtgggcttctctaattccattgttttttttagattctctcgggcctagccgtccttggaacccgatattcgggctgggcggttccgcggcctgggcctaggggcttaacagtagcaacagaagcggcggcggcggcagcagcagcagcagcagcagcaatctcttcccgaacacgagcaccacaggcgcccgaaggccggaacaggcgtttagagaaaatggcagacgatattgatattgaagcaatgcttgaggctccttacaagaagacttgcctaacgatatctcacctctactcccatgaattcacctttgattccagtgtgaactgtcaatcataaggatgagaacaagttgagcagtgccaacggccatgaagaacgtagcaaaaagaggaaaaaaagcaagagcagaagtcgtagtcatgaacgaaagagaagcaaaagtaaggaacggaagcgaagtagagacagagaaaggaaaaagagcaaaagccgtgaaagaaagcgaagtagaagcaaagagaggcgacggagccgctcaagaagtcgagatcgaagatttagaggccgctacagaagtccttactccggaccaaaatttaacagtgccatccgaggaaagattgggttgcctcatagcatcaaattaagcagacgacgttcccgaagcaaaagtccattcagaaaagacaagagccctgtgagagaacctattgataatttaactcctgaggaaagagatgcaaggacagtcttctgtatgcagctggcggcaagaattcgaccaagggatttggaagagtttttctctacagtaggaaaggttcgagatgtgaggatgatttctgacagaaattcaagacgttccaaaggaattgcttatgtggagttcgtcgatgttagctcagtgcctctagcaataggattaactggccaacgagttttaggcgtgccaatcatagtacaggcatcacaggcagaaaaaaacagagctgcagcaatggcaaacaatttacaaaagggaagtgctggacctatgaggctttatgtgggctcattacacttcaacataactgaagatatgcttcgtgggatctttgagccttttggaagaattgaaagtatccagctgatgatggacagtgaaactggtcgatccaagggatatggatttattacattttctgactcagaatgtgccaaaaaggctttggaacaacttaatggatttgaactagcaggaagaccaatgaaagttggtcatgttactgaacgtactgatgcttcgagtgctagttcatttttggacagtgatgaactggaaaggactggaattgatttgggaacaactggtcgtcttcagttaatggcaagacttgcagagggtacaggtttgcagattccgccagcagcacagcaagctctacagatgagtggctctttggcatttggtgctgtggcagaattctcttttgttatagatttgcaaacaagactttcccagcagactgaagcttcagctttagctgcagctgcctctgttcagccacttgcaacacaatgtttccaactctctaacatgtttaaccctcaaacagaagaagaagttggatgggataccgagattaaggatgatgtgattgaagaatgtaataaacatggaggagttattcatatttatgttgacaaaaattcagctcagggcaatgtgtatgtgaagtgcccatcaattgctgcagctattgctgctgtcaatgcattgcatggcaggtggtttgctggtaaaatgataacagcagcatatgtacctcttccaacttaccacaacctgtttcctgattctatgacagcaacacagctactggttccaagtagacgatgaaggaagatatagtcccttatgtatatagctttttttctttcttgagaattcatcttgagttatcttttatttagataaaaataaagaggcaaggatctactgtcatttgtatgcaatttcctgttaccttgaaaaaataaaaatgttaacaggaatgcagtgtgctcattctccctaaatagtaaatcccactgtatacaaaactgttctcttgttctgccttttaaaatgttcatgtagaaaattaatgaactataggaatagctctaggagaacaaatgtgctttctgtaaaaaggcagaccagggatgtaatgtttttaatgtttcagaagcctaactttttacacagtggttacatttcacatttcactaatgttgatatttggctgatggttgagcagtttctgaaatacacatttagtgtatggaaatacaagacagctaaagggctgtttggttagcatctcatcttgcattctgatcaattggcaagaaagggagatttcaaaattatatttcttgatggtatcttttcaattaatgtatctgtaaaagtttctttgtaaatactatgtgttctggtgtgtcttaaaattccaaacaaaatgatccctgcatttcctgaagatgtttaaacgtgagagtctggtaggcaaagcagtctgagaaagaaataggaaatgcagaaataggttttgtctggttgcatataatctttgctctttttaagctctgtgagctctgaaatatatttttgggttacttcagtgtgtttgacaagacagcttgatatttctatcaaacaaatgactttcatattgcaacaatctttgtaagaaccactcaaataaaagtctcttaaaaaggc

SEQ ID NO: 299493 - DNA, 3796 bp, Homo sapiens
  misc_feature (27)..(27): n is a, c, g, or t
  misc_feature (34)..(34): n is a, c, g, or t
  misc_feature (47)..(47): n is a, c, g, or t
  misc_feature (56)..(56): n is a, c, g, or t
cagtcgacttactgcgcctacacctanattgaanacaccgctttgcntcagtatanaaaacggcaagtgtacgtcgatacggagcttgtcgacgctgtcgcaggggtggatcctgagctgccgaagccgccgtcctgctctcccgcgtgggcttctctaattccattgttttttttagattctctcgggcctagccgtccttggaacccgatattcgggctgggcggttccgcggcctgggcctaggggcttaacagtagcaacagaagcggcggcggcggcagcagcagcagcagcagcagcaatctcttcccgaacacgagcaccacaggcgcccgaaggccggaacaggcgtttagagaaaatggcagacgatattgatattgaagcaatgcttgaggctccttacaagaagacttgcctaacgatatctcacctctactcccatgaattcacctttgattccagtgtgaactgtcaatcataaggatgagaacaagttgagcagtgccaacggccatgaagaacgtagcaaaaaaatactttgcattaaaaatttagatcttcttacatggaagaggtcaaatccagttatagcaaaacacctttactgcagaggccatataaccaaaaagtccaaaggcccagcccagtggaccatttacttcagtgatgttcagtacaaaatttcactgccattaaagactttggaaagtcccttttaagttgtaacaggatttgactattagtgtggatttcgataacccttctttagttaatgtaataaatgctctttgaagctggaaatatactggtttcttgcacccttgtagttttctctgggcttttatgcaaaagattgtattttctgaatgtcttagtatgttgctgtctttttacctgcctggggttgccttcagatgtgggtgaggacttgtttacaaaaagtcctagaagaccttaagttaaaattagctctccaattttcaagtgttttcttttggcagaataagttttgggtcctatgagaggtaaataggttggttgcctctcttgctatagcccatctagagcagaacaaaaactttgtttttgagggggatggagttactttttaccttgttccctaattgaatatatttaggacttttggttttagaaatctcagagttctatagttggaatagtgtcacagagatagtgttaggtttcttaggcaacaaaattggagtgttacctattgcccatctgggcatggctttgatgagttctatataaataatgagtgtagcctaattttctgtcatgtgctacctagcatatacatttctgacagtcaggtggattatcttgaaattttagacaaactttctgcctccttggaaagctctacatctccttgtgattggagtgtgggtttcaagattccagaaggaggaaaaaaagcaagagcagaagtcgtagtcatgaacgaaagagaagcaaaagtaaggaacggaagcgaagtagagacagagaaaggaaaaagagcaaaagccgtgaaagaaagcgaagtagaagcaaagagaggcgacggagccgctcaagaagtcgagatcgaagatttagaggccgctacagaagtccttactccggaccaaaatttaacagtgccatccgaggaaagattgggttgcctcatagcatcaaattaagcagacgacgttcccgaagcaaaagtccattcagaaaagacaagagccctgtgagagaacctattgataatttaactcctgaggaaagagatgcaaggacagtcttctgtatgcagctggcggcaagaattcgaccaagggatttggaagagtttttctctacagtaggaaaggttcgagatgtgaggatgatttctgacagaaattcaagacgttccaaaggaattgcttatgtggagttcgtcgatgttagctcagtgcctctagcaataggattaactggccaacgagttttaggcgtgccaatcatagtacaggcatcacaggcagaaaaaaacagagctgcagcaatggcaaacaatttacaaaagggaagtgctggacctatgaggctttatgtgggctcattacacttcaacataactgaagatatgcttcgtgggatctttgagccttttggaagaattgaaagtatccagctgatgatggacagtgaaactggtcgatccaagggatatggatttattacattttctgactcagaatgtgccaaaaaggctttggaacaacttaatggatttgaactagcaggaagaccaatgaaagttggtcatgttactgaacgtactgatgcttcgagtgctagttcatttttggacagtgatgaactggaaaggactggaattgatttgggaacaactggtcgtcttcagttaatggcaagacttgcagagggtacaggtttgcagattccgccagcagcacagcaagctctacagatgagtggctctttggcatttggtgctgtggcagaattctcttttgttatagatttgcaaacaagactttcccagcagactgaagcttcagctttagctgcagctgcctctgttcagccacttgcaacacaatgtttccaactctctaacatgtttaaccctcaaacagaagaagaagttggatgggataccgagattaaggatgatgtgattgaagaatgtaataaacatggaggagttattcatatttatgttgacaaaaattcagctcagggcaatgtgtatgtgaagtgcccatcaattgctgcagctattgctgctgtcaatgcattgcatggcaggtggtttgctggtaaaatgataacagcagcatatgtacctcttccaacttaccacaacctgtttcctgattctatgacagcaacacagctactggttccaagtagacgatgaaggaagatatagtcccttatgtatatagctttttttctttcttgagaattcatcttgagttatcttttatttagataaaaataaagaggcaaggatctactgtcatttgtatgcaatttcctgttaccttgaaaaaataaaaatgttaacaggaatgcagtgtgctcattctccctaaatagtaaatcccactgtatacaaaactgttctcttgttctgccttttaaaatgttcatgtagaaaattaatgaactataggaatagctctaggagaacaaatgtgctttctgtaaaaaggcagaccagggatgtaatgtttttaatgtttcagaagcctaactttttacacagtggttacatttcacatttcactaatgttgatatttggctgatggttgagcagtttctgaaatacacatttagtgtatggaaatacaagacagctaaagggctgtttggttagcatctcatcttgcattctgatcaattggcaagaaagggagatttcaaaattatatttcttgatggtatcttttcaattaatgtatctgtaaaagtttctttgtaaatactatgtgttctggtgtgtcttaaaattccaaacaaaatgatccctgcatttcctgaagatgtttaaacgtgagagtctggtaggcaaagcagtctgagaaagaaataggaaatgcagaaataggttttgtctggttgcatataatctttgctctttttaagctctgtgagctctgaaatatatttttgggttacttcagtgtgtttgacaagacagcttgatatttctatcaaacaaatgactttcatattgcaacaatctttgtaagaaccactcaaataaaagtctcttaaaaaggc

SEQ ID NO: 299494 - DNA, 3723 bp, Homo sapiens
  misc_feature (27)..(27): n is a, c, g, or t
  misc_feature (34)..(34): n is a, c, g, or t
  misc_feature (47)..(47): n is a, c, g, or t
  misc_feature (56)..(56): n is a, c, g, or t
cagtcgacttactgcgcctacacctanattgaanacaccgctttgcntcagtatanaaaacggcaagtgtacgtcgatacggagcttgtcgacgctgtcgcaggggtggatcctgagctgccgaagccgccgtcctgctctcccgcgtgggcttctctaattccattgttttttttagattctctcgggcctagccgtccttggaacccgatattcgggctgggcggttccgcggcctgggcctaggggcttaacagtagcaacagaagcggcggcggcggcagcagcagcagcagcagcagcaatctcttcccgaacacgagcaccacaggcgcccgaaggccggaacaggcgtttagagaaaatggcagacgatattgatattgaagcaatgcttgaggctccttacaagaaggatgagaacaagttgagcagtgccaacggccatgaagaacgtagcaaaaaaatactttgcattaaaaatttagatcttcttacatggaagaggtcaaatccagttatagcaaaacacctttactgcagaggccatataaccaaaaagtccaaaggcccagcccagtggaccatttacttcagtgatgttcagtacaaaatttcactgccattaaagactttggaaagtcccttttaagttgtaacaggatttgactattagtgtggatttcgataacccttctttagttaatgtaataaatgctctttgaagctggaaatatactggtttcttgcacccttgtagttttctctgggcttttatgcaaaagattgtattttctgaatgtcttagtatgttgctgtctttttacctgcctggggttgccttcagatgtgggtgaggacttgtttacaaaaagtcctagaagaccttaagttaaaattagctctccaattttcaagtgttttcttttggcagaataagttttgggtcctatgagaggtaaataggttggttgcctctcttgctatagcccatctagagcagaacaaaaactttgtttttgagggggatggagttactttttaccttgttccctaattgaatatatttaggacttttggttttagaaatctcagagttctatagttggaatagtgtcacagagatagtgttaggtttcttaggcaacaaaattggagtgttacctattgcccatctgggcatggctttgatgagttctatataaataatgagtgtagcctaattttctgtcatgtgctacctagcatatacatttctgacagtcaggtggattatcttgaaattttagacaaactttctgcctccttggaaagctctacatctccttgtgattggagtgtgggtttcaagattccagaaggaggaaaaaaagcaagagcagaagtcgtagtcatgaacgaaagagaagcaaaagtaaggaacggaagcgaagtagagacagagaaaggaaaaagagcaaaagccgtgaaagaaagcgaagtagaagcaaagagaggcgacggagccgctcaagaagtcgagatcgaagatttagaggccgctacagaagtccttactccggaccaaaatttaacagtgccatccgaggaaagattgggttgcctcatagcatcaaattaagcagacgacgttcccgaagcaaaagtccattcagaaaagacaagagccctgtgagagaacctattgataatttaactcctgaggaaagagatgcaaggacagtcttctgtatgcagctggcggcaagaattcgaccaagggatttggaagagtttttctctacagtaggaaaggttcgagatgtgaggatgatttctgacagaaattcaagacgttccaaaggaattgcttatgtggagttcgtcgatgttagctcagtgcctctagcaataggattaactggccaacgagttttaggcgtgccaatcatagtacaggcatcacaggcagaaaaaaacagagctgcagcaatggcaaacaatttacaaaagggaagtgctggacctatgaggctttatgtgggctcattacacttcaacataactgaagatatgcttcgtgggatctttgagccttttggaagaattgaaagtatccagctgatgatggacagtgaaactggtcgatccaagggatatggatttattacattttctgactcagaatgtgccaaaaaggctttggaacaacttaatggatttgaactagcaggaagaccaatgaaagttggtcatgttactgaacgtactgatgcttcgagtgctagttcatttttggacagtgatgaactggaaaggactggaattgatttgggaacaactggtcgtcttcagttaatggcaagacttgcagagggtacaggtttgcagattccgccagcagcacagcaagctctacagatgagtggctctttggcatttggtgctgtggcagaattctcttttgttatagatttgcaaacaagactttcccagcagactgaagcttcagctttagctgcagctgcctctgttcagccacttgcaacacaatgtttccaactctctaacatgtttaaccctcaaacagaagaagaagttggatgggataccgagattaaggatgatgtgattgaagaatgtaataaacatggaggagttattcatatttatgttgacaaaaattcagctcagggcaatgtgtatgtgaagtgcccatcaattgctgcagctattgctgctgtcaatgcattgcatggcaggtggtttgctggtaaaatgataacagcagcatatgtacctcttccaacttaccacaacctgtttcctgattctatgacagcaacacagctactggttccaagtagacgatgaaggaagatatagtcccttatgtatatagctttttttctttcttgagaattcatcttgagttatcttttatttagataaaaataaagaggcaaggatctactgtcatttgtatgcaatttcctgttaccttgaaaaaataaaaatgttaacaggaatgcagtgtgctcattctccctaaatagtaaatcccactgtatacaaaactgttctcttgttctgccttttaaaatgttcatgtagaaaattaatgaactataggaatagctctaggagaacaaatgtgctttctgtaaaaaggcagaccagggatgtaatgtttttaatgtttcagaagcctaactttttacacagtggttacatttcacatttcactaatgttgatatttggctgatggttgagcagtttctgaaatacacatttagtgtatggaaatacaagacagctaaagggctgtttggttagcatctcatcttgcattctgatcaattggcaagaaagggagatttcaaaattatatttcttgatggtatcttttcaattaatgtatctgtaaaagtttctttgtaaatactatgtgttctggtgtgtcttaaaattccaaacaaaatgatccctgcatttcctgaagatgtttaaacgtgagagtctggtaggcaaagcagtctgagaaagaaataggaaatgcagaaataggttttgtctggttgcatataatctttgctctttttaagctctgtgagctctgaaatatatttttgggttacttcagtgtgtttgacaagacagcttgatatttctatcaaacaaatgactttcatattgcaacaatctttgtaagaaccactcaaataaaagtctcttaaaaaggc

SEQ ID NO: 299495 - DNA, 4294 bp, Homo sapiens
  misc_feature (27)..(27): n is a, c, g, or t
  misc_feature (34)..(34): n is a, c, g, or t
  misc_feature (47)..(47): n is a, c, g, or t
  misc_feature (56)..(56): n is a, c, g, or t
cagtcgacttactgcgcctacacctanattgaanacaccgctttgcntcagtatanaaaacggcaagtgtacgtcgatacggagcttgtcgacgctgtcgcaggggtggatcctgagctgccgaagccgccgtcctgctctcccgcgtgggcttctctaattccattgttttttttagattctctcgggcctagccgtccttggaacccgatattcgggctgggcggttccgcggcctgggcctaggggcttaacagtagcaacagaagcggcggcggcggcagcagcagcagcagcagcagcaatctcttcccgaacacgagcaccacaggcgcccgaaggccggaacaggcgtttagagaaaatggcagacgatattgatattgaagcaatgcttgaggctccttacaagaagacttgcctaacgatatctcacctctactcccatgaattcacctttgattccagtgtgaactgtcaatcataaggtagtaattgagtgacttatcgctgtaccgtggtcccctaggtaaaatgactcaactaagaattaccacctccagtttggtatagcaaaaaggtgaatgtagtggtttgggaaaaagcaggggtccaagaataacaaagcatgaccagtctgtggcaagttaaatcttctaatagtcttataagaagaaatgggtgagattttaaaatttatgtatctatgtaagactggtgatagtaaatcttaaaacagtccagtggcaatctgctgctcagttaataattactaaaattcttggatccctgaatagaaattaaaaaaaaaaatacaagaggcagtagagtcaatacaagcttaatacaagcttagagtaaatacaagcttagagtcacttgatgactgttttactgttctccatattgtttttatttttaattaggccctaccatagtatttcacactaaaaacaaaggaattatattggctaatatagtctttgactcatttcggtatctcagtaaaagtaaactgtcttttcattgtttcaccagttggtggtgaaaatagcagtatgcatgcattatcactggtgtcacaaactgtaagctttgtaagttagcactttactcctatagctgatgtaatcaaacttttaaacatttcactaaaccttttaatgaattcttgatagatttaaatagtgtatgtaattttgtaatgcttagactcttgaagagctactttctgttttaatgttaagattcttgtgtcttagttttttttaacatggatgtaattccatgtaaacaggtatggaagtaggaaatgtttaggctggacttggtggattattaattgactttcttgggttcttgggagtcaacattactaaagcagtgtgaatccctgtttgcttcagggcgagatgtgtgacagaggtggcatcaagctcttacagtcccaaccctccaacggaaatgggcgaagatctcaggaatggcatcggtcacaggaaatcgatagtggctggctgctagcatggccacttggggcttaggcagaaatagagccatggtactgaccaaagggaccatagcacatggaataaaactcaaaacaggacttcatgttttatggaaattatatttaaccacttcaacattgtaaatctggataacttttaatatctaaactatataagaaagtaaaatttaacatgttaatatggaaaatttttttatttttgtatcttgatgacttaaatgtaagcaacaaagtggttaaacacatacccatctaaatttttttatagccttccatgttaaactataagtaaataattagttttaaaattgttttgtattttcttattcctgttccctttaccctttgacaacttgaaatgttaccacttcgtcctcatgatgttcttctatcaaccctgcttaggatgagaacaagttgagcagtgccaacggccatgaagaacgtagcaaaaagaggaaaaaaagcaagagcagaagtcgtagtcatgaacgaaagagaagcaaaagtaaggaacggaagcgaagtagagacagagaaaggaaaaagagcaaaagccgtgaaagaaagcgaagtagaagcaaagagaggcgacggagccgctcaagaagtcgagatcgaagatttagaggccgctacagaagtccttactccggaccaaaatttaacagtgccatccgaggaaagattgggttgcctcatagcatcaaattaagcagacgacgttcccgaagcaaaagtccattcagaaaagacaagagccctgtgagagaacctattgataatttaactcctgaggaaagagatgcaaggacagtcttctgtatgcagctggcggcaagaattcgaccaagggatttggaagagtttttctctacagtaggaaaggttcgagatgtgaggatgatttctgacagaaattcaagacgttccaaaggaattgcttatgtggagttcgtcgatgttagctcagtgcctctagcaataggattaactggccaacgagttttaggcgtgccaatcatagtacaggcatcacaggcagaaaaaaacagagctgcagcaatggcaaacaatttacaaaagggaagtgctggacctatgaggctttatgtgggctcattacacttcaacataactgaagatatgcttcgtgggatctttgagccttttggaagaattgaaagtatccagctgatgatggacagtgaaactggtcgatccaagggatatggatttattacattttctgactcagaatgtgccaaaaaggctttggaacaacttaatggatttgaactagcaggaagaccaatgaaagttggtcatgttactgaacgtactgatgcttcgagtgctagttcatttttggacagtgatgaactggaaaggactggaattgatttgggaacaactggtcgtcttcagttaatggcaagacttgcagagggtacaggtttgcagattccgccagcagcacagcaagctctacagatgagtggctctttggcatttggtgctgtggcagaattctcttttgttatagatttgcaaacaagactttcccagcagactgaagcttcagctttagctgcagctgcctctgttcagccacttgcaacacaatgtttccaactctctaacatgtttaaccctcaaacagaagaagaagttggatgggataccgagattaaggatgatgtgattgaagaatgtaataaacatggaggagttattcatatttatgttgacaaaaattcagctcagggcaatgtgtatgtgaagtgcccatcaattgctgcagctattgctgctgtcaatgcattgcatggcaggtggtttgctggtaaaatgataacagcagcatatgtacctcttccaacttaccacaacctgtttcctgattctatgacagcaacacagctactggttccaagtagacgatgaaggaagatatagtcccttatgtatatagctttttttctttcttgagaattcatcttgagttatcttttatttagataaaaataaagaggcaaggatctactgtcatttgtatgcaatttcctgttaccttgaaaaaataaaaatgttaacaggaatgcagtgtgctcattctccctaaatagtaaatcccactgtatacaaaactgttctcttgttctgccttttaaaatgttcatgtagaaaattaatgaactataggaatagctctaggagaacaaatgtgctttctttacacagtggttacatttcacatttcactaatgttgatatttggctgatggttgagcagtttctgaaatacacatttagtgtatggaaatacaagacagctaaagggctgtttggttagcatctcatcttgcattctgatcaattggcaagaaagggagatttcaaaattatatttcttgatggtatcttttcaattaatgtatctgtaaaagtttctttgtaaatactatgtgttctggtgtgtcttaaaattccaaacaaaatgatccctgcatttcctgaagatgtttaaacgtgagagtctggtaggcaaagcagtctgagaaagaaataggaaatgcagaaataggttttgtctggttgcatataatctttgctctttttaagctctgtgagctctgaaatatatttttgggttacttcagtgtgtttgacaagacagcttgatatttctatcaaacaaatgactttcatattgcaacaatctttgtaagaaccactcaaataaaagtctcttaaaaaggc

SEQ ID NO: 299496 - DNA, 2834 bp, Homo sapiens
  misc_feature (27)..(27): n is a, c, g, or t
  misc_feature (34)..(34): n is a, c, g, or t
  misc_feature (47)..(47): n is a, c, g, or t
  misc_feature (56)..(56): n is a, c, g, or t
cagtcgacttactgcgcctacacctanattgaanacaccgctttgcntcagtatanaaaacggcaagtgtacgtcgatacggagcttgtcgacgctgtcgcaggggtggatcctgagctgccgaagccgccgtcctgctctcccgcgtgggcttctctaattccattgttttttttagattctctcgggcctagccgtccttggaacccgatattcgggctgggcggttccgcggcctgggcctaggggcttaacagtagcaacagaagcggcggcggcggcagcagcagcagcagcagcagcaatctcttcccgaacacgagcaccacaggcgcccgaaggccggaacaggcgtttagagaaaatggcagacgatattgatattgaagcaatgcttgaggctccttacaagaagacttgcctaacgatatctcacctctactcccatgaattcacctttgattccagtgtgaactgtcaatcataaggatgagaacaagttgagcagtgccaacggccatgaagaacgtagcaaaaagaggaaaaaaagcaagagcagaagtcgtagtcatgaacgaaagagaagcaaaagtaaggaacggaagcgaagtagagacagagaaaggaaaaagagcaaaagccgtgaaagaaagcgaagtagaagcaaagagaggcgacggagccgctcaagaagtcgagatcgaagatttagaggccgctacagaagtccttacagacgacgttcccgaagcaaaagtccattcagaaaagacaagagccctgtgagagaacctattgataatttaactcctgaggaaagagatgcaaggacagtcttctgtatgcagctggcggcaagaattcgaccaagggatttggaagagtttttctctacagtaggaaaggttcgagatgtgaggatgatttctgacagaaattcaagacgttccaaaggaattgcttatgtggagttcgtcgatgttagctcagtgcctctagcaataggattaactggccaacgagttttaggcgtgccaatcatagtacaggcatcacaggcagaaaaaaacagagctgcagcaatggcaaacaatttacaaaagggaagtgctggacctatgaggctttatgtgggctcattacacttcaacataactgaagatatgcttcgtgggatctttgagccttttggaagaattgaaagtatccagctgatgatggacagtgaaactggtcgatccaagggatatggatttattacattttctgactcagaatgtgccaaaaaggctttggaacaacttaatggatttgaactagcaggaagaccaatgaaagttggtcatgttactgaacgtactgatgcttcgagtgctagttcatttttggacagtgatgaactggaaaggactggaattgatttgggaacaactggtcgtcttcagttaatggcaagacttgcagagggtacaggtttgcagattccgccagcagcacagcaagctctacagatgagtggctctttggcatttggtgctgtggcagaattctcttttgttatagatttgcaaacaagactttcccagcagactgaagcttcagctttagctgcagctgcctctgttcagccacttgcaacacaatgtttccaactctctaacatgtttaaccctcaaacagaagaagaagttggatgggataccgagattaaggatgatgtgattgaagaatgtaataaacatggaggagttattcatatttatgttgacaaaaattcagctcagggcaatgtgtatgtgaagtgcccatcaattgctgcagctattgctgctgtcaatgcattgcatggcaggtggtttgctggtaaaatgataacagcagcatatgtacctcttccaacttaccacaacctgtttcctgattctatgacagcaacacagctactggttccaagtagacgatgaaggaagatatagtcccttatgtatatagctttttttctttcttgagaattcatcttgagttatcttttatttagataaaaataaagaggcaaggatctactgtcatttgtatgcaatttcctgttaccttgaaaaaataaaaatgttaacaggaatgcagtgtgctcattctccctaaatagtaaatcccactgtatacaaaactgttctcttgttctgccttttaaaatgttcatgtagaaaattaatgaactataggaatagctctaggagaacaaatgtgctttctgtaaaaaggcagaccagggatgtaatgtttttaatgtttcagaagcctaactttttacacagtggttacatttcacatttcactaatgttgatatttggctgatggttgagcagtttctgaaatacacatttagtgtatggaaatacaagacagctaaagggctgtttggttagcatctcatcttgcattctgatcaattggcaagaaagggagatttcaaaattatatttcttgatggtatcttttcaattaatgtatctgtaaaagtttctttgtaaatactatgtgttctggtgtgtcttaaaattccaaacaaaatgatccctgcatttcctgaagatgtttaaacgtgagagtctggtaggcaaagcagtctgagaaagaaataggaaatgcagaaataggttttgtctggttgcatataatctttgctctttttaagctctgtgagctctgaaatatatttttgggttacttcagtgtgtttgacaagacagcttgatatttctatcaaacaaatgactttcatattgcaacaatctttgtaagaaccactcaaataaaagtctcttaaaaaggc

SEQ ID NO: 299497 - DNA, 2773 bp, Homo sapiens
  misc_feature (27)..(27): n is a, c, g, or t
  misc_feature (34)..(34): n is a, c, g, or t
  misc_feature (47)..(47): n is a, c, g, or t
  misc_feature (56)..(56): n is a, c, g, or t
cagtcgacttactgcgcctacacctanattgaanacaccgctttgcntcagtatanaaaacggcaagtgtacgtcgatacggagcttgtcgacgctgtcgcaggggtggatcctgagctgccgaagccgccgtcctgctctcccgcgtgggcttctctaattccattgttttttttagattctctcgggcctagccgtccttggaacccgatattcgggctgggcggttccgcggcctgggcctaggggcttaacagtagcaacagaagcggcggcggcggcagcagcagcagcagcagcagcaatctcttcccgaacacgagcaccacaggcgcccgaaggccggaacaggcgtttagagaaaatggcagacgatattgatattgaagcaatgcttgaggctccttacaagaaggatgagaacaagttgagcagtgccaacggccatgaagaacgtagcaaaaataaggaacggaagcgaagtagagacagagaaaggaaaaagagcaaaagccgtgaaagaaagcgaagtagaagcaaagagaggcgacggagccgctcaagaagtcgagatcgaagatttagaggccgctacagaagtccttactccggaccaaaatttaacagtgccatccgaggaaagattgggttgcctcatagcatcaaattaagcagacgacgttcccgaagcaaaagtccattcagaaaagacaagagccctgtgagagaacctattgataatttaactcctgaggaaagagatgcaaggacagtcttctgtatgcagctggcggcaagaattcgaccaagggatttggaagagtttttctctacagtaggaaaggttcgagatgtgaggatgatttctgacagaaattcaagacgttccaaaggaattgcttatgtggagttcgtcgatgttagctcagtgcctctagcaataggattaactggccaacgagttttaggcgtgccaatcatagtacaggcatcacaggcagaaaaaaacagagctgcagcaatggcaaacaatttacaaaagggaagtgctggacctatgaggctttatgtgggctcattacacttcaacataactgaagatatgcttcgtgggatctttgagccttttggaagaattgaaagtatccagctgatgatggacagtgaaactggtcgatccaagggatatggatttattacattttctgactcagaatgtgccaaaaaggctttggaacaacttaatggatttgaactagcaggaagaccaatgaaagttggtcatgttactgaacgtactgatgcttcgagtgctagttcatttttggacagtgatgaactggaaaggactggaattgatttgggaacaactggtcgtcttcagttaatggcaagacttgcagagggtacaggtttgcagattccgccagcagcacagcaagctctacagatgagtggctctttggcatttggtgctgtggcagaattctcttttgttatagatttgcaaacaagactttcccagcagactgaagcttcagctttagctgcagctgcctctgttcagccacttgcaacacaatgtttccaactctctaacatgtttaaccctcaaacagaagaagaagttggatgggataccgagattaaggatgatgtgattgaagaatgtaataaacatggaggagttattcatatttatgttgacaaaaattcagctcagggcaatgtgtatgtgaagtgcccatcaattgctgcagctattgctgctgtcaatgcattgcatggcaggtggtttgctggtaaaatgataacagcagcatatgtacctcttccaacttaccacaacctgtttcctgattctatgacagcaacacagctactggttccaagtagacgatgaaggaagatatagtcccttatgtatatagctttttttctttcttgagaattcatcttgagttatcttttatttagataaaaataaagaggcaaggatctactgtcatttgtatgcaatttcctgttaccttgaaaaaataaaaatgttaacaggaatgcagtgtgctcattctccctaaatagtaaatcccactgtatacaaaactgttctcttgttctgccttttaaaatgttcatgtagaaaattaatgaactataggaatagctctaggagaacaaatgtgctttctgtaaaaaggcagaccagggatgtaatgtttttaatgtttcagaagcctaactttttacacagtggttacatttcacatttcactaatgttgatatttggctgatggttgagcagtttctgaaatacacatttagtgtatggaaatacaagacagctaaagggctgtttggttagcatctcatcttgcattctgatcaattggcaagaaagggagatttcaaaattatatttcttgatggtatcttttcaattaatgtatctgtaaaagtttctttgtaaatactatgtgttctggtgtgtcttaaaattccaaacaaaatgatccctgcatttcctgaagatgtttaaacgtgagagtctggtaggcaaagcagtctgagaaagaaataggaaatgcagaaataggttttgtctggttgcatataatctttgctctttttaagctctgtgagctctgaaatatatttttgggttacttcagtgtgtttgacaagacagcttgatatttctatcaaacaaatgactttcatattgcaacaatctttgtaagaaccactcaaataaaagtctcttaaaaaggc

SEQ ID NO: 299498 - DNA, 4445 bp, Homo sapiens
  misc_feature (27)..(27): n is a, c, g, or t
  misc_feature (34)..(34): n is a, c, g, or t
  misc_feature (47)..(47): n is a, c, g, or t
  misc_feature (56)..(56): n is a, c, g, or t
cagtcgacttactgcgcctacacctanattgaanacaccgctttgcntcagtatanaaaacggcaagtgtacgtcgatacggagcttgtcgacgctgtcgcaggggtggatcctgagctgccgaagccgccgtcctgctctcccgcgtgggcttctctaattccattgttttttttagattctctcgggcctagccgtccttggaacccgatattcgggctgggcggttccgcggcctgggcctaggggcttaacagtagcaacagaagcggcggcggcggcagcagcagcagcagcagcagcaatctcttcccgaacacgagcaccacaggcgcccgaaggccggaacaggcgtttagagaaaatggcagacgatattgatattgaagcaatgcttgaggctccttacaagaagacttgcctaacgatatctcacctctactcccatgaattcacctttgattccagtgtgaactgtcaatcataaggtagtaattgagtgacttatcgctgtaccgtggtcccctaggtaaaatgactcaactaagaattaccacctccagtttggtatagcaaaaaggtgaatgtagtggtttgggaaaaagcaggggtccaagaataacaaagcatgaccagtctgtggcaagttaaatcttctaatagtcttataagaagaaatgggtgagattttaaaatttatgtatctatgtaagactggtgatagtaaatcttaaaacagtccagtggcaatctgctgctcagttaataattactaaaattcttggatccctgaatagaaattaaaaaaaaaaatacaagaggcagtagagtcaatacaagcttaatacaagcttagagtaaatacaagcttagagtcacttgatgactgttttactgttctccatattgtttttatttttaattaggccctaccatagtatttcacactaaaaacaaaggaattatattggctaatatagtctttgactcatttcggtatctcagtaaaagtaaactgtcttttcattgtttcaccagttggtggtgaaaatagcagtatgcatgcattatcactggtgtcacaaactgtaagctttgtaagttagcactttactcctatagctgatgtaatcaaacttttaaacatttcactaaaccttttaatgaattcttgatagatttaaatagtgtatgtaattttgtaatgcttagactcttgaagagctactttctgttttaatgttaagattcttgtgtcttagttttttttaacatggatgtaattccatgtaaacaggtatggaagtaggaaatgtttaggctggacttggtggattattaattgactttcttgggttcttgggagtcaacattactaaagcagtgtgaatccctgtttgcttcagggcgagatgtgtgacagaggtggcatcaagctcttacagtcccaaccctccaacggaaatgggcgaagatctcaggaatggcatcggtcacaggaaatcgatagtggctggctgctagcatggccacttggggcttaggcagaaatagagccatggtactgaccaaagggaccatagcacatggaataaaactcaaaacaggacttcatgttttatggaaattatatttaaccacttcaacattgtaaatctggataacttttaatatctaaactatataagaaagtaaaatttaacatgttaatatggaaaatttttttatttttgtatcttgatgacttaaatgtaagcaacaaagtggttaaacacatacccatctaaatttttttatagccttccatgttaaactataagtaaataattagttttaaaattgttttgtattttcttattcctgttccctttaccctttgacaacttgaaatgttaccacttcgtcctcatgatgttcttctatcaaccctgcttaggatgagaacaagttgagcagtgccaacggccatgaagaacgtagcaaaaagaggaaaaaaagcaagagcagaagtcgtagtcatgaacgaaagagaagcaaaagtaaggaacggaagcgaagtagagacagagaaaggaaaaagagcaaaagccgtgaaagaaagcgaagtagaagcaaagagaggcgacggagccgctcaagaagtcgagatcgaagatttagaggccgctacagaagtccttactccggaccaaaatttaacagtgccatccgaggaaagattgggttgcctcatagcatcaaattaagcagacgacgttcccgaagcaaaagtccattcagaaaagacaagagccctgtgagagaacctattgataatttaactcctgaggaaagagatgcaaggacagtcttctgtatgcagctggcggcaagaattcgaccaagggatttggaagagtttttctctacagtaggaaaggttcgagatgtgaggatgatttctgacagaaattcaagacgttccaaaggaattgcttatgtggagttcgtcgatgttagctcagtgcctctagcaataggattaactggccaacgagttttaggcgtgccaatcatagtacaggcatcacaggcagaaaaaaacagagctgcagcaatggcaaacaatttacaaaagggaagtgctggacctatgaggctttatgtgggctcattacacttcaacataactgaagatatgcttcgtgggatctttgagccttttggaagaattgaaagtatccagctgatgatggacagtgaaactggtcgatccaagggatatggatttattacattttctgactcagaatgtgccaaaaaggctttggaacaacttaatggatttgaactagcaggaagaccaatgaaagttggtcatgttactgaacgtactgatgcttcgagtgctagttcatttttggacagtgatgaactggaaaggactggaattgatttgggaacaactggtcgtcttcagttaatggcaagacttgcagagggtacaggtttgcagattccgccagcagcacagcaagctctacagatgagtggctctttggcatttggtgctgtggcagaattctcttttgttatagatttgcaaacaagactttcccagcagactgaagcttcagctttagctgcagctgcctctgttcagccacttgcaacacaatgtttccaactctctaacatgtttaaccctcaaacagaagaagaagttggatgggataccgagattaaggatgatgtgattgaagaatgtaataaacatggaggagttattcatatttatgttgacaaaaattcagctcagggcaatgtgtatgtgaagtgcccatcaattgctgcagctattgctgctgtcaatgcattgcatggcaggtggtttgctggtaaaatgataacagcagcatatgtacctcttccaacttaccacaacctgtttcctgattctatgacagcaacacagctactggttccaagtagacgatgaaggaagatatagtcccttatgtatatagctttttttctttcttgagaattcatcttgagttatcttttatttagataaaaataaagaggcaaggatctactgtcatttgtatgcaatttcctgttaccttgaaaaaataaaaatgttaacaggaatgcagtgtgctcattctccctaaatagtaaatcccactgtatacaaaactgttctcttgttctgccttttaaaatgttcatgtagaaaattaatgaactataggaatagctctaggagaacaaatgtgctttctgtaaaaaggcagaccagggatgtaatgtttttaatgtttcagaagcctaactttttacacagtggttacatttcacatttcactaatgttgatatttggctgatggttgagcagtttctgaaatacacatttagtgtatggaaatacaagacagctaaagggctgtttggttagcatctcatcttgcattctgatcaattggcaagaaagggagatttcaaaattatatttcttgatggtatcttttcaattaatgtatctgtaaaagtttctttgtaaatactatgtgttctggtgtgtcttaaaattccaaacaaaatgatccctgcatttcctgaagatgtttaaacgtgagagtctggtaggcaaagcagtctgagaaagaaataggaaatgcagaaataggttttgtctggttgcatataatctttgctctttttaagctctgtgagctctgaaatatatttttgggttacttcagtgtgtttgacaagacagcttgatatttctatcaaacaaatgactttcatattgcaacaatctttgtaagaaccactcaaataaaagtctcttaaaaaggcaaagattatatgcaaccagacaaaacctatttctgcatttcctatttctttctcagactgtttgcctaccagactctcacgtttaaacatcttcagg

SEQ ID NO: 299499 - DNA, 4294 bp, Homo sapiens
  misc_feature (27)..(27): n is a, c, g, or t
  misc_feature (34)..(34): n is a, c, g, or t
  misc_feature (47)..(47): n is a, c, g, or t
  misc_feature (56)..(56): n is a, c, g, or t
cagtcgacttactgcgcctacacctanattgaanacaccgctttgcntcagtatanaaaacggcaagtgtacgtcgatacggagcttgtcgacgctgtcgcaggggtggatcctgagctgccgaagccgccgtcctgctctcccgcgtgggcttctctaattccattgttttttttagattctctcgggcctagccgtccttggaacccgatattcgggctgggcggttccgcggcctgggcctaggggcttaacagtagcaacagaagcggcggcggcggcagcagcagcagcagcagcagcaatctcttcccgaacacgagcaccacaggcgcccgaaggccggaacaggcgtttagagaaaatggcagacgatattgatattgaagcaatgcttgaggctccttacaagaagacttgcctaacgatatctcacctctactcccatgaattcacctttgattccagtgtgaactgtcaatcataaggtagtaattgagtgacttatcgctgtaccgtggtcccctaggtaaaatgactcaactaagaattaccacctccagtttggtatagcaaaaaggtgaatgtagtggtttgggaaaaagcaggggtccaagaataacaaagcatgaccagtctgtggcaagttaaatcttctaatagtcttataagaagaaatgggtgagattttaaaatttatgtatctatgtaagactggtgatagtaaatcttaaaacagtccagtggcaatctgctgctcagttaataattactaaaattcttggatccctgaatagaaattaaaaaaaaaaatacaagaggcagtagagtcaatacaagcttaatacaagcttagagtaaatacaagcttagagtcacttgatgactgttttactgttctccatattgtttttatttttaattaggccctaccatagtatttcacactaaaaacaaaggaattatattggctaatatagtctttgactcatttcggtatctcagtaaaagtaaactgtcttttcattgtttcaccagttggtggtgaaaatagcagtatgcatgcattatcactggtgtcacaaactgtaagctttgtaagttagcactttactcctatagctgatgtaatcaaacttttaaacatttcactaaaccttttaatgaattcttgatagatttaaatagtgtatgtaattttgtaatgcttagactcttgaagagctactttctgttttaatgttaagattcttgtgtcttagttttttttaacatggatgtaattccatgtaaacaggtatggaagtaggaaatgtttaggctggacttggtggattattaattgactttcttgggttcttgggagtcaacattactaaagcagtgtgaatccctgtttgcttcagggcgagatgtgtgacagaggtggcatcaagctcttacagtcccaaccctccaacggaaatgggcgaagatctcaggaatggcatcggtcacaggaaatcgatagtggctggctgctagcatggccacttggggcttaggcagaaatagagccatggtactgaccaaagggaccatagcacatggaataaaactcaaaacaggacttcatgttttatggaaattatatttaaccacttcaacattgtaaatctggataacttttaatatctaaactatataagaaagtaaaatttaacatgttaatatggaaaatttttttatttttgtatcttgatgacttaaatgtaagcaacaaagtggttaaacacatacccatctaaatttttttatagccttccatgttaaactataagtaaataattagttttaaaattgttttgtattttcttattcctgttccctttaccctttgacaacttgaaatgttaccacttcgtcctcatgatgttcttctatcaaccctgcttaggatgagaacaagttgagcagtgccaacggccatgaagaacgtagcaaaaagaggaaaaaaagcaagagcagaagtcgtagtcatgaacgaaagagaagcaaaagtaaggaacggaagcgaagtagagacagagaaaggaaaaagagcaaaagccgtgaaagaaagcgaagtagaagcaaagagaggcgacggagccgctcaagaagtcgagatcgaagatttagaggccgctacagaagtccttactccggaccaaaatttaacagtgccatccgaggaaagattgggttgcctcatagcatcaaattaagcagacgacgttcccgaagcaaaagtccattcagaaaagacaagagccctgtgagagaacctattgataatttaactcctgaggaaagagatgcaaggacagtcttctgtatgcagctggcggcaagaattcgaccaagggatttggaagagtttttctctacagtaggaaaggttcgagatgtgaggatgatttctgacagaaattcaagacgttccaaaggaattgcttatgtggagttcgtcgatgttagctcagtgcctctagcaataggattaactggccaacgagttttaggcgtgccaatcatagtacaggcatcacaggcagaaaaaaacagagctgcagcaatggcaaacaatttacaaaagggaagtgctggacctatgaggctttatgtgggctcattacacttcaacataactgaagatatgcttcgtgggatctttgagccttttggaagaattgaaagtatccagctgatgatggacagtgaaactggtcgatccaagggatatggatttattacattttctgactcagaatgtgccaaaaaggctttggaacaacttaatggatttgaactagcaggaagaccaatgaaagttggtcatgttactgaacgtactgatgcttcgagtgctagttcatttttggacagtgatgaactggaaaggactggaattgatttgggaacaactggtcgtcttcagttaatggcaagacttgcagagggtacaggtttgcagattccgccagcagcacagcaagctctacagatgagtggctctttggcatttggtgctgtggcagaattctcttttgttatagatttgcaaacaagactttcccagcagactgaagcttcagctttagctgcagctgcctctgttcagccacttgcaacacaatgtttccaactctctaacatgtttaaccctcaaacagaagaagaagttggatgggataccgagattaaggatgatgtgattgaagaatgtaataaacatggaggagttattcatatttatgttgacaaaaattcagctcagggcaatgtgtatgtgaagtgcccatcaattgctgcagctattgctgctgtcaatgcattgcatggcaggtggtttgctggtaaaatgataacagcagcatatgtacctcttccaacttaccacaacctgtttcctgattctatgacagcaacacagctactggttccaagtagacgatgaaggaagatatagtcccttatgtatatagctttttttctttcttgagaattcatcttgagttatcttttatttagataaaaataaagaggcaaggatctactgtcatttgtatgcaatttcctgttaccttgaaaaaataaaaatgttaacaggaatgcagtgtgctcattctccctaaatagtaaatcccactgtatacaaaactgttctcttgttctgccttttaaaatgttcatgtagaaaattaatgaactataggaatagctctaggagaacaaatgtgctttctgtaaaaaggcagaccagggatgtaatgtttttaatgtttcagaagcctaactttttacacagtggttacatttcacatttcactaatgttgatatttggctgatggttgagcagtttctgcatctcatcttgcattctgatcaattggcaagaaagggagatttcaaaattatatttcttgatggtatcttttcaattaatgtatctgtaaaagtttctttgtaaatactatgtgttctggtgtgtcttaaaattccaaacaaaatgatccctgcatttcctgaagatgtttaaacgtgagagtctggtaggcaaagcagtctgagaaagaaataggaaatgcagaaataggttttgtctggttgcatataatctttgctctttttaagctctgtgagctctgaaatatatttttgggttacttcagtgtgtttgacaagacagcttgatatttctatcaaacaaatgactttcatattgcaacaatctttgtaagaaccactcaaataaaagtctcttaaaaaggc

SEQ ID NO: 299500 - DNA, 4061 bp, Homo sapiens
  misc_feature (27)..(27): n is a, c, g, or t
  misc_feature (34)..(34): n is a, c, g, or t
  misc_feature (47)..(47): n is a, c, g, or t
  misc_feature (56)..(56): n is a, c, g, or t
cagtcgacttactgcgcctacacctanattgaanacaccgctttgcntcagtatanaaaacggcaagtgtacgtcgatacggagcttgtcgacgctgtcgcaggggtggatcctgagctgccgaagccgccgtcctgctctcccgcgtgggcttctctaattccattgttttttttagattctctcgggcctagccgtccttggaacccgatattcgggctgggcggttccgcggcctgggcctaggggcttaacagtagcaacagaagcggcggcggcggcagcagcagcagcagcagcagcaatctcttcccgaacacgagcaccacaggcgcccgaaggccggaacaggcgtttagagaaaatggcagacgatattgatattgaagcaatgcttgaggctccttacaagaagacttgcctaacgatatctcacctctactcccatgaattcacctttgattccagtgtgaactgtcaatcataaggtagtaattgagtgacttatcgctgtaccgtggtcccctaggtaaaatgactcaactaagaattaccacctccagtttggtatagcaaaaaggtgaatgtagtggtttgggaaaaagcaggggtccaagaataacaaagcatgaccagtctgtggcaagttaaatcttctaatagtcttataagaagaaatgggtgagattttaaaatttatgtatctatgtaagactggtgatagtaaatcttaaaacagtccagtggcaatctgctgctcagttaataattactaaaattcttggatccctgaatagaaattaaaaaaaaaaatacaagaggcagtagagtcaatacaagcttaatacaagcttagagtaaatacaagcttagagtcacttgatgactgttttactgttctccatattgtttttatttttaattaggccctaccatagtatttcacactaaaaacaaaggaattatattggctaatatagtctttgactcatttcggtatctcagtaaaagtaaactgtcttttcattgtttcaccagttggtggtgaaaatagcagtatgcatgcattatcactggtgtcacaaactgtaagctttgtaagttagcactttactcctatagctgatgtaatcaaacttttaaacatttcactaaaccttttaatgaattcttgatagatttaaatagtgtatgtaattttgtaatgcttagactcttgaagagctactttctgttttaatgttaagattcttgtgtcttagttttttttaacatggatgtaattccatgtaaacaggtatggaagtaggaaatgtttaggctggacttggtggattattaattgactttcttgggttcttgggagtcaacattactaaagcagtgtgaatccctgtttgcttcagggcgagatgtgtgacagaggtggcatcaagctcttacagtcccaaccctccaacggaaatgggcgaagatctcaggaatggcatcggtcacaggaaatcgatagtggctggctgctagcatggccacttggggcttaggcagaaatagagccatggtactgaccaaagggaccatagcacatggaataaaactcaaaacaggacttcatgttttatggaaattatatttaaccacttcaacattgtaaatctggataacttttaatatctaaactatataagaaagtaaaatttaacatgttaatatggaaaatttttttatttttgtatcttgatgacttaaatgtaagcaacaaagtggttaaacacatacccatctaaatttttttatagccttccatgttaaactataagtaaataattagttttaaaattgttttgtattttcttattcctgttccctttaccctttgacaacttgaaatgttaccacttcgtcctcatgatgttcttctatcaaccctgcttaggatgagaacaagttgagcagtgccaacggccatgaagaacgtagcaaaaagaggaaaaaaagcaagagcagaagtcgtagtcatgaacgaaagagaagcaaaagtaaggaacggaagcgaagtagagacagagaaaggaaaaagagcaaaagccgtgaaagaaagcgaagtagaagcaaagagaggcgacggagccgctcaagaagtcgagatcgaagatttagaggccgctacagaagtccttactccggaccaaaatttaacagtgccatccgaggaaagattgggttgcctcatagcatcaaattaagcagacgacgttcccgaagcaaaagtccattcagaaaagacaagagccctgtgagagaacctattgataatttaactcctgaggaaagagatgcaaggacagtcttctgtatgcagctggcggcaagaattcgaccaagggatttggaagagtttttctctacagtaggaaaggttcgagatgtgaggatgatttctgacagaaattcaagacgttccaaaggaattgcttatgtggagttcgtcgatgttagctcagtgcctctagcaataggattaactggccaacgagttttaggcgtgccaatcatagtacaggcatcacaggcagaaaaaaacagagctgcagcaatggcaaacaatttacaaaagggaagtgctggacctatgaggctttatgtgggctcattacacttcaacataactgaagatatgcttcgtgggatctttgagccttttggaagaattgaaagtatccagctgatgatggacagtgaaactggtcgatccaagggatatggatttattacattttctgactcagaatgtgccaaaaaggctttggaacaacttaatggatttgaactagcaggaagaccaatgaaagttggtcatgttactgaacgtactgatgcttcgagtgctagttcatttttggacagtgatgaactggaaaggactggaattgatttgggaacaactggtcgtcttcagttaatggcaagacttgcagagggtacaggtttgcagattccgccagcagcacagcaagctctacagatgagtggctctttggcatttggtgctgtggcagaattctcttttgttatagatttgcaaacaagactttcccagcagactgaagcttcagctttagctgcagctgcctctgttcagccacttgcaacacaatgtttccaactctctaacatgtttaaccctcaaacagaagaagaagttggatgggataccgagattaaggatgatgtgattgaagaatgtaataaacatggaggagttattcatatttatgttgacaaaaattcagctcagggcaatgtgtatgtgaagtgcccatcaattgctgcagctattgctgctgtcaatgcattgcatggcaggtggtttgctggtaaaatgataacagcagcatatgtacctcttccaacttaccacaacctgtttcctgattctatgacagcaacacagctactggttccaagtagacgatgaaggaagatatagtcccttatgtatatagctttttttctttcttgagaattcatcttgagttatcttttatttagataaaaataaagaggcaaggatctactgtcatttgtatgcaatttcctgttaccttgaaaaaataaaaatgttaacaggaatgcagtgtgctcattctccctaaatagtaaatcccactgtatacaaaactgttctcttgttctgccttttaaaatgttcatgtagaaaattaatgaactataggaatagctctaggagaacaaatgtgctttctgtaaaaaggcagaccagggatgtaatgtttttaatgtttcagaagcctaactttttacacagtggttacatttcacatttcactaatgttgatatttggctgatggttgagcagtttctgaaatacacatttagtgtatggaaatacaagacagctaaagggctgtttggttagcatctcatcttgcattctgatcaattggcaagaaagggagatttcaaaattatattaattgaaaagataccatcaagaaatatacctttgaaatctccctttcttgccaattggtcgacc

SEQ ID NO: 299501 - DNA, 3632 bp, Homo sapiens
  misc_feature (27)..(27): n is a, c, g, or t
  misc_feature (34)..(34): n is a, c, g, or t
  misc_feature (47)..(47): n is a, c, g, or t
  misc_feature (56)..(56): n is a, c, g, or t
cagtcgacttactgcgcctacacctanattgaanacaccgctttgcntcagtatanaaaacggcaagtgtacgtcgatacggagcttgtcgacgctgtcgcaggggtggatcctgagctgccgaagccgccgtcctgctctcccgcgtgggcttctctaattccattgttttttttagattctctcgggcctagccgtccttggaacccgatattcgggctgggcggttccgcggcctgggcctaggggcttaacagtagcaacagaagcggcggcggcggcagcagcagcagcagcagcagcaatctcttcccgaacacgagcaccacaggcgcccgaaggccggaacaggcgtttagagaaaatggcagacgatattgatattgaagcaatgcttgaggctccttacaagaagacttgcctaacgatatctcacctctactcccatgaattcacctttgattccagtgtgaactgtcaatcataaggtagtaattgagtgacttatcgctgtaccgtggtcccctaggtaaaatgactcaactaagaattaccacctccagtttggtatagcaaaaaggtgaatgtagtggtttgggaaaaagcaggggtccaagaataacaaagcatgaccagtctgtggcaagttaaatcttctaatagtcttataagaagaaatgggtgagattttaaaatttatgtatctatgtaagactggtgatagtaaatcttaaaacagtccagtggcaatctgctgctcagttaataattactaaaattcttggatccctgaatagaaattaaaaaaaaaaatacaagaggcagtagagtcaatacaagcttaatacaagcttagagtaaatacaagcttagagtcacttgatgactgttttactgttctccatattgtttttatttttaattaggccctaccatagtatttcacactaaaaacaaaggaattatattggctaatatagtctttgactcatttcggtatctcagtaaaagtaaactgtcttttcattgtttcaccagttggtggtgaaaatagcagtatgcatgcattatcactggtgtcacaaactgtaagctttgtaagttagcactttactcctatagctgatgtaatcaaacttttaaacatttcactaaaccttttaatgaattcttgatagatttaaatagtgtatgtaattttgtaatgcttagactcttgaagagctactttctgttttaatgttaagattcttgtgtcttagttttttttaacatggatgtaattccatgtaaacaggtatggaagtaggaaatgtttaggctggacttggtggattattaattgactttcttgggttcttgggagtcaacattactaaagcagtgtgaatccctgtttgcttcagggcgagatgtgtgacagaggtggcatcaagctcttacagtcccaaccctccaacggaaatgggcgaagatctcaggaatggcatcggtcacaggaaatcgatagtggctggctgctagcatggccacttggggcttaggcagaaatagagccatggtactgaccaaagggaccatagcacatggaataaaactcaaaacaggacttcatgttttatggaaattatatttaaccacttcaacattgtaaatctggataacttttaatatctaaactatataagaaagtaaaatttaacatgttaatatggaaaatttttttatttttgtatcttgatgacttaaatgtaagcaacaaagtggttaaacacatacccatctaaatttttttatagccttccatgttaaactataagtaaataattagttttaaaattgttttgtattttcttattcctgttccctttaccctttgacaacttgaaatgttaccacttcgtcctcatgatgttcttctatcaaccctgcttaggatgagaacaagttgagcagtgccaacggccatgaagaacgtagcaaaaagaggaaaaaaagcaagagcagaagtcgtagtcatgaacgaaagagaagcaaaagtaaggaacggaagcgaagtagagacagagaaaggaaaaagagcaaaagccgtgaaagaaagcgaagtagaagcaaagagaggcgacggagccgctcaagaagtcgagatcgaagatttagaggccgctacagaagtccttactccggaccaaaatttaacagtgccatccgaggaaagattgggttgcctcatagcatcaaattaagcagacgacgttcccgaagcaaaagtccattcagaaaagacaagagccctgtgagagaacctattgataatttaactcctgaggaaagagatgcaaggacagtcttctgtatgcagctggcggcaagaattcgaccaagggatttggaagagtttttctctacagtaggaaaggttcgagatgtgaggatgatttctgacagaaattcaagacgttccaaaggaattgcttatgtggagttcgtcgatgttagctcagtgcctctagcaataggattaactggccaacgagttttaggcgtgccaatcatagtacaggcatcacaggcagaaaaaaacagagctgcagcaatggcaaacaatttacaaaagggaagtgctggacctatgaggctttatgtgggctcattacacttcaacataactgaagatatgcttcgtgggatctttgagccttttggaagaattgaaagtatccagctgatgatggacagtgaaactggtcgatccaagggatatggatttattacattttctgactcagaatgtgccaaaaaggctttggaacaacttaatggatttgaactagcaggaagaccaatgaaagttggtcatgttactgaacgtactgatgcttcgagtgctagttcatttttggacagtgatgaactggaaaggactggaattgatttgggaacaactggtcgtcttcagttaatggcaagacttgcagagggtacaggtttgcagattccgccagcagcacagcaagctctacagatgagtggctctttggcatttggtgctgtggcagaattctcttttgttatagatttgcaaacaagactttcccagcagactgaagcttcagctttagctgcagctgcctctgttcagccacttgcaacacaatgtttccaactctctaacatgtttaaccctcaaacagaagaagaagttggatgggataccgagattaaggatgatgtgattgaagaatgtaataaacatggaggagttattcatatttatgttgacaaaaattcagctcagggcaatgtgtatgtgaagtgcccatcaattgctgcagctattgctgctgtcaatgcattgcatggcaggtggtttgctggtaaaatgataacagcagcatatgtacctcttccaacttaccacaacctgtttcctgattctatgacagcaacacagctactggttccaagtagacgatgaaggaagatatagtcccttatgtatatagctttttttctttcttgagaattcatcttgagttatcttttatttagataaaaataaagaggcaaggatctactgtcatttgtatgcaatttcctgttaccttgaaaaaataaaaatgttaacagga

SEQ ID NO: 299502 - DNA, 3614 bp, Homo sapiens
  misc_feature (27)..(27): n is a, c, g, or t
  misc_feature (34)..(34): n is a, c, g, or t
  misc_feature (47)..(47): n is a, c, g, or t
  misc_feature (56)..(56): n is a, c, g, or t
cagtcgacttactgcgcctacacctanattgaanacaccgctttgcntcagtatanaaaacggcaagtgtacgtcgatacggagcttgtcgacgctgtcgcaggggtggatcctgagctgccgaagccgccgtcctgctctcccgcgtgggcttctctaattccattgttttttttagattctctcgggcctagccgtccttggaacccgatattcgggctgggcggttccgcggcctgggcctaggggcttaacagtagcaacagaagcggcggcggcggcagcagcagcagcagcagcagcaatctcttcccgaacacgagcaccacaggcgcccgaaggccggaacaggcgtttagagaaaatggcagacgatattgatattgaagcaatgcttgaggctccttacaagaagacttgcctaacgatatctcacctctactcccatgaattcacctttgattccagtgtgaactgtcaatcataaggtagtaattgagtgacttatcgctgtaccgtggtcccctaggtaaaatgactcaactaagaattaccacctccagtttggtatagcaaaaaggtgaatgtagtggtttgggaaaaagcaggggtccaagaataacaaagcatgaccagtctgtggcaagttaaatcttctaatagtcttataagaagaaatgggtgagattttaaaatttatgtatctatgtaagactggtgatagtaaatcttaaaacagtccagtggcaatctgctgctcagttaataattactaaaattcttggatccctgaatagaaattaaaaaaaaaaatacaagaggcagtagagtcaatacaagcttaatacaagcttagagtaaatacaagcttagagtcacttgatgactgttttactgttctccatattgtttttatttttaattaggccctaccatagtatttcacactaaaaacaaaggaattatattggctaatatagtctttgactcatttcggtatctcagtaaaagtaaactgtcttttcattgtttcaccagttggtggtgaaaatagcagtatgcatgcattatcactggtgtcacaaactgtaagctttgtaagttagcactttactcctatagctgatgtaatcaaacttttaaacatttcactaaaccttttaatgaattcttgatagatttaaatagtgtatgtaattttgtaatgcttagactcttgaagagctactttctgttttaatgttaagattcttgtgtcttagttttttttaacatggatgtaattccatgtaaacaggtatggaagtaggaaatgtttaggctggacttggtggattattaattgactttcttgggttcttgggagtcaacattactaaagcagtgtgaatccctgtttgcttcagggcgagatgtgtgacagaggtggcatcaagctcttacagtcccaaccctccaacggaaatgggcgaagatctcaggaatggcatcggtcacaggaaatcgatagtggctggctgctagcatggccacttggggcttaggcagaaatagagccatggtactgaccaaagggaccatagcacatggaataaaactcaaaacaggacttcatgttttatggaaattatatttaaccacttcaacattgtaaatctggataacttttaatatctaaactatataagaaagtaaaatttaacatgttaatatggaaaatttttttatttttgtatcttgatgacttaaatgtaagcaacaaagtggttaaacacatacccatctaaatttttttatagccttccatgttaaactataagtaaataattagttttaaaattgttttgtattttcttattcctgttccctttaccctttgacaacttgaaatgttaccacttcgtcctcatgatgttcttctatcaaccctgcttaggatgagaacaagttgagcagtgccaacggccatgaagaacgtagcaaaaagaggaaaaaaagcaagagcagaagtcgtagtcatgaacgaaagagaagcaaaagtaaggaacggaagcgaagtagagacagagaaaggaaaaagagcaaaagccgtgaaagaaagcgaagtagaagcaaagagaggcgacggagccgctcaagaagtcgagatcgaagatttagaggccgctacagaagtccttactccggaccaaaatttaacagtgccatccgaggaaagattgggttgcctcatagcatcaaattaagcagacgacgttcccgaagcaaaagtccattcagaaaagacaagagccctgtgagagaacctattgataatttaactcctgaggaaagagatgcaaggacagtcttctgtatgcagctggcggcaagaattcgaccaagggatttggaagagtttttctctacagtaggaaaggttcgagatgtgaggatgatttctgacagaaattcaagacgttccaaaggaattgcttatgtggagttcgtcgatgttagctcagtgcctctagcaataggattaactggccaacgagttttaggcgtgccaatcatagtacaggcatcacaggcagaaaaaaacagagctgcagcaatggcaaacaatttacaaaagggaagtgctggacctatgaggctttatgtgggctcattacacttcaacataactgaagatatgcttcgtgggatctttgagccttttggaagaattgaaagtatccagctgatgatggacagtgaaactggtcgatccaagggatatggatttattacattttctgactcagaatgtgccaaaaaggctttggaacaacttaatggatttgaactagcaggaagaccaatgaaagttggtcatgttactgaacgtactgatgcttcgagtgctagttcatttttggacagtgatgaactggaaaggactggaattgatttgggaacaactggtcgtcttcagttaatggcaagacttgcagagggtacaggtttgcagattccgccagcagcacagcaagctctacagatgagtggctctttggcatttggtgctgtggcagatttgcaaacaagactttcccagcagactgaagcttcagctttagctgcagctgcctctgttcagccacttgcaacacaatgtttccaactctctaacatgtttaaccctcaaacagaagaagaagttggatgggataccgagattaaggatgatgtgattgaagaatgtaataaacatggaggagttattcatatttatgttgacaaaaattcagctcagggcaatgtgtatgtgaagtgcccatcaattgctgcagctattgctgctgtcaatgcattgcatggcaggtggtttgctggtaaaatgataacagcagcatatgtacctcttccaacttaccacaacctgtttcctgattctatgacagcaacacagctactggttccaagtagacgatgaaggaagatatagtcccttatgtatatagctttttttctttcttgagaattcatcttgagttatcttttatttagataaaaataaagaggcaaggatctactgtcatttgtatgcaatttcctgttaccttgaaaaaataaaaatgttaacagga

SEQ ID NO: 299503 - DNA, 3667 bp, Homo sapiens
  misc_feature (27)..(27): n is a, c, g, or t
  misc_feature (34)..(34): n is a, c, g, or t
  misc_feature (47)..(47): n is a, c, g, or t
  misc_feature (56)..(56): n is a, c, g, or t
cagtcgacttactgcgcctacacctanattgaanacaccgctttgcntcagtatanaaaacggcaagtgtacgtcgatacggagcttgtcgacgctgtcgcaggggtggatcctgagctgccgaagccgccgtcctgctctcccgcgtgggcttctctaattccattgttttttttagattctctcgggcctagccgtccttggaacccgatattcgggctgggcggttccgcggcctgggcctaggggcttaacagtagcaacagaagcggcggcggcggcagcagcagcagcagcagcagcaatctcttcccgaacacgagcaccacaggcgcccgaaggccggaacaggcgtttagagaaaatggcagacgatattgatattgaagcaatgcttgaggctccttacaagaagacttgcctaacgatatctcacctctactcccatgaattcacctttgattccagtgtgaactgtcaatcataaggtagtaattgagtgacttatcgctgtaccgtggtcccctaggtaaaatgactcaactaagaattaccacctccagtttggtatagcaaaaaggtgaatgtagtggtttgggaaaaagcaggggtccaagaataacaaagcatgaccagtctgtggcaagttaaatcttctaatagtcttataagaagaaatgggtgagattttaaaatttatgtatctatgtaagactggtgatagtaaatcttaaaacagtccagtggcaatctgctgctcagttaataattactaaaattcttggatccctgaatagaaattaaaaaaaaaaatacaagaggcagtagagtcaatacaagcttaatacaagcttagagtaaatacaagcttagagtcacttgatgactgttttactgttctccatattgtttttatttttaattaggccctaccatagtatttcacactaaaaacaaaggaattatattggctaatatagtctttgactcatttcggtatctcagtaaaagtaaactgtcttttcattgtttcaccagttggtggtgaaaatagcagtatgcatgcattatcactggtgtcacaaactgtaagctttgtaagttagcactttactcctatagctgatgtaatcaaacttttaaacatttcactaaaccttttaatgaattcttgatagatttaaatagtgtatgtaattttgtaatgcttagactcttgaagagctactttctgttttaatgttaagattcttgtgtcttagttttttttaacatggatgtaattccatgtaaacaggtatggaagtaggaaatgtttaggctggacttggtggattattaattgactttcttgggttcttgggagtcaacattactaaagcagtgtgaatccctgtttgcttcagggcgagatgtgtgacagaggtggcatcaagctcttacagtcccaaccctccaacggaaatgggcgaagatctcaggaatggcatcggtcacaggaaatcgatagtggctggctgctagcatggccacttggggcttaggcagaaatagagccatggtactgaccaaagggaccatagcacatggaataaaactcaaaacaggacttcatgttttatggaaattatatttaaccacttcaacattgtaaatctggataacttttaatatctaaactatataagaaagtaaaatttaacatgttaatatggaaaatttttttatttttgtatcttgatgacttaaatgtaagcaacaaagtggttaaacacatacccatctaaatttttttatagccttccatgttaaactataagtaaataattagttttaaaattgttttgtattttcttattcctgttccctttaccctttgacaacttgaaatgttaccacttcgtcctcatgatgttcttctatcaaccctgcttaggatgagaacaagttgagcagtgccaacggccatgaagaacgtagcaaaaagaggaaaaaaagcaagagcagaagtcgtagtcatgaacgaaagagaagcaaaagtaaggaacggaagcgaagtagagacagagaaaggaaaaagagcaaaagccgtgaaagaaagcgaagtagaagcaaagagaggcgacggagccgctcaagaagtcgagatcgaagatttagaggccgctacagaagtccttactccggaccaaaatttaacagtgccatccgaggaaagattgggttgcctcatagcatcaaattaagcagacgacgttcccgaagcaaaagtccattcagaaaagacaagagccctgtgagagaacctattgataatttaactcctgaggaaagagatgcaaggacagtcttctgtatgcagctggcggcaagaattcgaccaagggatttggaagagtttttctctacagtaggaaaggttcgagatgtgaggatgatttctgacagaaattcaagacgttccaaaggaattgcttatgtggagttcgtcgatgttagctcagtgcctctagcaataggattaactggccaacgagttttaggcgtgccaatcatagtacaggcatcacaggcagaaaaaaacagagctgcagcaatggcaaacaatttacaaaagggaagtgctggacctatgaggctttatgtgggctcattacacttcaacataactgaagatatgcttcgtgggatctttgagccttttggaagaattgaaagtatccagctgatgatggacagtgaaactggtcgatccaagggatatggatttattacattttctgactcagaatgtgccaaaaaggctttggaacaacttaatggatttgaactagcaggaagaccaatgaaagttggtcatgttactgaacgtactgatgcttcgagtgctagttcatttttggacagtgatgaactggaaaggactggaattgatttgggaacaactggtcgtcttcagttaatggcaagacttgcagagggtacaggtttgcagattccgccagcagcacagcaagctctacagatgagtggctctttggcatttggtgctgtggcagttgaggctcttcattgttcctgcactgagctgtagaattctcttttgttatagatttgcaaacaagactttcccagcagactgaagcttcagctttagctgcagctgcctctgttcagccacttgcaacacaatgtttccaactctctaacatgtttaaccctcaaacagaagaagaagttggatgggataccgagattaaggatgatgtgattgaagaatgtaataaacatggaggagttattcatatttatgttgacaaaaattcagctcagggcaatgtgtatgtgaagtgcccatcaattgctgcagctattgctgctgtcaatgcattgcatggcaggtggtttgctggtaaaatgataacagcagcatatgtacctcttccaacttaccacaacctgtttcctgattctatgacagcaacacagctactggttccaagtagacgatgaaggaagatatagtcccttatgtatatagctttttttctttcttgagaattcatcttgagttatcttttatttagataaaaataaagaggcaaggatctactgtcatttgtatgcaatttcctgttaccttgaaaaaataaaaatgttaacagga

SEQ ID NO: 299504 - DNA, 3458 bp, Homo sapiens
  misc_feature (27)..(27): n is a, c, g, or t
  misc_feature (34)..(34): n is a, c, g, or t
  misc_feature (47)..(47): n is a, c, g, or t
  misc_feature (56)..(56): n is a, c, g, or t
cagtcgacttactgcgcctacacctanattgaanacaccgctttgcntcagtatanaaaacggcaagtgtacgtcgatacggagcttgtcgacgctgtcgcaggggtggatcctgagctgccgaagccgccgtcctgctctcccgcgtgggcttctctaattccattgttttttttagattctctcgggcctagccgtccttggaacccgatattcgggctgggcggttccgcggcctgggcctaggggcttaacagtagcaacagaagcggcggcggcggcagcagcagcagcagcagcagcaatctcttcccgaacacgagcaccacaggcgcccgaaggccggaacaggcgtttagagaaaatggcagacgatattgatattgaagcaatgcttgaggctccttacaagaagacttgcctaacgatatctcacctctactcccatgaattcacctttgattccagtgtgaactgtcaatcataaggtagtaattgagtgacttatcgctgtaccgtggtcccctaggtaaaatgactcaactaagaattaccacctccagtttggtatagcaaaaaggtgaatgtagtggtttgggaaaaagcaggggtccaagaataacaaagcatgaccagtctgtggcaagttaaatcttctaatagtcttataagaagaaatgggtgagattttaaaatttatgtatctatgtaagactggtgatagtaaatcttaaaacagtccagtggcaatctgctgctcagttaataattactaaaattcttggatccctgaatagaaattaaaaaaaaaaatacaagaggcagtagagtcaatacaagcttaatacaagcttagagtaaatacaagcttagagtcacttgatgactgttttactgttctccatattgtttttatttttaattaggccctaccatagtatttcacactaaaaacaaaggaattatattggctaatatagtctttgactcatttcggtatctcagtaaaagtaaactgtcttttcattgtttcaccagttggtggtgaaaatagcagtatgcatgcattatcactggtgtcacaaactgtaagctttgtaagttagcactttactcctatagctgatgtaatcaaacttttaaacatttcactaaaccttttaatgaattcttgatagatttaaatagtgtatgtaattttgtaatgcttagactcttgaagagctactttctgttttaatgttaagattcttgtgtcttagttttttttaacatggatgtaattccatgtaaacaggtatggaagtaggaaatgtttaggctggacttggtggattattaattgactttcttgggttcttgggagtcaacattactaaagcagtgtgaatccctgtttgcttcagggcgagatgtgtgacagaggtggcatcaagctcttacagtcccaaccctccaacggaaatgggcgaagatctcaggaatggcatcggtcacaggaaatcgatagtggctggctgctagcatggccacttggggcttaggcagaaatagagccatggtactgaccaaagggaccatagcacatggaataaaactcaaaacaggacttcatgttttatggaaattatatttaaccacttcaacattgtaaatctggataacttttaatatctaaactatataagaaagtaaaatttaacatgttaatatggaaaatttttttatttttgtatcttgatgacttaaatgtaagcaacaaagtggttaaacacatacccatctaaatttttttatagccttccatgttaaactataagtaaataattagttttaaaattgttttgtattttcttattcctgttccctttaccctttgacaacttgaaatgttaccacttcgtcctcatgatgttcttctatcaaccctgcttaggatgagaacaagttgagcagtgccaacggccatgaagaacgtagcaaaaagaggaaaaaaagcaagagcagaagtcgtagtcatgaacgaaagagaagcaaaagtaaggaacggaagcgaagtagagacagagaaaggaaaaagagcaaaagccgtgaaagaaagcgaagtagaagcaaagagaggcgacggagccgctcaagaagtcgagatcgaagatttagaggccgctacagaagtccttactccggaccaaaatttaacagtgccatccgaggaaagattgggttgcctcatagcatcaaattaagcagacgacgttcccgaagcaaaagtccattcagaaaagacaagagccctgtgagagaacctattgataatttaactcctgaggaaagagatgcaaggacagtcttctgtatgcagctggcggcaagaattcgaccaagggatttggaagagtttttctctacagtaggaaaggttcgagatgtgaggatgatttctgacagaaattcaagacgttccaaaggaattgcttatgtggagttcgtcgatgttagctcagtgcctctagcaataggattaactggccaacgagttttaggcgtgccaatcatagtacaggcatcacaggcagaaaaaaacagagctgcagcaatggcaaacaatttacaaaagggaagtgctggacctatgaggctttatgtgggctcattacacttcaacataactgaagatatgcttcgtgggatctttgagccttttggaagaattgaaagtatccagctgatgatggacagtgaaactggtcgatccaagggatatggatttattacattttctgactcagaatgtgccaaaaaggctttggaacaacttaatggatttgaactagcaggaagaccaatgaaagttggtcatgttactgaacgtactgatgcttcgagtgctagttcatttttggacagtgatgaactggaaaggactggaattgatttgggaacaactggtcgtcttcagttaatggcaagacttgcagagggtacaggtttgcagattccgccagcagcacagcaagctctacagatgagtggctctttggcatttggtgctgtggcagaattctcttttgttatagatttgcaaacaagactttcccagcagactgaagcttcagctttagctgcagctgcctctgttcagccacttgcaacacaatgtttccaactctctaacatgtttaaccctcaaacagaagaagaagttggatgggataccgagattaaggatgatgtgattgaagaatgtaataaacatggaggagttattcatatttatgttgacaaaaattcagctcaggtattttcatctttttttataaatgatgttaggttgttcgtctctaccttaatcttcgcacattatgtggtgcatgttatggttaaccgtcttccattatagtttttgtgtgtgtgtgcctgaaagtagctttaatatagtggctaaataaaccctccaa

SEQ ID NO: 299505 - DNA, 3623 bp, Homo sapiens
  misc_feature (27)..(27): n is a, c, g, or t
  misc_feature (34)..(34): n is a, c, g, or t
  misc_feature (47)..(47): n is a, c, g, or t
  misc_feature (56)..(56): n is a, c, g, or t
cagtcgacttactgcgcctacacctanattgaanacaccgctttgcntcagtatanaaaacggcaagtgtacgtcgatacggagcttgtcgacgctgtcgcaggggtggatcctgagctgccgaagccgccgtcctgctctcccgcgtgggcttctctaattccattgttttttttagattctctcgggcctagccgtccttggaacccgatattcgggctgggcggttccgcggcctgggcctaggggcttaacagtagcaacagaagcggcggcggcggcagcagcagcagcagcagcagcaatctcttcccgaacacgagcaccacaggcgcccgaaggccggaacaggcgtttagagaaaatggcagacgatattgatattgaagcaatgcttgaggctccttacaagaagacttgcctaacgatatctcacctctactcccatgaattcacctttgattccagtgtgaactgtcaatcataaggtagtaattgagtgacttatcgctgtaccgtggtcccctaggtaaaatgactcaactaagaattaccacctccagtttggtatagcaaaaaggtgaatgtagtggtttgggaaaaagcaggggtccaagaataacaaagcatgaccagtctgtggcaagttaaatcttctaatagtcttataagaagaaatgggtgagattttaaaatttatgtatctatgtaagactggtgatagtaaatcttaaaacagtccagtggcaatctgctgctcagttaataattactaaaattcttggatccctgaatagaaattaaaaaaaaaaatacaagaggcagtagagtcaatacaagcttaatacaagcttagagtaaatacaagcttagagtcacttgatgactgttttactgttctccatattgtttttatttttaattaggccctaccatagtatttcacactaaaaacaaaggaattatattggctaatatagtctttgactcatttcggtatctcagtaaaagtaaactgtcttttcattgtttcaccagttggtggtgaaaatagcagtatgcatgcattatcactggtgtcacaaactgtaagctttgtaagttagcactttactcctatagctgatgtaatcaaacttttaaacatttcactaaaccttttaatgaattcttgatagatttaaatagtgtatgtaattttgtaatgcttagactcttgaagagctactttctgttttaatgttaagattcttgtgtcttagttttttttaacatggatgtaattccatgtaaacaggtatggaagtaggaaatgtttaggctggacttggtggattattaattgactttcttgggttcttgggagtcaacattactaaagcagtgtgaatccctgtttgcttcagggcgagatgtgtgacagaggtggcatcaagctcttacagtcccaaccctccaacggaaatgggcgaagatctcaggaatggcatcggtcacaggaaatcgatagtggctggctgctagcatggccacttggggcttaggcagaaatagagccatggtactgaccaaagggaccatagcacatggaataaaactcaaaacaggacttcatgttttatggaaattatatttaaccacttcaacattgtaaatctggataacttttaatatctaaactatataagaaagtaaaatttaacatgttaatatggaaaatttttttatttttgtatcttgatgacttaaatgtaagcaacaaagtggttaaacacatacccatctaaatttttttatagccttccatgttaaactataagtaaataattagttttaaaattgttttgtattttcttattcctgttccctttaccctttgacaacttgaaatgttaccacttcgtcctcatgatgttcttctatcaaccctgcttaggatgagaacaagttgagcagtgccaacggccatgaagaacgtagcaaaaagaggaaaaaaagcaagagcagaagtcgtagtcatgaacgaaagagaagcaaaagtaaggaacggaagcgaagtagagacagagaaaggaaaaagagcaaaagccgtgaaagaaagcgaagtagaagcaaagagaggcgacggagccgctcaagaagtcgagatcgaagatttagaggccgctacagaagtccttactccggaccaaaatttaacagtgccatccgaggaaagattgggttgcctcatagcatcaaattaagcagacgacgttcccgaagcaaaagtccattcagaaaagacaagagccctgtgagagaacctattgataatttaactcctgaggaaagagatgcaaggacagtcttctgtatgcagctggcggcaagaattcgaccaagggatttggaagagtttttctctacagtaggaaaggttcgagatgtgaggatgatttctgacagaaattcaagacgttccaaaggaattgcttatgtggagttcgtcgatgttagctcagtgcctctagcaataggattaactggccaacgagttttaggcgtgccaatcatagtacaggcatcacaggcagaaaaaaacagagctgcagcaatggcaaacaatttacaaaagggaagtgctggacctatgaggctttatgtgggctcattacacttcaacataactgaagatatgcttcgtgggatctttgagccttttggaagaattgaaagtatccagctgatgatggacagtgaaactggtcgatccaagggatatggatttattacattttctgactcagaatgtgccaaaaaggctttggaacaacttaatggatttgaactagcaggaagaccaatgaaagttggtcatgttactgaacgtactgatgcttcgagtgctagttcatttttggacagtgatgaactggaaaggactggaattgatttgggaacaactggtcgtcttcagttaatggcaagacttgcagagggtacaggtttgcagattccgccagcagcacagcaagctctacagatgagtggctctttggcatttggtgctgtggcagatttgcaaacaagactttcccagcagactgaagcttcagctttagctgcagctgcctctgttcagccacttgcaacacaatgtttccaactctctaacatgtttaaccctcaaacagaagaagaagttggatgggataccgagattaaggatgatgtgattgaagaatgtaataaacatggaggagttattcatatttatgttgacaaaaattcagctcagggcaatgtgtatgtgaagtgcccatcaattgctgcagctattgctgctgtcaatgcattgcatggcaggtggtttgctggtaaaatgataacagcagcatatgtacctcttccaacttaccacaacctgtttcctgattctatgacagcaacacagctactggttccaagtagacgatgaaggaagatatagtcccttatgtatatagctttttttctttcttgagaattcatcttgagttatcttttaggttacaggaaaattgcagacgcaatggactcgtacgatgttcatgctccgtatgcattcagtgtaactgaaatacagaggaatccactgatct

SEQ ID NO: 299506 - DNA, 3231 bp, Homo sapiens
  misc_feature (27)..(27): n is a, c, g, or t
  misc_feature (34)..(34): n is a, c, g, or t
  misc_feature (47)..(47): n is a, c, g, or t
  misc_feature (56)..(56): n is a, c, g, or t
  misc_feature (3193)..(3193): n is a, c, g, or t
cagtcgacttactgcgcctacacctanattgaanacaccgctttgcntcagtatanaaaacggcaagtgtacgtcgatacggagcttgtcgacgctgtcgcaggggtggatcctgagctgccgaagccgccgtcctgctctcccgcgtgggcttctctaattccattgttttttttagattctctcgggcctagccgtccttggaacccgatattcgggctgggcggttccgcggcctgggcctaggggcttaacagtagcaacagaagcggcggcggcggcagcagcagcagcagcagcagcaatctcttcccgaacacgagcaccacaggcgcccgaaggccggaacaggcgtttagagaaaatggcagacgatattgatattgaagcaatgcttgaggctccttacaagaagacttgcctaacgatatctcacctctactcccatgaattcacctttgattccagtgtgaactgtcaatcataaggtagtaattgagtgacttatcgctgtaccgtggtcccctaggtaaaatgactcaactaagaattaccacctccagtttggtatagcaaaaaggtgaatgtagtggtttgggaaaaagcaggggtccaagaataacaaagcatgaccagtctgtggcaagttaaatcttctaatagtcttataagaagaaatgggtgagattttaaaatttatgtatctatgtaagactggtgatagtaaatcttaaaacagtccagtggcaatctgctgctcagttaataattactaaaattcttggatccctgaatagaaattaaaaaaaaaaatacaagaggcagtagagtcaatacaagcttaatacaagcttagagtaaatacaagcttagagtcacttgatgactgttttactgttctccatattgtttttatttttaattaggccctaccatagtatttcacactaaaaacaaaggaattatattggctaatatagtctttgactcatttcggtatctcagtaaaagtaaactgtcttttcattgtttcaccagttggtggtgaaaatagcagtatgcatgcattatcactggtgtcacaaactgtaagctttgtaagttagcactttactcctatagctgatgtaatcaaacttttaaacatttcactaaaccttttaatgaattcttgatagatttaaatagtgtatgtaattttgtaatgcttagactcttgaagagctactttctgttttaatgttaagattcttgtgtcttagttttttttaacatggatgtaattccatgtaaacaggtatggaagtaggaaatgtttaggctggacttggtggattattaattgactttcttgggttcttgggagtcaacattactaaagcagtgtgaatccctgtttgcttcagggcgagatgtgtgacagaggtggcatcaagctcttacagtcccaaccctccaacggaaatgggcgaagatctcaggaatggcatcggtcacaggaaatcgatagtggctggctgctagcatggccacttggggcttaggcagaaatagagccatggtactgaccaaagggaccatagcacatggaataaaactcaaaacaggacttcatgttttatggaaattatatttaaccacttcaacattgtaaatctggataacttttaatatctaaactatataagaaagtaaaatttaacatgttaatatggaaaatttttttatttttgtatcttgatgacttaaatgtaagcaacaaagtggttaaacacatacccatctaaatttttttatagccttccatgttaaactataagtaaataattagttttaaaattgttttgtattttcttattcctgttccctttaccctttgacaacttgaaatgttaccacttcgtcctcatgatgttcttctatcaaccctgcttaggatgagaacaagttgagcagtgccaacggccatgaagaacgtagcaaaaagaggaaaaaaagcaagagcagaagtcgtagtcatgaacgaaagagaagcaaaagtaaggaacggaagcgaagtagagacagagaaaggaaaaagagcaaaagccgtgaaagaaagcgaagtagaagcaaagagaggcgacggagccgctcaagaagtcgagatcgaagatttagaggccgctacagaagtccttactccggaccaaaatttaacagtgccatccgaggaaagattgggttgcctcatagcatcaaattaagcagacgacgttcccgaagcaaaagtccattcagaaaagacaagagccctgtgagagaacctattgataatttaactcctgaggaaagagatgcaaggacagtcttctgtatgcagctggcggcaagaattcgaccaagggatttggaagagtttttctctacagtaggaaaggttcgagatgtgaggatgatttctgacagaaattcaagacgttccaaaggaattgcttatgtggagttcgtcgatgttagctcagtgcctctagcaataggattaactggccaacgagttttaggcgtgccaatcatagtacaggcatcacaggcagaaaaaaacagagctgcagcaatggcaaacaatttacaaaagggaagtgctggacctatgaggctttatgtgggctcattacacttcaacataactgaagatatgcttcgtgggatctttgagccttttggaagaattgaaagtatccagctgatgatggacagtgaaactggtcgatccaagggatatggatttattacattttctgactcagaatgtgccaaaaaggctttggaacaacttaatggatttgaactagcaggaagaccaatgaaagttggtcatgttactgaacgtactgatgcttcgagtgctagttcatttttggacagtgatgaactggaaaggactggaattgatttgggaacaactggtcgtcttcagttaatggcaagacttgcagagggtacaggtttgcagattccgccagcagcacagcaagctctacagatgagtggctctttggcatttggtgctgtggcagatttgcaaacaagactttcccagcagactgaagcttcagctttagctgcagctgcctctgttcagccacttgcaacacaatgtttccaactctctaacatgtttaaccctcaaacaaaaaaaaaaagttggatngggatccccaatttaaggttgggattgtttattggggg

SEQ ID NO: 299507 - DNA, 3283 bp, Homo sapiens
  misc_feature (27)..(27): n is a, c, g, or t
  misc_feature (34)..(34): n is a, c, g, or t
  misc_feature (47)..(47): n is a, c, g, or t
  misc_feature (56)..(56): n is a, c, g, or t
cagtcgacttactgcgcctacacctanattgaanacaccgctttgcntcagtatanaaaacggcaagtgtacgtcgatacggagcttgtcgacgctgtcgcaggggtggatcctgagctgccgaagccgccgtcctgctctcccgcgtgggcttctctaattccattgttttttttagattctctcgggcctagccgtccttggaacccgatattcgggctgggcggttccgcggcctgggcctaggggcttaacagtagcaacagaagcggcggcggcggcagcagcagcagcagcagcagcaatctcttcccgaacacgagcaccacaggcgcccgaaggccggaacaggcgtttagagaaaatggcagacgatattgatattgaagcaatgcttgaggctccttacaagaagacttgcctaacgatatctcacctctactcccatgaattcacctttgattccagtgtgaactgtcaatcataaggtagtaattgagtgacttatcgctgtaccgtggtcccctaggtaaaatgactcaactaagaattaccacctccagtttggtatagcaaaaaggtgaatgtagtggtttgggaaaaagcaggggtccaagaataacaaagcatgaccagtctgtggcaagttaaatcttctaatagtcttataagaagaaatgggtgagattttaaaatttatgtatctatgtaagactggtgatagtaaatcttaaaacagtccagtggcaatctgctgctcagttaataattactaaaattcttggatccctgaatagaaattaaaaaaaaaaatacaagaggcagtagagtcaatacaagcttaatacaagcttagagtaaatacaagcttagagtcacttgatgactgttttactgttctccatattgtttttatttttaattaggccctaccatagtatttcacactaaaaacaaaggaattatattggctaatatagtctttgactcatttcggtatctcagtaaaagtaaactgtcttttcattgtttcaccagttggtggtgaaaatagcagtatgcatgcattatcactggtgtcacaaactgtaagctttgtaagttagcactttactcctatagctgatgtaatcaaacttttaaacatttcactaaaccttttaatgaattcttgatagatttaaatagtgtatgtaattttgtaatgcttagactcttgaagagctactttctgttttaatgttaagattcttgtgtcttagttttttttaacatggatgtaattccatgtaaacaggtatggaagtaggaaatgtttaggctggacttggtggattattaattgactttcttgggttcttgggagtcaacattactaaagcagtgtgaatccctgtttgcttcagggcgagatgtgtgacagaggtggcatcaagctcttacagtcccaaccctccaacggaaatgggcgaagatctcaggaatggcatcggtcacaggaaatcgatagtggctggctgctagcatggccacttggggcttaggcagaaatagagccatggtactgaccaaagggaccatagcacatggaataaaactcaaaacaggacttcatgttttatggaaattatatttaaccacttcaacattgtaaatctggataacttttaatatctaaactatataagaaagtaaaatttaacatgttaatatggaaaatttttttatttttgtatcttgatgacttaaatgtaagcaacaaagtggttaaacacatacccatctaaatttttttatagccttccatgttaaactataagtaaataattagttttaaaattgttttgtattttcttattcctgttccctttaccctttgacaacttgaaatgttaccacttcgtcctcatgatgttcttctatcaaccctgcttaggatgagaacaagttgagcagtgccaacggccatgaagaacgtagcaaaaagaggaaaaaaagcaagagcagaagtcgtagtcatgaacgaaagagaagcaaaagtaaggaacggaagcgaagtagagacagagaaaggaaaaagagcaaaagccgtgaaagaaagcgaagtagaagcaaagagaggcgacggagccgctcaagaagtcgagatcgaagatttagaggccgctacagaagtccttactccggaccaaaatttaacagtgccatccgaggaaagattgggttgcctcatagcatcaaattaagcagacgacgttcccgaagcaaaagtccattcagaaaagacaagagccctgtgagagaacctattgataatttaactcctgaggaaagagatgcaaggacagtcttctgtatgcagctggcggcaagaattcgaccaagggatttggaagagtttttctctacagtaggaaaggttcgagatgtgaggatgatttctgacagaaattcaagacgttccaaaggaattgcttatgtggagttcgtcgatgttagctcagtgcctctagcaataggattaactggccaacgagttttaggcgtgccaatcatagtacaggcatcacaggcagaaaaaaacagagctgcagcaatggcaaacaatttacaaaagggaagtgctggacctatgaggctttatgtgggctcattacacttcaacataactgaagatatgcttcgtgggatctttgagccttttggaagaattgaaagtatccagctgatgatggacagtgaaactggtcgatccaagggatatggatttattacattttctgactcagaatgtgccaaaaaggctttggaacaacttaatggatttgaactagcaggaagaccaatgaaagttggtcatgttactgaacgtactgatgcttcgagtgctagttcatttttggacagtgatgaactggaaaggactggaattgatttgggaacaactggtcgtcttcagttaatggcaagacttgcagagggtacaggtttgcagattccgccagcagcacagcaagctctacagatgagtggctctttggcatttggtgctgtggcagatttgcaaacaagactttcccagcagactgaaggtgagttgaagtgttcatattttttatttttgtctttgaaatagaattaaatgtagtaagacagttttctatatttattgtcatatttttataccagtaatttggaccaaattttgacacagtgacacatagtggtatattcatagtaatctgtctgtatttcagaagacctaacccaaattaatggactt

SEQ ID NO: 299508 - DNA, 3301 bp, Homo sapiens
  misc_feature (27)..(27): n is a, c, g, or t
  misc_feature (34)..(34): n is a, c, g, or t
  misc_feature (47)..(47): n is a, c, g, or t
  misc_feature (56)..(56): n is a, c, g, or t
cagtcgacttactgcgcctacacctanattgaanacaccgctttgcntcagtatanaaaacggcaagtgtacgtcgatacggagcttgtcgacgctgtcgcaggggtggatcctgagctgccgaagccgccgtcctgctctcccgcgtgggcttctctaattccattgttttttttagattctctcgggcctagccgtccttggaacccgatattcgggctgggcggttccgcggcctgggcctaggggcttaacagtagcaacagaagcggcggcggcggcagcagcagcagcagcagcagcaatctcttcccgaacacgagcaccacaggcgcccgaaggccggaacaggcgtttagagaaaatggcagacgatattgatattgaagcaatgcttgaggctccttacaagaagacttgcctaacgatatctcacctctactcccatgaattcacctttgattccagtgtgaactgtcaatcataaggtagtaattgagtgacttatcgctgtaccgtggtcccctaggtaaaatgactcaactaagaattaccacctccagtttggtatagcaaaaaggtgaatgtagtggtttgggaaaaagcaggggtccaagaataacaaagcatgaccagtctgtggcaagttaaatcttctaatagtcttataagaagaaatgggtgagattttaaaatttatgtatctatgtaagactggtgatagtaaatcttaaaacagtccagtggcaatctgctgctcagttaataattactaaaattcttggatccctgaatagaaattaaaaaaaaaaatacaagaggcagtagagtcaatacaagcttaatacaagcttagagtaaatacaagcttagagtcacttgatgactgttttactgttctccatattgtttttatttttaattaggccctaccatagtatttcacactaaaaacaaaggaattatattggctaatatagtctttgactcatttcggtatctcagtaaaagtaaactgtcttttcattgtttcaccagttggtggtgaaaatagcagtatgcatgcattatcactggtgtcacaaactgtaagctttgtaagttagcactttactcctatagctgatgtaatcaaacttttaaacatttcactaaaccttttaatgaattcttgatagatttaaatagtgtatgtaattttgtaatgcttagactcttgaagagctactttctgttttaatgttaagattcttgtgtcttagttttttttaacatggatgtaattccatgtaaacaggtatggaagtaggaaatgtttaggctggacttggtggattattaattgactttcttgggttcttgggagtcaacattactaaagcagtgtgaatccctgtttgcttcagggcgagatgtgtgacagaggtggcatcaagctcttacagtcccaaccctccaacggaaatgggcgaagatctcaggaatggcatcggtcacaggaaatcgatagtggctggctgctagcatggccacttggggcttaggcagaaatagagccatggtactgaccaaagggaccatagcacatggaataaaactcaaaacaggacttcatgttttatggaaattatatttaaccacttcaacattgtaaatctggataacttttaatatctaaactatataagaaagtaaaatttaacatgttaatatggaaaatttttttatttttgtatcttgatgacttaaatgtaagcaacaaagtggttaaacacatacccatctaaatttttttatagccttccatgttaaactataagtaaataattagttttaaaattgttttgtattttcttattcctgttccctttaccctttgacaacttgaaatgttaccacttcgtcctcatgatgttcttctatcaaccctgcttaggatgagaacaagttgagcagtgccaacggccatgaagaacgtagcaaaaagaggaaaaaaagcaagagcagaagtcgtagtcatgaacgaaagagaagcaaaagtaaggaacggaagcgaagtagagacagagaaaggaaaaagagcaaaagccgtgaaagaaagcgaagtagaagcaaagagaggcgacggagccgctcaagaagtcgagatcgaagatttagaggccgctacagaagtccttactccggaccaaaatttaacagtgccatccgaggaaagattgggttgcctcatagcatcaaattaagcagacgacgttcccgaagcaaaagtccattcagaaaagacaagagccctgtgagagaacctattgataatttaactcctgaggaaagagatgcaaggacagtcttctgtatgcagctggcggcaagaattcgaccaagggatttggaagagtttttctctacagtaggaaaggttcgagatgtgaggatgatttctgacagaaattcaagacgttccaaaggaattgcttatgtggagttcgtcgatgttagctcagtgcctctagcaataggattaactggccaacgagttttaggcgtgccaatcatagtacaggcatcacaggcagaaaaaaacagagctgcagcaatggcaaacaatttacaaaagggaagtgctggacctatgaggctttatgtgggctcattacacttcaacataactgaagatatgcttcgtgggatctttgagccttttggaagaattgaaagtatccagctgatgatggacagtgaaactggtcgatccaagggatatggatttattacattttctgactcagaatgtgccaaaaaggctttggaacaacttaatggatttgaactagcaggaagaccaatgaaagttggtcatgttactgaacgtactgatgcttcgagtgctagttcatttttggacagtgatgaactggaaaggactggaattgatttgggaacaactggtcgtcttcagttaatggcaagacttgcagagggtacaggtttgcagattccgccagcagcacagcaagctctacagatgagtggctctttggcatttggtgctgtggcagaattctcttttgttatagatttgcaaacaagactttcccagcagactgaaggtgagttgaagtgttcatattttttatttttgtctttgaaatagaattaaatgtagtaagacagttttctatatttattgtcatatttttataccagtaatttggaccaaattttgacacagtgacacatagtggtatattcatagtaatctgtctgtatttcagaagacctaacccaaattaatggactt

SEQ ID NO: 299509 - DNA, 2869 bp, Homo sapiens
  misc_feature (27)..(27): n is a, c, g, or t
  misc_feature (34)..(34): n is a, c, g, or t
  misc_feature (47)..(47): n is a, c, g, or t
  misc_feature (56)..(56): n is a, c, g, or t
  misc_feature (2824)..(2824): n is a, c, g, or t
  misc_feature (2862)..(2863): n is a, c, g, or t
cagtcgacttactgcgcctacacctanattgaanacaccgctttgcntcagtatanaaaacggcaagtgtacgtcgatacggagcttgtcgacgctgtcgcaggggtggatcctgagctgccgaagccgccgtcctgctctcccgcgtgggcttctctaattccattgttttttttagattctctcgggcctagccgtccttggaacccgatattcgggctgggcggttccgcggcctgggcctaggggcttaacagtagcaacagaagcggcggcggcggcagcagcagcagcagcagcagcaatctcttcccgaacacgagcaccacaggcgcccgaaggccggaacaggcgtttagagaaaatggcagacgatattgatattgaagcaatgcttgaggctccttacaagaagacttgcctaacgatatctcacctctactcccatgaattcacctttgattccagtgtgaactgtcaatcataaggtagtaattgagtgacttatcgctgtaccgtggtcccctaggtaaaatgactcaactaagaattaccacctccagtttggtatagcaaaaaggtgaatgtagtggtttgggaaaaagcaggggtccaagaataacaaagcatgaccagtctgtggcaagttaaatcttctaatagtcttataagaagaaatgggtgagattttaaaatttatgtatctatgtaagactggtgatagtaaatcttaaaacagtccagtggcaatctgctgctcagttaataattactaaaattcttggatccctgaatagaaattaaaaaaaaaaatacaagaggcagtagagtcaatacaagcttaatacaagcttagagtaaatacaagcttagagtcacttgatgactgttttactgttctccatattgtttttatttttaattaggccctaccatagtatttcacactaaaaacaaaggaattatattggctaatatagtctttgactcatttcggtatctcagtaaaagtaaactgtcttttcattgtttcaccagttggtggtgaaaatagcagtatgcatgcattatcactggtgtcacaaactgtaagctttgtaagttagcactttactcctatagctgatgtaatcaaacttttaaacatttcactaaaccttttaatgaattcttgatagatttaaatagtgtatgtaattttgtaatgcttagactcttgaagagctactttctgttttaatgttaagattcttgtgtcttagttttttttaacatggatgtaattccatgtaaacaggtatggaagtaggaaatgtttaggctggacttggtggattattaattgactttcttgggttcttgggagtcaacattactaaagcagtgtgaatccctgtttgcttcagggcgagatgtgtgacagaggtggcatcaagctcttacagtcccaaccctccaacggaaatgggcgaagatctcaggaatggcatcggtcacaggaaatcgatagtggctggctgctagcatggccacttggggcttaggcagaaatagagccatggtactgaccaaagggaccatagcacatggaataaaactcaaaacaggacttcatgttttatggaaattatatttaaccacttcaacattgtaaatctggataacttttaatatctaaactatataagaaagtaaaatttaacatgttaatatggaaaatttttttatttttgtatcttgatgacttaaatgtaagcaacaaagtggttaaacacatacccatctaaatttttttatagccttccatgttaaactataagtaaataattagttttaaaattgttttgtattttcttattcctgttccctttaccctttgacaacttgaaatgttaccacttcgtcctcatgatgttcttctatcaaccctgcttaggatgagaacaagttgagcagtgccaacggccatgaagaacgtagcaaaaagaggaaaaaaagcaagagcagaagtcgtagtcatgaacgaaagagaagcaaaagtaaggaacggaagcgaagtagagacagagaaaggaaaaagagcaaaagccgtgaaagaaagcgaagtagaagcaaagagaggcgacggagccgctcaagaagtcgagatcgaagatttagaggccgctacagaagtccttactccggaccaaaatttaacagtgccatccgaggaaagattgggttgcctcatagcatcaaattaagcagacgacgttcccgaagcaaaagtccattcagaaaagacaagagccctgtgagagaacctattgataatttaactcctgaggaaagagatgcaaggacagtcttctgtatgcagctggcggcaagaattcgaccaagggatttggaagagtttttctctacagtaggaaaggttcgagatgtgaggatgatttctgacagaaattcaagacgttccaaaggaattgcttatgtggagttcgtcgatgttagctcagtgcctctagcaataggattaactggccaacgagttttaggcgtgccaatcatagtacaggcatcacaggcagaaaaaaacagagctgcagcaatggcaaacaatttacaaaagggaagtgctggacctatgaggctttatgtgggctcattacacttcaacataactgaagatatgcttcgtgggatctttgagccttttggaagaattgaaagtatccagctgatgatggacagtgaaactggtcgatccaagggatatggatttattacatttctgctcaaatggccaaaaggcttggaccacttatggttgacttcnggaaaccatgaagtggcatgtctgacgctgagctcagnntattat

SEQ ID NO: 299510 - DNA, 2732 bp, Homo sapiens
  misc_feature (27)..(27): n is a, c, g, or t
  misc_feature (34)..(34): n is a, c, g, or t
  misc_feature (47)..(47): n is a, c, g, or t
  misc_feature (56)..(56): n is a, c, g, or t
cagtcgacttactgcgcctacacctanattgaanacaccgctttgcntcagtatanaaaacggcaagtgtacgtcgatacggagcttgtcgacgctgtcgcaggggtggatcctgagctgccgaagccgccgtcctgctctcccgcgtgggcttctctaattccattgttttttttagattctctcgggcctagccgtccttggaacccgatattcgggctgggcggttccgcggcctgggcctaggggcttaacagtagcaacagaagcggcggcggcggcagcagcagcagcagcagcagcaatctcttcccgaacacgagcaccacaggcgcccgaaggccggaacaggcgtttagagaaaatggcagacgatattgatattgaagcaatgcttgaggctccttacaagaagacttgcctaacgatatctcacctctactcccatgaattcacctttgattccagtgtgaactgtcaatcataaggtagtaattgagtgacttatcgctgtaccgtggtcccctaggtaaaatgactcaactaagaattaccacctccagtttggtatagcaaaaaggtgaatgtagtggtttgggaaaaagcaggggtccaagaataacaaagcatgaccagtctgtggcaagttaaatcttctaatagtcttataagaagaaatgggtgagattttaaaatttatgtatctatgtaagactggtgatagtaaatcttaaaacagtccagtggcaatctgctgctcagttaataattactaaaattcttggatccctgaatagaaattaaaaaaaaaaatacaagaggcagtagagtcaatacaagcttaatacaagcttagagtaaatacaagcttagagtcacttgatgactgttttactgttctccatattgtttttatttttaattaggccctaccatagtatttcacactaaaaacaaaggaattatattggctaatatagtctttgactcatttcggtatctcagtaaaagtaaactgtcttttcattgtttcaccagttggtggtgaaaatagcagtatgcatgcattatcactggtgtcacaaactgtaagctttgtaagttagcactttactcctatagctgatgtaatcaaacttttaaacatttcactaaaccttttaatgaattcttgatagatttaaatagtgtatgtaattttgtaatgcttagactcttgaagagctactttctgttttaatgttaagattcttgtgtcttagttttttttaacatggatgtaattccatgtaaacaggtatggaagtaggaaatgtttaggctggacttggtggattattaattgactttcttgggttcttgggagtcaacattactaaagcagtgtgaatccctgtttgcttcagggcgagatgtgtgacagaggtggcatcaagctcttacagtcccaaccctccaacggaaatgggcgaagatctcaggaatggcatcggtcacaggaaatcgatagtggctggctgctagcatggccacttggggcttaggcagaaatagagccatggtactgaccaaagggaccatagcacatggaataaaactcaaaacaggacttcatgttttatggaaattatatttaaccacttcaacattgtaaatctggataacttttaatatctaaactatataagaaagtaaaatttaacatgttaatatggaaaatttttttatttttgtatcttgatgacttaaatgtaagcaacaaagtggttaaacacatacccatctaaatttttttatagccttccatgttaaactataagtaaataattagttttaaaattgttttgtattttcttattcctgttccctttaccctttgacaacttgaaatgttaccacttcgtcctcatgatgttcttctatcaaccctgcttaggatgagaacaagttgagcagtgccaacggccatgaagaacgtagcaaaaagaggaaaaaaagcaagagcagaagtcgtagtcatgaacgaaagagaagcaaaagtaaggaacggaagcgaagtagagacagagaaaggaaaaagagcaaaagccgtgaaagaaagcgaagtagaagcaaagagaggcgacggagccgctcaagaagtcgagatcgaagatttagaggccgctacagaagtccttactccggaccaaaatttaacagtgccatccgaggaaagattgggttgcctcatagcatcaaattaagcagacgacgttcccgaagcaaaagtccattcagaaaagacaagagccctgtgagagaacctattgataatttaactcctgaggaaagagatgcaaggacagtcttctgtatgcagctggcggcaagaattcgaccaagggatttggaagagtttttctctacagtaggaaaggttcgagatgtgaggatgatttctgacagaaattcaagacgttccaaaggaattgcttatgtggagccgctcaagaagtcgagatcgaagatttagaggccgctacagaagtccttactccggaccaaaatttaacagtgccatccgaggaaagattgggttgcctcatagcatcaaattaagcagacgacgttcccgaagcaaaagtccattcagaaaaagagcaaaagccgtgaaagaaagcgaaagagaagcaaaagtaaggaacggaagcgaagtagagacagagaaaggaaaaagagcaaaagccgtg

SEQ ID NO: 299511 - DNA, 2450 bp, Homo sapiens
  misc_feature (27)..(27): n is a, c, g, or t
  misc_feature (34)..(34): n is a, c, g, or t
  misc_feature (47)..(47): n is a, c, g, or t
  misc_feature (56)..(56): n is a, c, g, or t
cagtcgacttactgcgcctacacctanattgaanacaccgctttgcntcagtatanaaaacggcaagtgtacgtcgatacggagcttgtcgacgctgtcgcaggggtggatcctgagctgccgaagccgccgtcctgctctcccgcgtgggcttctctaattccattgttttttttagattctctcgggcctagccgtccttggaacccgatattcgggctgggcggttccgcggcctgggcctaggggcttaacagtagcaacagaagcggcggcggcggcagcagcagcagcagcagcagcaatctcttcccgaacacgagcaccacaggcgcccgaaggccggaacaggcgtttagagaaaatggcagacgatattgatattgaagcaatgcttgaggctccttacaagaagacttgcctaacgatatctcacctctactcccatgaattcacctttgattccagtgtgaactgtcaatcataaggtagtaattgagtgacttatcgctgtaccgtggtcccctaggtaaaatgactcaactaagaattaccacctccagtttggtatagcaaaaaggtgaatgtagtggtttgggaaaaagcaggggtccaagaataacaaagcatgaccagtctgtggcaagttaaatcttctaatagtcttataagaagaaatgggtgagattttaaaatttatgtatctatgtaagactggtgatagtaaatcttaaaacagtccagtggcaatctgctgctcagttaataattactaaaattcttggatccctgaatagaaattaaaaaaaaaaatacaagaggcagtagagtcaatacaagcttaatacaagcttagagtaaatacaagcttagagtcacttgatgactgttttactgttctccatattgtttttatttttaattaggccctaccatagtatttcacactaaaaacaaaggaattatattggctaatatagtctttgactcatttcggtatctcagtaaaagtaaactgtcttttcattgtttcaccagttggtggtgaaaatagcagtatgcatgcattatcactggtgtcacaaactgtaagctttgtaagttagcactttactcctatagctgatgtaatcaaacttttaaacatttcactaaaccttttaatgaattcttgatagatttaaatagtgtatgtaattttgtaatgcttagactcttgaagagctactttctgttttaatgttaagattcttgtgtcttagttttttttaacatggatgtaattccatgtaaacaggtatggaagtaggaaatgtttaggctggacttggtggattattaattgactttcttgggttcttgggagtcaacattactaaagcagtgtgaatccctgtttgcttcagggcgagatgtgtgacagaggtggcatcaagctcttacagtcccaaccctccaacggaaatgggcgaagatctcaggaatggcatcggtcacaggaaatcgatagtggctggctgctagcatggccacttggggcttaggcagaaatagagccatggtactgaccaaagggaccatagcacatggaataaaactcaaaacaggacttcatgttttatggaaattatatttaaccacttcaacattgtaaatctggataacttttaatatctaaactatataagaaagtaaaatttaacatgttaatatggaaaatttttttatttttgtatcttgatgacttaaatgtaagcaacaaagtggttaaacacatacccatctaaatttttttatagccttccatgttaaactataagtaaataattagttttaaaattgttttgtattttcttattcctgttccctttaccctttgacaacttgaaatgttaccacttcgtcctcatgatgttcttctatcaaccctgcttaggatgagaacaagttgagcagtgccaacggccatgaagaacgtagcaaaaagaggaaaaaaagcaagagcagaagtcgtagtcatgaacgaaagagaagcaaaagtaaggaacggaagcgaagtagagacagagaaaggaaaaagagcaaaagccgtgaaagaaagcgaagtagaagcaaagagaggcgacggagccgctcaagaagtcgagatcgaagatttagaggccgctacagaagtccttactccggaccaaaatttaacagtgccatccgaggaaagattgggttgcctcatagcatcaaattaagcagacgacgttcccgaagcaaaagtccattcagaaaagacaagagccctgtgagagaacctattgataatttaactcctgaggaaagagatgcaaggacagtcttctgtatgcagctggcggcaagaattcgaccaagggatttggaagagagtgcctataaatgtgattccctgaacttacagctttagtaccactcagctt

SEQ ID NO: 299512 - DNA, 2850 bp, Homo sapiens
  misc_feature (27)..(27): n is a, c, g, or t
  misc_feature (34)..(34): n is a, c, g, or t
  misc_feature (47)..(47): n is a, c, g, or t
  misc_feature (56)..(56): n is a, c, g, or t
cagtcgacttactgcgcctacacctanattgaanacaccgctttgcntcagtatanaaaacggcaagtgtacgtcgatacggagcttgtcgacgctgtcgcaggggtggatcctgagctgccgaagccgccgtcctgctctcccgcgtgggcttctctaattccattgttttttttagattctctcgggcctagccgtccttggaacccgatattcgggctgggcggttccgcggcctgggcctaggggcttaacagtagcaacagaagcggcggcggcggcagcagcagcagcagcagcagcaatctcttcccgaacacgagcaccacaggcgcccgaaggccggaacaggcgtttagagaaaatggcagacgatattgatattgaagcaatgcttgaggctccttacaagaagacttgcctaacgatatctcacctctactcccatgaattcacctttgattccagtgtgaactgtcaatcataaggtagtaattgagtgacttatcgctgtaccgtggtcccctaggtaaaatgactcaactaagaattaccacctccagtttggtatagcaaaaaggtgaatgtagtggtttgggaaaaagcaggggtccaagaataacaaagcatgaccagtctgtggcaagttaaatcttctaatagtcttataagaagaaatgggtgagattttaaaatttatgtatctatgtaagactggtgatagtaaatcttaaaacagtccagtggcaatctgctgctcagttaataattactaaaattcttggatccctgaatagaaattaaaaaaaaaaatacaagaggcagtagagtcaatacaagcttaatacaagcttagagtaaatacaagcttagagtcacttgatgactgttttactgttctccatattgtttttatttttaattaggccctaccatagtatttcacactaaaaacaaaggaattatattggctaatatagtctttgactcatttcggtatctcagtaaaagtaaactgtcttttcattgtttcaccagttggtggtgaaaatagcagtatgcatgcattatcactggtgtcacaaactgtaagctttgtaagttagcactttactcctatagctgatgtaatcaaacttttaaacatttcactaaaccttttaatgaattcttgatagatttaaatagtgtatgtaattttgtaatgcttagactcttgaagagctactttctgttttaatgttaagattcttgtgtcttagttttttttaacatggatgtaattccatgtaaacaggtatggaagtaggaaatgtttaggctggacttggtggattattaattgactttcttgggttcttgggagtcaacattactaaagcagtgtgaatccctgtttgcttcagggcgagatgtgtgacagaggtggcatcaagctcttacagtcccaaccctccaacggaaatgggcgaagatctcaggaatggcatcggtcacaggaaatcgatagtggctggctgctagcatggccacttggggcttaggcagaaatagagccatggtactgaccaaagggaccatagcacatggaataaaactcaaaacaggacttcatgttttatggaaattatatttaaccacttcaacattgtaaatctggataacttttaatatctaaactatataagaaagtaaaatttaacatgttaatatggaaaatttttttatttttgtatcttgatgacttaaatgtaagcaacaaagtggttaaacacatacccatctaaatttttttatagccttccatgttaaactataagtaaataattagttttaaaattgttttgtattttcttattcctgttccctttaccctttgacaacttgaaatgttaccacttcgtcctcatgatgttcttctatcaaccctgcttaggatgagaacaagttgagcagtgccaacggccatgaagaacgtagcaaaaagaggaaaaaaagcaagagcagaagtcgtagtcatgaacgaaagagaagcaaaagtaaggaacggaagcgaagtagagacagagaaaggaaaaagagcaaaagccgtgaaagaaagcgaagtagaagcaaagagaggcgacggagccgctcaagaagtcgagatcgaagatttagaggccgctacagaagtccttactccggaccaaaatttaacagtgccatccgaggaaagattgggttgcctcatagcatcaaattaagcagacgacgttcccgaagcaaaagtccattcagaaaagacaagagccctgtgaggtagtttacttctttaaagcctttagctcttaaaaagcttttgcagcttatggtactgttaaatttgatgatatttagtaatttggaccatattaaatcttgcttttgctttcttttgcacttccagtactttaaggtcaagtgaatttctactgagttttcagtagttttcactttaatttcatataattaaagcaacagttatatatttatttatttatttatttattttgagacggagtctcactcagtcacccaggatggagtgcagtagtgcagtcttggcttactgcaacctccgcctcctgggttcaagcagttcttctacctcagccctccaagtagctgggattacaggcatgcaccaccatgcctcgctatttttttattttagtagcgatgggatttcaccatgttggctagcctagtgttgagctccggacctcagatggtccacccaccttggcctctcaaagtggtaggattgcaggtgtgagccaacacacccggccacaaaagttatttatttatgagatggagtctcgctct

SEQ ID NO: 299513 - DNA, 2377 bp, Homo sapiens
  misc_feature (27)..(27): n is a, c, g, or t
  misc_feature (34)..(34): n is a, c, g, or t
  misc_feature (47)..(47): n is a, c, g, or t
  misc_feature (56)..(56): n is a, c, g, or t
  misc_feature (2320)..(2320): n is a, c, g, or t
  misc_feature (2341)..(2341): n is a, c, g, or t
  misc_feature (2352)..(2352): n is a, c, g, or t
  misc_feature (2374)..(2374): n is a, c, g, or t
cagtcgacttactgcgcctacacctanattgaanacaccgctttgcntcagtatanaaaacggcaagtgtacgtcgatacggagcttgtcgacgctgtcgcaggggtggatcctgagctgccgaagccgccgtcctgctctcccgcgtgggcttctctaattccattgttttttttagattctctcgggcctagccgtccttggaacccgatattcgggctgggcggttccgcggcctgggcctaggggcttaacagtagcaacagaagcggcggcggcggcagcagcagcagcagcagcagcaatctcttcccgaacacgagcaccacaggcgcccgaaggccggaacaggcgtttagagaaaatggcagacgatattgatattgaagcaatgcttgaggctccttacaagaagacttgcctaacgatatctcacctctactcccatgaattcacctttgattccagtgtgaactgtcaatcataaggtagtaattgagtgacttatcgctgtaccgtggtcccctaggtaaaatgactcaactaagaattaccacctccagtttggtatagcaaaaaggtgaatgtagtggtttgggaaaaagcaggggtccaagaataacaaagcatgaccagtctgtggcaagttaaatcttctaatagtcttataagaagaaatgggtgagattttaaaatttatgtatctatgtaagactggtgatagtaaatcttaaaacagtccagtggcaatctgctgctcagttaataattactaaaattcttggatccctgaatagaaattaaaaaaaaaaatacaagaggcagtagagtcaatacaagcttaatacaagcttagagtaaatacaagcttagagtcacttgatgactgttttactgttctccatattgtttttatttttaattaggccctaccatagtatttcacactaaaaacaaaggaattatattggctaatatagtctttgactcatttcggtatctcagtaaaagtaaactgtcttttcattgtttcaccagttggtggtgaaaatagcagtatgcatgcattatcactggtgtcacaaactgtaagctttgtaagttagcactttactcctatagctgatgtaatcaaacttttaaacatttcactaaaccttttaatgaattcttgatagatttaaatagtgtatgtaattttgtaatgcttagactcttgaagagctactttctgttttaatgttaagattcttgtgtcttagttttttttaacatggatgtaattccatgtaaacaggtatggaagtaggaaatgtttaggctggacttggtggattattaattgactttcttgggttcttgggagtcaacattactaaagcagtgtgaatccctgtttgcttcagggcgagatgtgtgacagaggtggcatcaagctcttacagtcccaaccctccaacggaaatgggcgaagatctcaggaatggcatcggtcacaggaaatcgatagtggctggctgctagcatggccacttggggcttaggcagaaatagagccatggtactgaccaaagggaccatagcacatggaataaaactcaaaacaggacttcatgttttatggaaattatatttaaccacttcaacattgtaaatctggataacttttaatatctaaactatataagaaagtaaaatttaacatgttaatatggaaaatttttttatttttgtatcttgatgacttaaatgtaagcaacaaagtggttaaacacatacccatctaaatttttttatagccttccatgttaaactataagtaaataattagttttaaaattgttttgtattttcttattcctgttccctttaccctttgacaacttgaaatgttaccacttcgtcctcatgatgttcttctatcaaccctgcttaggatgagaacaagttgagcagtgccaacggccatgaagaacgtagcaaaaagaggaaaaaaagcaagagcagaagtcgtagtcatgaacgaaagagaagcaaaagtaaggaacggaagcgaagtagagacagagaaaggaaaaagagcaaaagccgtgaaagaaagcgaagtagaagcaaagagaggcgacggagccgctcaagaagtcgagatcgaagatttagaggccgctacagaagtccttactccggaccaaaatttaacagtgccatccgaggaaagattgggttgcctcatagcatcaaattaagcagacgacgttcccgaagcaaaagtccattcagaaaagacaagagccctgtgagagaacctattgattatttnactccttagaaatagattgtngaagggggatntctgagcgaatgggcatcaaancaa

SEQ ID NO: 299514 - DNA, 2946 bp, Homo sapiens
  misc_feature (27)..(27): n is a, c, g, or t
  misc_feature (34)..(34): n is a, c, g, or t
  misc_feature (47)..(47): n is a, c, g, or t
  misc_feature (56)..(56): n is a, c, g, or t
cagtcgacttactgcgcctacacctanattgaanacaccgctttgcntcagtatanaaaacggcaagtgtacgtcgatacggagcttgtcgacgctgtcgcaggggtggatcctgagctgccgaagccgccgtcctgctctcccgcgtgggcttctctaattccattgttttttttagattctctcgggcctagccgtccttggaacccgatattcgggctgggcggttccgcggcctgggcctaggggcttaacagtagcaacagaagcggcggcggcggcagcagcagcagcagcagcagcaatctcttcccgaacacgagcaccacaggcgcccgaaggccggaacaggcgtttagagaaaatggcagacgatattgatattgaagcaatgcttgaggctccttacaagaagacttgcctaacgatatctcacctctactcccatgaattcacctttgattccagtgtgaactgtcaatcataaggtagtaattgagtgacttatcgctgtaccgtggtcccctaggtaaaatgactcaactaagaattaccacctccagtttggtatagcaaaaaggtgaatgtagtggtttgggaaaaagcaggggtccaagaataacaaagcatgaccagtctgtggcaagttaaatcttctaatagtcttataagaagaaatgggtgagattttaaaatttatgtatctatgtaagactggtgatagtaaatcttaaaacagtccagtggcaatctgctgctcagttaataattactaaaattcttggatccctgaatagaaattaaaaaaaaaaatacaagaggcagtagagtcaatacaagcttaatacaagcttagagtaaatacaagcttagagtcacttgatgactgttttactgttctccatattgtttttatttttaattaggccctaccatagtatttcacactaaaaacaaaggaattatattggctaatatagtctttgactcatttcggtatctcagtaaaagtaaactgtcttttcattgtttcaccagttggtggtgaaaatagcagtatgcatgcattatcactggtgtcacaaactgtaagctttgtaagttagcactttactcctatagctgatgtaatcaaacttttaaacatttcactaaaccttttaatgaattcttgatagatttaaatagtgtatgtaattttgtaatgcttagactcttgaagagctactttctgttttaatgttaagattcttgtgtcttagttttttttaacatggatgtaattccatgtaaacaggtatggaagtaggaaatgtttaggctggacttggtggattattaattgactttcttgggttcttgggagtcaacattactaaagcagtgtgaatccctgtttgcttcagggcgagatgtgtgacagaggtggcatcaagctcttacagtcccaaccctccaacggaaatgggcgaagatctcaggaatggcatcggtcacaggaaatcgatagtggctggctgctagcatggccacttggggcttaggcagaaatagagccatggtactgaccaaagggaccatagcacatggaataaaactcaaaacaggacttcatgttttatggaaattatatttaaccacttcaacattgtaaatctggataacttttaatatctaaactatataagaaagtaaaatttaacatgttaatatggaaaatttttttatttttgtatcttgatgacttaaatgtaagcaacaaagtggttaaacacatacccatctaaatttttttatagccttccatgttaaactataagtaaataattagttttaaaattgttttgtattttcttattcctgttccctttaccctttgacaacttgaaatgttaccacttcgtcctcatgatgttcttctatcaaccctgcttaggatgagaacaagttgagcagtgccaacggccatgaagaacgtagcaaaaagaggaaaaaaagcaagagcagaagtcgtagtcatgaacgaaagagaagcaaaagtaaggaacggaagcgaagtagagacagagaaaggaaaaagagcaaaagccgtgaaagaaagcgaagtagaagcaaagagaggcgacggagccgctcaagaagtcgagatcgaagatttagaggccgctacagaagtccttactccggaccaaaatttaacagtgccatccgaggaaagattgggttgcctcatagcatcaaattaaggtttttaaacatacttctgaattgtttaaattgtttttcaaggaactaacatgctgtacttgtttggataacttctgaaactttttaactttgcagcagacgacgttcccgaagcaaaagtccattcagaaaagacaagagccctgtgaggtagtttacttctttaaagcctttagctcttaaaaagcttttgcagcttatggtactgttaaatttgatgatatttagtaatttggaccatattaaatcttgcttttgctttcttttgcacttccagtactttaaggtcaagtgaatttctactgagttttcagtagttttcactttaatttcatataattaaagcaacagttatatatttatttatttatttatttattttgagacggagtctcactcagtcacccaggatggagtgcagtagtgcagtcttggcttactgcaacctccgcctcctgggttcaagcagttcttctacctcagccctccaagtagctgggattacaggcatgcaccaccatgcctcgctatttttttattttagtagcgatgggatttcaccatgttggctagcctagtgttgagctccggacctcagatggtccacccaccttggcctctcaaagtggtaggattgcaggtgtgagccaacacacccggccacaaaagttatttatttatgagatggagtctcgctct

SEQ ID NO: 299515 - DNA, 2761 bp, Homo sapiens
  misc_feature (27)..(27): n is a, c, g, or t
  misc_feature (34)..(34): n is a, c, g, or t
  misc_feature (47)..(47): n is a, c, g, or t
  misc_feature (56)..(56): n is a, c, g, or t
cagtcgacttactgcgcctacacctanattgaanacaccgctttgcntcagtatanaaaacggcaagtgtacgtcgatacggagcttgtcgacgctgtcgcaggggtggatcctgagctgccgaagccgccgtcctgctctcccgcgtgggcttctctaattccattgttttttttagattctctcgggcctagccgtccttggaacccgatattcgggctgggcggttccgcggcctgggcctaggggcttaacagtagcaacagaagcggcggcggcggcagcagcagcagcagcagcagcaatctcttcccgaacacgagcaccacaggcgcccgaaggccggaacaggcgtttagagaaaatggcagacgatattgatattgaagcaatgcttgaggctccttacaagaagacttgcctaacgatatctcacctctactcccatgaattcacctttgattccagtgtgaactgtcaatcataaggtagtaattgagtgacttatcgctgtaccgtggtcccctaggtaaaatgactcaactaagaattaccacctccagtttggtatagcaaaaaggtgaatgtagtggtttgggaaaaagcaggggtccaagaataacaaagcatgaccagtctgtggcaagttaaatcttctaatagtcttataagaagaaatgggtgagattttaaaatttatgtatctatgtaagactggtgatagtaaatcttaaaacagtccagtggcaatctgctgctcagttaataattactaaaattcttggatccctgaatagaaattaaaaaaaaaaatacaagaggcagtagagtcaatacaagcttaatacaagcttagagtaaatacaagcttagagtcacttgatgactgttttactgttctccatattgtttttatttttaattaggccctaccatagtatttcacactaaaaacaaaggaattatattggctaatatagtctttgactcatttcggtatctcagtaaaagtaaactgtcttttcattgtttcaccagttggtggtgaaaatagcagtatgcatgcattatcactggtgtcacaaactgtaagctttgtaagttagcactttactcctatagctgatgtaatcaaacttttaaacatttcactaaaccttttaatgaattcttgatagatttaaatagtgtatgtaattttgtaatgcttagactcttgaagagctactttctgttttaatgttaagattcttgtgtcttagttttttttaacatggatgtaattccatgtaaacaggtatggaagtaggaaatgtttaggctggacttggtggattattaattgactttcttgggttcttgggagtcaacattactaaagcagtgtgaatccctgtttgcttcagggcgagatgtgtgacagaggtggcatcaagctcttacagtcccaaccctccaacggaaatgggcgaagatctcaggaatggcatcggtcacaggaaatcgatagtggctggctgctagcatggccacttggggcttaggcagaaatagagccatggtactgaccaaagggaccatagcacatggaataaaactcaaaacaggacttcatgttttatggaaattatatttaaccacttcaacattgtaaatctggataacttttaatatctaaactatataagaaagtaaaatttaacatgttaatatggaaaatttttttatttttgtatcttgatgacttaaatgtaagcaacaaagtggttaaacacatacccatctaaatttttttatagccttccatgttaaactataagtaaataattagttttaaaattgttttgtattttcttattcctgttccctttaccctttgacaacttgaaatgttaccacttcgtcctcatgatgttcttctatcaaccctgcttaggatgagaacaagttgagcagtgccaacggccatgaagaacgtagcaaaaagaggaaaaaaagcaagagcagaagtcgtagtcatgaacgaaagagaagcaaaagtaaggaacggaagcgaagtagagacagagaaaggaaaaagagcaaaagccgtgaaagaaagcgaagtagaagcaaagagaggcgacggagccgctcaagaagtcgagatcgaagatttagaggccgctacagaagtccttagtatgtaactatagttatgattttggtttgagggttattctctgggtattcagatggcagtttaacttgagtgatttgaattgtgaatttttatttttttaatgattggttaaaaagtattgaattaaggatattggcattgaatactagtaaagtgaaaatacagtgcatagacaaataagtaaaaatttgcttttactaggcatactgactattttctgttaaactatcagagtttctaaattgtatgccagtcaacgcaaactggatgaaagcactagagtgcttgaaaaagatgacattgtagtgcccaaatacctaagaaagcttaacaagtgtctgggctgttacagtatttgctaaatacatatttacttaaaattgtaaagttctgatgaatactaagttacacatgtataattagttaacagtaaataaaaagtctttgtcaccgtggctgttttcagctgaaatgtcaggccagttgtgaatttgttgtgtatgctcattgataaagatccttttttgggctcatctgtatttaaggtttgttaataataataaaaggtattccaaacta

SEQ ID NO: 299516 - DNA, 2874 bp, Homo sapiens
  misc_feature (27)..(27): n is a, c, g, or t
  misc_feature (34)..(34): n is a, c, g, or t
  misc_feature (47)..(47): n is a, c, g, or t
  misc_feature (56)..(56): n is a, c, g, or t
cagtcgacttactgcgcctacacctanattgaanacaccgctttgcntcagtatanaaaacggcaagtgtacgtcgatacggagcttgtcgacgctgtcgcaggggtggatcctgagctgccgaagccgccgtcctgctctcccgcgtgggcttctctaattccattgttttttttagattctctcgggcctagccgtccttggaacccgatattcgggctgggcggttccgcggcctgggcctaggggcttaacagtagcaacagaagcggcggcggcggcagcagcagcagcagcagcagcaatctcttcccgaacacgagcaccacaggcgcccgaaggccggaacaggcgtttagagaaaatggcagacgatattgatattgaagcaatgcttgaggctccttacaagaagacttgcctaacgatatctcacctctactcccatgaattcacctttgattccagtgtgaactgtcaatcataaggtagtaattgagtgacttatcgctgtaccgtggtcccctaggtaaaatgactcaactaagaattaccacctccagtttggtatagcaaaaaggtgaatgtagtggtttgggaaaaagcaggggtccaagaataacaaagcatgaccagtctgtggcaagttaaatcttctaatagtcttataagaagaaatgggtgagattttaaaatttatgtatctatgtaagactggtgatagtaaatcttaaaacagtccagtggcaatctgctgctcagttaataattactaaaattcttggatccctgaatagaaattaaaaaaaaaaatacaagaggcagtagagtcaatacaagcttaatacaagcttagagtaaatacaagcttagagtcacttgatgactgttttactgttctccatattgtttttatttttaattaggccctaccatagtatttcacactaaaaacaaaggaattatattggctaatatagtctttgactcatttcggtatctcagtaaaagtaaactgtcttttcattgtttcaccagttggtggtgaaaatagcagtatgcatgcattatcactggtgtcacaaactgtaagctttgtaagttagcactttactcctatagctgatgtaatcaaacttttaaacatttcactaaaccttttaatgaattcttgatagatttaaatagtgtatgtaattttgtaatgcttagactcttgaagagctactttctgttttaatgttaagattcttgtgtcttagttttttttaacatggatgtaattccatgtaaacaggtatggaagtaggaaatgtttaggctggacttggtggattattaattgactttcttgggttcttgggagtcaacattactaaagcagtgtgaatccctgtttgcttcagggcgagatgtgtgacagaggtggcatcaagctcttacagtcccaaccctccaacggaaatgggcgaagatctcaggaatggcatcggtcacaggaaatcgatagtggctggctgctagcatggccacttggggcttaggcagaaatagagccatggtactgaccaaagggaccatagcacatggaataaaactcaaaacaggacttcatgttttatggaaattatatttaaccacttcaacattgtaaatctggataacttttaatatctaaactatataagaaagtaaaatttaacatgttaatatggaaaatttttttatttttgtatcttgatgacttaaatgtaagcaacaaagtggttaaacacatacccatctaaatttttttatagccttccatgttaaactataagtaaataattagttttaaaattgttttgtattttcttattcctgttccctttaccctttgacaacttgaaatgttaccacttcgtcctcatgatgttcttctatcaaccctgcttaggatgagaacaagttgagcagtgccaacggccatgaagaacgtagcaaaaagaggaaaaaaagcaagagcagaagtcgtagtcatgaacgaaagagaagcaaaagtaaggaacggaagcgaagtagagacagagaaaggaaaaagagcaaaagccgtgaaagaaagcgaagtagaagcaaagagaggcgacggagccgctcaagaagtcgagatcgaagatttagaggccgctacagaagtccttagtatgtaactatagttatgattttggtttgagggttattctctgggtattcagatggcagtttaacttgagtgatttgaattgtgaatttttatttttttaatgattggttaaaaagtattgaattaaggatattggcattgaatactagtaaagtgaaaatacagtgcatagacaaataagtaaaaatttgcttttactaggcatactgactattttctgttaaactatcagagtttctaaattgtatgccagtcaacgcaaactggatgaaagcactagagtgcttgaaaaagatgacattgtagtgcccaaatacctaagaaagcttaacaagtgtctgggctgttacagtatttgctaaatacatatttacttaaaattgtaaagttctgatgaatactaagttacacatgtataattagttaacagtaaataaaaagtctttgtcaccgtggctgttttcagctgaaatgtcaggccagttgtgaatttgttgtgtatgctcattgataaagatccttttttgggctcatctgtatttaaggtttgttaataataataaaaggtattccaaactaaaagtgttttgaagattagatcactagaaatttggatgtggatatttaaagttggaaacaaatatattatggttattaaataactatattaaccacctacaattctaaggatt

SEQ ID NO: 299517 - DNA, 2641 bp, Homo sapiens
  misc_feature (27)..(27): n is a, c, g, or t
  misc_feature (34)..(34): n is a, c, g, or t
  misc_feature (47)..(47): n is a, c, g, or t
  misc_feature (56)..(56): n is a, c, g, or t
cagtcgacttactgcgcctacacctanattgaanacaccgctttgcntcagtatanaaaacggcaagtgtacgtcgatacggagcttgtcgacgctgtcgcaggggtggatcctgagctgccgaagccgccgtcctgctctcccgcgtgggcttctctaattccattgttttttttagattctctcgggcctagccgtccttggaacccgatattcgggctgggcggttccgcggcctgggcctaggggcttaacagtagcaacagaagcggcggcggcggcagcagcagcagcagcagcagcaatctcttcccgaacacgagcaccacaggcgcccgaaggccggaacaggcgtttagagaaaatggcagacgatattgatattgaagcaatgcttgaggctccttacaagaagacttgcctaacgatatctcacctctactcccatgaattcacctttgattccagtgtgaactgtcaatcataaggtagtaattgagtgacttatcgctgtaccgtggtcccctaggtaaaatgactcaactaagaattaccacctccagtttggtatagcaaaaaggtgaatgtagtggtttgggaaaaagcaggggtccaagaataacaaagcatgaccagtctgtggcaagttaaatcttctaatagtcttataagaagaaatgggtgagattttaaaatttatgtatctatgtaagactggtgatagtaaatcttaaaacagtccagtggcaatctgctgctcagttaataattactaaaattcttggatccctgaatagaaattaaaaaaaaaaatacaagaggcagtagagtcaatacaagcttaatacaagcttagagtaaatacaagcttagagtcacttgatgactgttttactgttctccatattgtttttatttttaattaggccctaccatagtatttcacactaaaaacaaaggaattatattggctaatatagtctttgactcatttcggtatctcagtaaaagtaaactgtcttttcattgtttcaccagttggtggtgaaaatagcagtatgcatgcattatcactggtgtcacaaactgtaagctttgtaagttagcactttactcctatagctgatgtaatcaaacttttaaacatttcactaaaccttttaatgaattcttgatagatttaaatagtgtatgtaattttgtaatgcttagactcttgaagagctactttctgttttaatgttaagattcttgtgtcttagttttttttaacatggatgtaattccatgtaaacaggtatggaagtaggaaatgtttaggctggacttggtggattattaattgactttcttgggttcttgggagtcaacattactaaagcagtgtgaatccctgtttgcttcagggcgagatgtgtgacagaggtggcatcaagctcttacagtcccaaccctccaacggaaatgggcgaagatctcaggaatggcatcggtcacaggaaatcgatagtggctggctgctagcatggccacttggggcttaggcagaaatagagccatggtactgaccaaagggaccatagcacatggaataaaactcaaaacaggacttcatgttttatggaaattatatttaaccacttcaacattgtaaatctggataacttttaatatctaaactatataagaaagtaaaatttaacatgttaatatggaaaatttttttatttttgtatcttgatgacttaaatgtaagcaacaaagtggttaaacacatacccatctaaatttttttatagccttccatgttaaactataagtaaataattagttttaaaattgttttgtattttcttattcctgttccctttaccctttgacaacttgaaatgttaccacttcgtcctcatgatgttcttctatcaaccctgcttaggatgagaacaagttgagcagtgccaacggccatgaagaacgtagcaaaaagtgagttttaagaaggggcttgggggagggtggtgagcttttttgtggttttagaccttaagttgtgttcctgtggctaaagtatacaaaattctcttctgaagcttttctttgctgcttttagaaaattggttctttgccttttgagacaaactcttggaggaactgtggatttttttgcttagatttcagaatatagtttcagataccttcccctccaagtccatcatgacaatctggtgacaagttctgtattagaggttgtcttgttttaaatttgttaactttggtttgatatttggttatcttactgataaaactgttatatatccattgatcttaaaaggtagaaagagttaaattaggtgataactaggccatggaaagtattgtttgccctaaagtgccgaaggagtcaaagctgtgaattatttctgcaacttgctgctcagaggcccttttggaagtgatggaacaggtacttaagtacttctaaaggtggctttcattatcttaggccttttaaactctagacttaacagggtggggattttggaaattatgaatatatctgtacactttatttgggtaagatgagtgactcaatagaactctgctatagactagtacagaaaacagtgtacgaaaagtctta

SEQ ID NO: 299518 - DNA, 3201 bp, Homo sapiens
  misc_feature (27)..(27): n is a, c, g, or t
  misc_feature (34)..(34): n is a, c, g, or t
  misc_feature (47)..(47): n is a, c, g, or t
  misc_feature (56)..(56): n is a, c, g, or t
cagtcgacttactgcgcctacacctanattgaanacaccgctttgcntcagtatanaaaacggcaagtgtacgtcgatacggagcttgtcgacgctgtcgcaggggtggatcctgagctgccgaagccgccgtcctgctctcccgcgtgggcttctctaattccattgttttttttagattctctcgggcctagccgtccttggaacccgatattcgggctgggcggttccgcggcctgggcctaggggcttaacagtagcaacagaagcggcggcggcggcagcagcagcagcagcagcagcaatctcttcccgaacacgagcaccacaggcgcccgaaggccggaacaggcgtttagagaaaatggcagacgatattgatattgaagcaatgcttgaggctccttacaagaagacttgcctaacgatatctcacctctactcccatgaattcacctttgattccagtgtgaactgtcaatcataaggtagtaattgagtgacttatcgctgtaccgtggtcccctaggtaaaatgactcaactaagaattaccacctccagtttggtatagcaaaaaggtgaatgtagtggtttgggaaaaagcaggggtccaagaataacaaagcatgaccagtctgtggcaagttaaatcttctaatagtcttataagaagaaatgggtgagattttaaaatttatgtatctatgtaagactggtgatagtaaatcttaaaacagtccagtggcaatctgctgctcagttaataattactaaaattcttggatccctgaatagaaattaaaaaaaaaaatacaagaggcagtagagtcaatacaagcttaatacaagcttagagtaaatacaagcttagagtcacttgatgactgttttactgttctccatattgtttttatttttaattaggccctaccatagtatttcacactaaaaacaaaggaattatattggctaatatagtctttgactcatttcggtatctcagtaaaagtaaactgtcttttcattgtttcaccagttggtggtgaaaatagcagtatgcatgcattatcactggtgtcacaaactgtaagctttgtaagttagcactttactcctatagctgatgtaatcaaacttttaaacatttcactaaaccttttaatgaattcttgatagatttaaatagtgtatgtaattttgtaatgcttagactcttgaagagctactttctgttttaatgttaagattcttgtgtcttagttttttttaacatggatgtaattccatgtaaacaggtatggaagtaggaaatgtttaggctggacttggtggattattaattgactttcttgggttcttgggagtcaacattactaaagcagtgtgaatccctgtttgcttcagggcgagatgtgtgacagaggtggcatcaagctcttacagtcccaaccctccaacggaaatgggcgaagatctcaggaatggcatcggtcacaggaaatcgatagtggctggctgctagcatggccacttggggcttaggcagaaatagagccatggtactgaccaaagggaccatagcacatggaataaaactcaaaacaggacttcatgttttatggaaattatatttaaccacttcaacattgtaaatctggataacttttaatatctaaactatataagaaagtaaaatttaacatgttaatatggaaaatttttttatttttgtatcttgatgacttaaatgtaagcaacaaagtggttaaacacatacccatctaaatttttttatagccttccatgttaaactataagtaaataattagttttaaaattgttttgtattttcttattcctgttccctttaccctttgacaacttgaaatgttaccacttcgtcctcatgatgttcttctatcaaccctgcttaggatgagaacaagttgagcagtgccaacggccatgaagaacgtagcaaaaaaatactttgcattaaaaatttagatcttcttacatggaagaggtcaaatccagttatagcaaaacacctttactgcagaggccatataaccaaaaagtccaaaggcccagcccagtggaccatttacttcagtgatgttcagtacaaaatttcactgccattaaagactttggaaagtcccttttaagttgtaacaggatttgactattagtgtggatttcgataacccttctttagttaatgtaataaatgctctttgaagctggaaatatactggtttcttgcacccttgtagttttctctgggcttttatgcaaaagattgtattttctgaatgtcttagtatgttgctgtctttttacctgcctggggttgccttcagatgtgggtgaggacttgtttacaaaaagtcctagaagaccttaagttaaaattagctctccaattttcaagtgttttcttttggcagaataagttttgggtcctatgagaggtaaataggttggttgcctctcttgctatagcccatctagagcagaacaaaaactttgtttttgagggggatggagttactttttaccttgttccctaattgaatatatttaggacttttggttttagaaatctcagagttctatagttggaatagtgtcacagagatagtgttaggtttcttaggcaacaaaattggagtgttacctattgcccatctgggcatggctttgatgagttctatataaataatgagtgtagcctaattttctgtcatgtgctacctagcatatacatttctgacagtcaggtggattatcttgaaattttagacaaactttctgcctccttggaaagctctacatctccttgtgattggagtgtgggtttcaagattccagaaggtgggtgtcttcattttctattttcaatgcactctaaagatgacctgcttacaggttctctgaggcagacctcagttgctcttgtgatatgtaactttgctttgataaggaataaacaattacatatccagataatgatacagaattgtcaaaatgtttaatcattaagccactacaaatagacattttcgtggaataaactgattttgaaatgtctttcaatttatattgaaatatctgaaggcacctctaaaatttgggtgatgacacagaggtatagattataagatttaattatgaatgggtggtatactgtgaa

SEQ ID NO: 299519 - DNA, 1331 bp, Homo sapiens
  misc_feature (27)..(27): n is a, c, g, or t
  misc_feature (34)..(34): n is a, c, g, or t
  misc_feature (47)..(47): n is a, c, g, or t
  misc_feature (56)..(56): n is a, c, g, or t
  misc_feature (1312)..(1312): n is a, c, g, or t
cagtcgacttactgcgcctacacctanattgaanacaccgctttgcntcagtatanaaaacggcaagtgtacgtcgatacggagcttgtcgacgctgtcgcaggggtggatcctgagctgccgaagccgccgtcctgctctcccgcgtgggcttctctaattccattgttttttttagattctctcgggcctagccgtccttggaacccgatattcgggctgggcggttccgcggcctgggcctaggggcttaacagtagcaacagaagcggcggcggcggcagcagcagcagcagcagcagcaatctcttcccgaacacgagcaccacaggcgcccgaaggccggaacaggcgtttagagaaaatggcagacgatattgatattgaagcaatgcttgaggctccttacaagaagacttgcctaacgatatctcacctctactcccatgaattcacctttgattccagtgtgaactgtcaatcataaggtagtaattgagtgacttatcgctgtaccgtggtcccctaggtaaaatgactcaactaagaattaccacctccagtttggtatagcaaaaaggtgaatgtagtggtttgggaaaaagcaggggtccaagaataacaaagcatgaccagtctgtggcaagttaaatcttctaatagtcttataagaagaaatgggtgagattttaaaatttatgtatctatgtaagactggtgatagtaaatcttaaaacagtccagtggcaatctgctgctcagttaataattactaaaattcttggatccctgaatagaaattaaaaaaaaaaatacaagaggcagtagagtcaatacaagcttaatacaagcttagagtaaatacaagcttagagtcacttgatgactgttttactgttctccatattgtttttatttttaattaggccctaccatagtatttcacactaaaaacaaaggaattatattggctaatatagtctttgactcatttcggtatctcagtaaaagtaaactgtcttttcattgtttcaccagttggtggtgaaaatagcagtatgcatgcattatcactggtgtcacaaactgtaagctttgtaagttagcactttactcctatagctgatgtaatcaaacttttaaacatttcactaaaccttttaatgaattcttgatagatttaaatagtgtatgtaattttgtaatgcttagactcttgaagagctactttctgttttaatgttaagattcttgtgtcttagttttttttaacatggatgtaattccatgtaaacaggtatggaagtggtgnttggccccctccccccccc

SEQ ID NO: 299520 - DNA, 1332 bp, Homo sapiens
  misc_feature (27)..(27): n is a, c, g, or t
  misc_feature (34)..(34): n is a, c, g, or t
  misc_feature (47)..(47): n is a, c, g, or t
  misc_feature (56)..(56): n is a, c, g, or t
cagtcgacttactgcgcctacacctanattgaanacaccgctttgcntcagtatanaaaacggcaagtgtacgtcgatacggagcttgtcgacgctgtcgcaggggtggatcctgagctgccgaagccgccgtcctgctctcccgcgtgggcttctctaattccattgttttttttagattctctcgggcctagccgtccttggaacccgatattcgggctgggcggttccgcggcctgggcctaggggcttaacagtagcaacagaagcggcggcggcggcagcagcagcagcagcagcagcaatctcttcccgaacacgagcaccacaggcgcccgaaggccggaacaggcgtttagagaaaatggcagacgatattgatattgaagcaatgcttgaggctccttacaagaagacttgcctaacgatatctcacctctactcccatgaattcacctttgattccagtgtgaactgtcaatcataaggtagtaattgagtgacttatcgctgtaccgtggtcccctaggtaaaatgactcaactaagaattaccacctccagtttggtatagcaaaaaggtgaatgtagtggtttgggaaaaagcaggggtccaagaataacaaagcatgaccagtctgtggcaagttaaatcttctaatagtcttataagaagaaatgggtgagattttaaaatttatgtatctatgtaagactggtgatagtaaatcttaaaacagtccagtggcaatctgctgctcagttaataattactaaaattcttggatccctgaatagaaattaaaaaaaaaaatacaagaggcagtagagtcaatacaagcttaatacaagcttagagtaaatacaagcttagagtcacttgatgactgttttactgttctccatattgtttttatttttaattaggccctaccatagtatttcacactaaaaacaaaggaattatattggctaatatagtctttgactcatttcggtatctcagtaaaagtaaactgtcttttcattgtttcaccagttggtggtgaaaatagcagtatgcatgcattatcactggtgtcacaaactgtaagctttgtaagttagcactttactcctatagctgatgtaatcaaacttttaaacatttcactaaaccttttaatgaattcttgatagatttaaatagtgtatgtaattttgtaatgcttagactcttgaagagctactttctgcctcaatgcccattctctctcgccccacctcttctccccaccctcgcctctctcccctctccccccccccccctcctcctcccccctcctccccctcc

SEQ ID NO: 299521 - DNA, 803 bp, Homo sapiens
  misc_feature (27)..(27): n is a, c, g, or t
  misc_feature (34)..(34): n is a, c, g, or t
  misc_feature (47)..(47): n is a, c, g, or t
  misc_feature (56)..(56): n is a, c, g, or t
cagtcgacttactgcgcctacacctanattgaanacaccgctttgcntcagtatanaaaacggcaagtgtacgtcgatacggagcttgtcgacgctgtcgcaggggtggatcctgagctgccgaagccgccgtcctgctctcccgcgtgggcttctctaattccattgttttttttagattctctcgggcctagccgtccttggaacccgatattcgggctgggcggttccgcggcctgggcctaggggcttaacagtagcaacagaagcggcggcggcggcagcagcagcagcagcagcagcaatctcttcccgaacacgagcaccacaggcgcccgaaggccggaacaggcgtttagagaaaatggcagacgatattgatattgaagcaatgcttgaggctccttacaagaagacttgcctaacgatatctcacctctactcccatgaattcacctttgattccagtgtgaactgtcaatcataaggtagtaattgagtgacttatcgctgtaccgtggtcccctaggtaaaatgactcaactaagaattaccacctccagtttggtatagcaaaaaggtgaatgtagtggtttgggaaaaagcaggggtccaagaataacaaagcatgaccagtctgtggcaagttaaatcttctaatagtcttataagaagaaatgggtgagattttaaaatttatgtatctatgtaagactggtgatagtaaatcttaaaacagtccagtggcaatctgctgctcagttaataattactaaaattcttggatccctgaatagaaatta

SEQ ID NO: 299522 - DNA, 1027 bp, Homo sapiens
  misc_feature (27)..(27): n is a, c, g, or t
  misc_feature (34)..(34): n is a, c, g, or t
  misc_feature (47)..(47): n is a, c, g, or t
  misc_feature (56)..(56): n is a, c, g, or t
cagtcgacttactgcgcctacacctanattgaanacaccgctttgcntcagtatanaaaacggcaagtgtacgtcgatacggagcttgtcgacgctgtcgcaggggtggatcctgagctgccgaagccgccgtcctgctctcccgcgtgggcttctctaattccattgttttttttagattctctcgggcctagccgtccttggaacccgatattcgggctgggcggttccgcggcctgggcctaggggcttaacagtagcaacagaagcggcggcggcggcagcagcagcagcagcagcagcaatctcttcccgaacacgagcaccacaggcgcccgaaggccggaacaggcgtttagagaaaatggcagacgatattgatattgaagcaatgcttgaggctccttacaagaaggtgagaaaaaacatgtcggtgaggtttatatatttcttaatttagcattattcacgaaactactgctgaaatgtaaactaacctccccggagccctcttgatttatcttatcagagatgcattacgtgtaacttacaaaagtaaatatatgctattgatgtaataatattgtgcagtagtttcacttcagcgtgatgaataaatgcccatctatctctctttgtacttgcctaacgatatctcacctctactcccatgaattcacctttgattccagtgtgaactgtcaatcataaggtagtaattgagtgacttatcgctgtaccgtggtcccctaggtaaaatgactcaactaagaattaccacctccagtttggtatagcaaaaaggtgaatgtagtggtttgggaaaaagcaggggtccaagaataacaaagcatgaccagtctgtggcaagttaaatcttctaatagtcttataagaagaaatgggtgagattttaaaatttatgtatctatgtaagactggtgatagtaaatcttaaaacagtccagtggcaatctgctgctcagttaataattactaaaattcttggatccctgaatagaaatta

SEQ ID NO: 299523 - DNA, 1036 bp, Homo sapiens
agtttcgcgctaaatgccggcgccgttactgcccccgtgtttattttttcgcccccaattgtgtccccgcgtaaaacaaaggggcgaccatattttcaacggccaggcccgaagccacagctagaaagcagctattattacagctggctcttcagaagactctacgatttccctcactcctgatccttgaatcagggaacgtcaatcataggatgagaacaagttgagcagtgccaacggccatgaagaacgtagcaaaaagaggaaaaaaagcaagagcagaagtcgtagtcatgaacgaaagagaagcaaaagtaaggaacggaagcgaagtagagacagagaaaggaaaaagagcaaaagccgtgaaagaaagcgaagtagaagcaaagagaggcgacggagccgctcaagaagtcgagatcgaagatttagaggccgctacagaagtccttagtatgtaactatagttatgattttggtttgagggttattctctgggtattcagatggcagtttaacttgagtgatttgaattgtgaatttttatttttttaatgattggttaaaaagtattgaattaaggatattggcattgaatactagtaaagtgaaaatacagtgcatagacaaataagtaaaaatttgcttttactaggcatactgactattttctgttaaactatcagagtttctaaattgtatgccagtcaacgcaaactggatgaaagcactagagtgcttgaaaaagatgacattgtagtgcccaaatacctaagaaagcttaacaagtgtctgggctgttacagtatttgctaaatacatatttacttaaaattgtaaagttctgatgaatactaagttacacatgtataattagttaacagtaaataaaaagtctttgtcaccgtggctgttttcagctgaaatgtcaggccagttgtgaatttgttgtgtatgctcattgataaagatccttttttgggctcatctgtatttaaggtttgttaataataataaaaggtattccaaacta

SEQ ID NO: 299524 - DNA, 324 bp, Homo sapiens
taaacataacttgggtccattttgcatacagcaacatctttaccttttttttcattttttctgtagggcaatgtgtatgtgaagtgcccatcaattgctgcagctattgctgctgtcaatgcattgcatggcaggtggtttgctggtgagtttgaatttattttttgactgattgttattaaggctctataatgaagatgctaaacccaacatgtctgtttcttttaataggtaaaatgataacagcagcatatgtacctcttccaacttaccacaacctgtttcctgattctatgacagcaacacagctactggttccaagta

SEQ ID NO: 299525 - DNA, 3599 bp, Homo sapiens
aacgctttttgaattgaattttttaaaatgcatgtattccttttcaaactaaaatgatttttaagcacacaaaagagaatcaaaggctgagaaacaatgatttcacacactatgtttgcaagaacaagttattcccaaagcaattcctacaggttctgcacctgtgttgcttttataaagcaagcacagcgtaatgtgtaagcactattgtcctgaatgctttatccatgaaggtacgtgttaaggatccataactggtagaagggcgtttaaaacgcttttttttcttttaaagagacagggtctcactatgttgcccaggctgctctcttaactacgaggctcggagtcaggaatggagagaagggtaatggttttacctcttattgtggaaacctgttgagatcacagagaatatactgacggcataaaagggcagaaccatagcagggtgcgcgctgctgtagttgccttccatggatctataggagagcaagtcctccaggagaagaagtcctcaccagtgaacggagacctctctgaactaaggataccatggccacgtcagccccactacggagcctggaagaggaggtgacctgctccatctgtcttgattacctgcgggaccctgtgaccattgactgtggccacgtcttctgccgcagctgcaccacagacgtccgccccatctcagggagccgccccgtctgcccactctgcaagaagccttttaagaaggagaacatccgacccgtgtggcaactggccagcctggtggagaacattgagcggctgaaggtggacaagggcaggcagccgggagaggtgacccgggagcagcaggatgcaaagttgtgcgagcgacaccgagagaagctgcactactactgtgaggacgacgggaagctgctgtgcgtgatgtgccgggagtcccgggagcacaggccccacacggccgtcctcatggagaaggccgcccagccccacagggaaaaaatcctgaaccacctgagtaccctaaggagggacagagacaaaattcagggcttccaggcaaagggagaagctgatatcctggccgcgctgaagaagctccaggaccagaggcagtacattgtggctgagtttgagcagggtcatcagttcctgagggagcgggaggaacacctgctggaacagctggcgaagctggagcaggagctcacggagggcagggagaagttcaagagccggggcgtcggggagcttgcccggctggccctggtcatctccgaactggagggcaaggcgcagcagccagctgcagagctcatgcaggacacgagagacttcctaaacaggtatccacggaagaagttctgggttgggaaacccattgctcgagtggttaaaaaaaagaccggagaattctcagataaactcctctctctgcaacgaggcctgagggaattccaggggaagctgctgagagacttggaatataagacagtgagcgtcaccctggacccacagtcggccagtgggtacctgcagctgtcagaggactggaagtgcgtgacctacaccagcctgtacaagagtgcctacctgcacccccagcagtttgactgtgagcctggggtgctaggcagcaagggcttcacctggggcaaggtctactgggaagtggaagtggagagggagggctggtctgaggatgaagaagagggggatgaggaggaagagggagaagaggaggaggaggaagaggaggccggctatggggatggatatgacgactgggaaacggacgaagatgaggaatcgttgggcgatgaagaggaagaagaggaggaggaagaggaggaagttctggaaagctgcatggtgggggtggctagagactctgtgaagaggaagggagacctctccctgcggccagaggatggcgtgtgggcgctgcgcctctcctcctccggcatctgggccaacaccagccccgaggctgagcttttcccagcactgcggccccggagagtgggcatcgccctggattatgaagggggcaccgtgactttcaccaacgcagagtcacaggaactcatctacaccttcactgccaccttcacccggcgcctggtccccttcctgtggctcaagtggccaggaacacgcctcctgctaagaccctgagccctgacatctgcccccagccccaaccctcagatgcttcacttctttggaattccaggactctcaatggggggacgggatgcctggcctaagcacctggagcaggggaccccatatccactggtagccacctccccattgctgtggccccctgaaatctcactcagtgctgttgctccatctactgccctaatggggctcttttcccacctcctgctggtttcccgagggaacttctgaccctggagtccatgagggctcctttcctttttgaccacgaccttggccccagctctgcactctctggaataagggcccgatgcagcattttcttgcccagtgtggcaagacctcagaaaaaccagtcaattacgcctaagatcattttgctgtccttaaaccccccaggttccttcttgcacaaatccactctgctgcccaccttccctggcattttaaacagacctaccccaccccaactcagagttaagcatacatggcaatgctgaaaataaacaaaatccactgaggcttcccaggccatttaaagcctggagtaccagcgcatatcatctcatggggtccagagtggagtccaggcttctctgaaaccagggctgagcatatttccatagccaaggaggtgggactccctggagctatctgtggtcttagggaaggatccagacatacacggctttggggtacaagctgtgatcactgatcaataaattatctctagattggtccttgtgaggggagttttaagaatccagaacatcttgctcttgatcagcacatccaaaaacaccaagacaaacatccagtggagcagaacctctcctgcctcgggagttctgaccgggttccccagcagggtgttaagcctctgtctctggccctaccagcatccaggttccactttcctaggagagagtggagatgggaagacagggaaaggaaggcagcaggaggccacaagcccaccaggtcttcatgtcaagagagggagtaacatgtcttctcattgcccacggacccaacctctgtccaggtgcccctcatcatcacagtttaacacaagctcccctgctccagccaaattgatctcccagtcttgtccttacccattccaagtgctctgccagcccctgttcatccaagttttaagtcctccaccctgttctaagagactgttccaacggctctgggcctcagtggtcacttgaccaccattgtctcagagctgcccactttgtgtgtgtcacatgctgcctgagtcacatgtacatcttatttctgcctctagttttgtaagctcctggagggcggataacatcttatactactcttgtattctcatggcacctagtgcagtgctgggcacagagtaggtgctcaataaagacttgttgaatgaacag

SEQ ID NO: 299526 - DNA, 917 bp, Homo sapiens
aggaggaccgtgcatgtagggattcgcggccggagctcgggaccggagtcaggaatggagagaagggtaatggttttacctcttattgtggaaacctgttgagatcacagagaatatactgacggcataaaagggcagaaccatagcagggtgcggttgcttcattccagcctcgcagtcacctctgtgccctgctggttgtcttcccagcgctgctgtagttgccttccatggatctataggagagcaagtcctccaggagctggtggtgtctgtcgattgactgagtgctggagctggcagccctgtgcaggctgccacctttgcccctttactgtgcttgctcctgactctatgtcgcgtctccaaggagaagaagtcctcaccagtgaacggagacctctctgaactaaggataccatggccacgtcagccccactacggagcctggaagaggaggtgacctgctccatctgtcttgattacctgcgggaccctgtgaccattgactgtggccacgtcttctgccgcagctgcaccacagacgtccgccccatctcagggagccgccccgtctgcccactctgcaagaagccttttaagaaggagaacatccgacccgtgtggcaactggccagcctggtggagaacattgagcggctgaaggtggacaagggcaggcagccgggagaggtgacccgggagcagcaggatgcaaagttgtgcgagcgacaccgagagaagctgcactactactgtgaggacgacgggaagctgctgtgcgtgatgtgccgggagtcccgggagcacaggccccacacggccgtcctcatggagaaggccgcccagccccacaggaacatctgacacctgatactcatggggacaagacaacacggctcccgcaagagaccacc

SEQ ID NO: 299527 - DNA, 522 bp, Homo sapiens
gcaggagcgggacccggaacagaccgccgtgagagaggaggggtgccggccgggattcgcggcccggagctcgggaccggagtcaggaatggagagaagggtaatggttttacctcttattgtggaaacctgttgagatcacagagaatatactgacggcataaaagggcagaaccatagcagggtgcggttgcttcattccagcctcgcagtcacctctgtgccctgctggttgtcttcccagcgctgctgtagttgccttccatggatctataggagagcaagtcctccaggttccaacggctctgggcctcagtggtcacttgaccaccattgtctcagagctgcccactttgtgtgtgtcacatgctgcctgagtcacatgtacatcttatttctgcctctagttttgtaagctcctggagggcggataacatcttatactactcttgtattctcatggcacctagtgcagtgctgggcacagagtaggtgctcaataaagacttgttgaatgaacag

SEQ ID NO: 299528 - DNA, 3387 bp, Homo sapiens
gcaggagcgggacccggaacagaccgccgtgagagaggaggggtgccggccgggattcgcggcccggagctcgggaccggagtcaggaatggagagaagggtaatggttttacctcttattgtggaaacctgttgagatcacagagaatatactgacggcataaaagggcagaaccatagcagggtgcggttgcttcattccagcctcgcagtcacctctgtgccctgctggttgtcttcccagcgctgctgtagttgccttccatggatctataggagagcaagtcctccaggagaagaagtcctcaccagtgaacggagacctctctgaactaaggataccatggccacgtcagccccactacggagcctggaagaggaggtgacctgctccatctgtcttgattacctgcgggaccctgtgaccattgactgtggccacgtcttctgccgcagctgcaccacagacgtccgccccatctcagggagccgccccgtctgcccactctgcaagaagccttttaagaaggagaacatccgacccgtgtggcaactggccagcctggtggagaacattgagcggctgaaggtggacaagggcaggcagccgggagaggtgacccgggagcagcaggatgcaaagttgtgcgagcgacaccgagagaagctgcactactactgtgaggacgacgggaagctgctgtgcgtgatgtgccgggagtcccgggagcacaggccccacacggccgtcctcatggagaaggccgcccagccccacagggaaaaaatcctgaaccacctgagtaccctaaggagggacagagacaaaattcagggcttccaggcaaagggagaagctgatatcctggccgcgctgaagaagctccaggaccagaggcagtacattgtggctgagtttgagcagggtcatcagttcctgagggagcgggaggaacacctgctggaacagctggcgaagctggagcaggagctcacggagggcagggagaagttcaagagccggggcgtcggggagcttgcccggctggccctggtcatctccgaactggagggcaaggcgcagcagccagctgcagagctcatgcaggacacgagagacttcctaaacaggtatccacggaagaagttctgggttgggaaacccattgctcgagtggttaaaaaaaagaccggagaattctcagataaactcctctctctgcaacgaggcctgagggaattccaggggaagctgctgagagacttggaatataagacagtgagcgtcaccctggacccacagtcggccagtgggtacctgcagctgtcagaggactggaagtgcgtgacctacaccagcctgtacaagagtgcctacctgcacccccagcagtttgactgtgagcctggggtgctaggcagcaagggcttcacctggggcaaggtctactgggaagtggaagtggagagggagggctggtctgaggatgaagaagagggggatgaggaggaagagggagaagaggaggaggaggaagaggaggccggctatggggatggatatgacgactgggaaacggacgaagatgaggaatcgttgggcgatgaagaggaagaagaggaggaggaagaggaggaagttctggaaagctgcatggtgggggtggctagagactctgtgaagaggaagggagacctctccctgcggccagaggatggcgtgtgggcgctgcgcctctcctcctccggcatctgggccaacaccagccccgaggctgagcttttcccagcactgcggccccggagagtgggcatcgccctggattatgaagggggcaccgtgactttcaccaacgcagagtcacaggaactcatctacaccttcactgccaccttcacccggcgcctggtccccttcctgtggctcaagtggccaggaacacgcctcctgctaagaccctgagccctgacatctgcccccagccccaaccctcagatgcttcacttctttggaattccaggactctcaatggggggacgggatgcctggcctaagcacctggagcaggggaccccatatccactggtagccacctccccattgctgtggccccctgaaatctcactcagtgctgttgctccatctactgccctaatggggctcttttcccacctcctgctggtttcccgagggaacttctgaccctggagtccatgagggctcctttcctttttgaccacgaccttggccccagctctgcactctctggaataagggcccgatgcagcattttcttgcccagtgtggcaagacctcagaaaaaccagtcaattacgcctaagatcattttgctgtccttaaaccccccaggttccttcttgcacaaatccactctgctgcccaccttccctggcattttaaacagacctaccccaccccaactcagagttaagcatacatggcaatgctgaaaataaacaaaatccactgaggcttcccaggccatttaaagcctggagtaccagcgcatatcatctcatggggtccagagtggagtccaggcttctctgaaaccagggctgagcatatttccatagccaaggaggtgggactccctggagctatctgtggtcttagggaaggatccagacatacacggctttggggtacaagctgtgatcactgatcaataaattatctctagattggtccttgtgaggggagttttaagaatccagaacatcttgctcttgatcagcacatccaaaaacaccaagacaaacatccagtggagcagaacctctcctgcctcgggagttctgaccgggttccccagcagggtgttaagcctctgtctctggccctaccagcatccaggttccactttcctaggagagagtggagatgggaagacagggaaaggaaggcagcaggaggccacaagcccaccaggtcttcatgtcaagagagggagtaacatgtcttctcattgcccacggacccaacctctgtccaggtgcccctcatcatcacagtttaacacaagctcccctgctccagccaaattgatctcccagtcttgtccttacccattccaagtgctctgccagcccctgttcatccaagttttaagtcctccaccctgttctaagagactgttccaacggctctgggcctcagtggtcacttgaccaccattgtctcagagctgcccactttgtgtgtgtcacatgctgcctgagtcacatgtacatcttatttctgcctctagttttgtaagctcctggagggcggataacatcttatactactcttgtattctcatggcacctagtgcagtgctgggcacagagtaggtgctcaataaagacttgttgaatgaacag

SEQ ID NO: 299529 - DNA, 3139 bp, Homo sapiens
gcccggaagctcggggaccgggaagaaagaaagtcctccaaccaagtgaaaacggaaggaccctctctgaaaccttaaagcggaattaacccaatgtgcccacgtcagccccactacggagcctggaagaggaggtgacctgctccatctgtcttgattacctgcgggaccctgtgaccattgactgtggccacgtcttctgccgcagctgcaccacagacgtccgccccatctcagggagccgccccgtctgcccactctgcaagaagccttttaagaaggagaacatccgacccgtgtggcaactggccagcctggtggagaacattgagcggctgaaggtggacaagggcaggcagccgggagaggtgacccgggagcagcaggatgcaaagttgtgcgagcgacaccgagagaagctgcactactactgtgaggacgacgggaagctgctgtgcgtgatgtgccgggagtcccgggagcacaggccccacacggccgtcctcatggagaaggccgcccagccccacagggaaaaaatcctgaaccacctgagtaccctaaggagggacagagacaaaattcagggcttccaggcaaagggagaagctgatatcctggccgcgctgaagaagctccaggaccagaggcagtacattgtggctgagtttgagcagggtcatcagttcctgagggagcgggaggaacacctgctggaacagctggcgaagctggagcaggagctcacggagggcagggagaagttcaagagccggggcgtcggggagcttgcccggctggccctggtcatctccgaactggagggcaaggcgcagcagccagctgcagagctcatgcaggacacgagagacttcctaaacaggtatccacggaagaagttctgggttgggaaacccattgctcgagtggttaaaaaaaagaccggagaattctcagataaactcctctctctgcaacgaggcctgagggaattccaggggaagctgctgagagacttggaatataagacagtgagcgtcaccctggacccacagtcggccagtgggtacctgcagctgtcagaggactggaagtgcgtgacctacaccagcctgtacaagagtgcctacctgcacccccagcagtttgactgtgagcctggggtgctaggcagcaagggcttcacctggggcaaggtctactgggaagtggaagtggagagggagggctggtctgaggatgaagaagagggggatgaggaggaagagggagaagaggaggaggaggaagaggaggccggctatggggatggatatgacgactgggaaacggacgaagatgaggaatcgttgggcgatgaagaggaagaagaggaggaggaagaggaggaagttctggaaagctgcatggtgggggtggctagagactctgtgaagaggaagggagacctctccctgcggccagaggatggcgtgtgggcgctgcgcctctcctcctccggcatctgggccaacaccagccccgaggctgagcttttcccagcactgcggccccggagagtgggcatcgccctggattatgaagggggcaccgtgactttcaccaacgcagagtcacaggaactcatctacaccttcactgccaccttcacccggcgcctggtccccttcctgtggctcaagtggccaggaacacgcctcctgctaagaccctgagccctgacatctgcccccagccccaaccctcagatgcttcacttctttggaattccaggactctcaatggggggacgggatgcctggcctaagcacctggagcaggggaccccatatccactggtagccacctccccattgctgtggccccctgaaatctcactcagtgctgttgctccatctactgccctaatggggctcttttcccacctcctgctggtttcccgagggaacttctgaccctggagtccatgagggctcctttcctttttgaccacgaccttggccccagctctgcactctctggaataagggcccgatgcagcattttcttgcccagtgtggcaagacctcagaaaaaccagtcaattacgcctaagatcattttgctgtccttaaaccccccaggttccttcttgcacaaatccactctgctgcccaccttccctggcattttaaacagacctaccccaccccaactcagagttaagcatacatggcaatgctgaaaataaacaaaatccactgaggcttcccaggccatttaaagcctggagtaccagcgcatatcatctcatggggtccagagtggagtccaggcttctctgaaaccagggctgagcatatttccatagccaaggaggtgggactccctggagctatctgtggtcttagggaaggatccagacatacacggctttggggtacaagctgtgatcactgatcaataaattatctctagattggtccttgtgaggggagttttaagaatccagaacatcttgctcttgatcagcacatccaaaaacaccaagacaaacatccagtggagcagaacctctcctgcctcgggagttctgaccgggttccccagcagggtgttaagcctctgtctctggccctaccagcatccaggttccactttcctaggagagagtggagatgggaagacagggaaaggaaggcagcaggaggccacaagcccaccaggtcttcatgtcaagagagggagtaacatgtcttctcattgcccacggacccaacctctgtccaggtgcccctcatcatcacagtttaacacaagctcccctgctccagccaaattgatctcccagtcttgtccttacccattccaagtgctctgccagcccctgttcatccaagttttaagtcctccaccctgttctaagagactgttccaacggctctgggcctcagtggtcacttgaccaccattgtctcagagctgcccactttgtgtgtgtcacatgctgcctgagtcacatgtacatcttatttctgcctctagttttgtaagctcctggagggcggataacatcttatactactcttgtattctcatggcacctagtgcagtgctgggcacagagtaggtgctcaataaagacttgttgaatgaacag

SEQ ID NO: 299530 - DNA, 3464 bp, Homo sapiens
aggaggaccgtgcatgtagggattcgcggccggagctcgggaccggagtcaggaatggagagaagggtaatggttttacctcttattgtggaaacctgttgagatcacagagaatatactgacggcataaaagggcagaaccatagcagggtgcggttgcttcattccagcctcgcagtcacctctgtgccctgctggttgtcttcccagcgctgctgtagttgccttccatggatctataggagagcaagtcctccaggagctggtggtgtctgtcgattgactgagtgctggagctggcagccctgtgcaggctgccacctttgcccctttactgtgcttgctcctgactctatgtcgcgtctccaaggagaagaagtcctcaccagtgaacggagacctctctgaactaaggataccatggccacgtcagccccactacggagcctggaagaggaggtgacctgctccatctgtcttgattacctgcgggaccctgtgaccattgactgtggccacgtcttctgccgcagctgcaccacagacgtccgccccatctcagggagccgccccgtctgcccactctgcaagaagccttttaagaaggagaacatccgacccgtgtggcaactggccagcctggtggagaacattgagcggctgaaggtggacaagggcaggcagccgggagaggtgacccgggagcagcaggatgcaaagttgtgcgagcgacaccgagagaagctgcactactactgtgaggacgacgggaagctgctgtgcgtgatgtgccgggagtcccgggagcacaggccccacacggccgtcctcatggagaaggccgcccagccccacagggaaaaaatcctgaaccacctgagtaccctaaggagggacagagacaaaattcagggcttccaggcaaagggagaagctgatatcctggccgcgctgaagaagctccaggaccagaggcagtacattgtggctgagtttgagcagggtcatcagttcctgagggagcgggaggaacacctgctggaacagctggcgaagctggagcaggagctcacggagggcagggagaagttcaagagccggggcgtcggggagcttgcccggctggccctggtcatctccgaactggagggcaaggcgcagcagccagctgcagagctcatgcaggacacgagagacttcctaaacaggtatccacggaagaagttctgggttgggaaacccattgctcgagtggttaaaaaaaagaccggagaattctcagataaactcctctctctgcaacgaggcctgagggaattccaggggaagctgctgagagacttggaatataagacagtgagcgtcaccctggacccacagtcggccagtgggtacctgcagctgtcagaggactggaagtgcgtgacctacaccagcctgtacaagagtgcctacctgcacccccagcagtttgactgtgagcctggggtgctaggcagcaagggcttcacctggggcaaggtctactgggaagtggaagtggagagggagggctggtctgaggatgaagaagagggggatgaggaggaagagggagaagaggaggaggaggaagaggaggccggctatggggatggatatgacgactgggaaacggacgaagatgaggaatcgttgggcgatgaagaggaagaagaggaggaggaagaggaggaagttctggaaagctgcatggtgggggtggctagagactctgtgaagaggaagggagacctctccctgcggccagaggatggcgtgtgggcgctgcgcctctcctcctccggcatctgggccaacaccagccccgaggctgagcttttcccagcactgcggccccggagagtgggcatcgccctggattatgaagggggcaccgtgactttcaccaacgcagagtcacaggaactcatctacaccttcactgccaccttcacccggcgcctggtccccttcctgtggctcaagtggccaggaacacgcctcctgctaagaccctgagccctgacatctgcccccagccccaaccctcagatgcttcacttctttggaattccaggactctcaatggggggacgggatgcctggcctaagcacctggagcaggggaccccatatccactggtagccacctccccattgctgtggccccctgaaatctcactcagtgctgttgctccatctactgccctaatggggctcttttcccacctcctgctggtttcccgagggaacttctgaccctggagtccatgagggctcctttcctttttgaccacgaccttggccccagctctgcactctctggaataagggcccgatgcagcattttcttgcccagtgtggcaagacctcagaaaaaccagtcaattacgcctaagatcattttgctgtccttaaaccccccaggttccttcttgcacaaatccactctgctgcccaccttccctggcattttaaacagacctaccccaccccaactcagagttaagcatacatggcaatgctgaaaataaacaaaatccactgaggcttcccaggccatttaaagcctggagtaccagcgcatatcatctcatggggtccagagtggagtccaggcttctctgaaaccagggctgagcatatttccatagccaaggaggtgggactccctggagctatctgtggtcttagggaaggatccagacatacacggctttggggtacaagctgtgatcactgatcaataaattatctctagattggtccttgtgaggggagttttaagaatccagaacatcttgctcttgatcagcacatccaaaaacaccaagacaaacatccagtggagcagaacctctcctgcctcgggagttctgaccgggttccccagcagggtgttaagcctctgtctctggccctaccagcatccaggttccactttcctaggagagagtggagatgggaagacagggaaaggaaggcagcaggaggccacaagcccaccaggtcttcatgtcaagagagggagtaacatgtcttctcattgcccacggacccaacctctgtccaggtgcccctcatcatcacagtttaacacaagctcccctgctccagccaaattgatctcccagtcttgtccttacccattccaagtgctctgccagcccctgttcatccaagttttaagtcctccaccctgttctaagagactgttccaacggctctgggcctcagtggtcacttgaccaccattgtctcagagctgcccactttgtgtgtgtcacatgctgcctgagtcacatgtacatcttatttctgcctctagttttgtaagctcctggagggcggataacatcttatactactcttgtattctcatggcacctagtgcagtgctgggcacagagtaggtgctcaataaagacttgttgaatgaacag

SEQ ID NO: 299531 - DNA, 2572 bp, Homo sapiens
ctatgtcatggcgggtgcctcctgagaggttgcatgataatctccgaagtatcttccatctcaagaagctccaggaccagaggcagtacattgtggctgagtttgagcagggtcatcagttcctgagggagcgggaggaacacctgctggaacagctggcgaagctggagcaggagctcacggagggcagggagaagttcaagagccggggcgtcggggagcttgcccggctggccctggtcatctccgaactggagggcaaggcgcagcagccagctgcagagctcatgcaggacacgagagacttcctaaacaggtatccacggaagaagttctgggttgggaaacccattgctcgagtggttaaaaaaaagaccggagaattctcagataaactcctctctctgcaacgaggcctgagggaattccaggggaagctgctgagagacttggaatataagacagtgagcgtcaccctggacccacagtcggccagtgggtacctgcagctgtcagaggactggaagtgcgtgacctacaccagcctgtacaagagtgcctacctgcacccccagcagtttgactgtgagcctggggtgctaggcagcaagggcttcacctggggcaaggtctactgggaagtggaagtggagagggagggctggtctgaggatgaagaagagggggatgaggaggaagagggagaagaggaggaggaggaagaggaggccggctatggggatggatatgacgactgggaaacggacgaagatgaggaatcgttgggcgatgaagaggaagaagaggaggaggaagaggaggaagttctggaaagctgcatggtgggggtggctagagactctgtgaagaggaagggagacctctccctgcggccagaggatggcgtgtgggcgctgcgcctctcctcctccggcatctgggccaacaccagccccgaggctgagcttttcccagcactgcggccccggagagtgggcatcgccctggattatgaagggggcaccgtgactttcaccaacgcagagtcacaggaactcatctacaccttcactgccaccttcacccggcgcctggtccccttcctgtggctcaagtggccaggaacacgcctcctgctaagaccctgagccctgacatctgcccccagccccaaccctcagatgcttcacttctttggaattccaggactctcaatggggggacgggatgcctggcctaagcacctggagcaggggaccccatatccactggtagccacctccccattgctgtggccccctgaaatctcactcagtgctgttgctccatctactgccctaatggggctcttttcccacctcctgctggtttcccgagggaacttctgaccctggagtccatgagggctcctttcctttttgaccacgaccttggccccagctctgcactctctggaataagggcccgatgcagcattttcttgcccagtgtggcaagacctcagaaaaaccagtcaattacgcctaagatcattttgctgtccttaaaccccccaggttccttcttgcacaaatccactctgctgcccaccttccctggcattttaaacagacctaccccaccccaactcagagttaagcatacatggcaatgctgaaaataaacaaaatccactgaggcttcccaggccatttaaagcctggagtaccagcgcatatcatctcatggggtccagagtggagtccaggcttctctgaaaccagggctgagcatatttccatagccaaggaggtgggactccctggagctatctgtggtcttagggaaggatccagacatacacggctttggggtacaagctgtgatcactgatcaataaattatctctagattggtccttgtgaggggagttttaagaatccagaacatcttgctcttgatcagcacatccaaaaacaccaagacaaacatccagtggagcagaacctctcctgcctcgggagttctgaccgggttccccagcagggtgttaagcctctgtctctggccctaccagcatccaggttccactttcctaggagagagtggagatgggaagacagggaaaggaaggcagcaggaggccacaagcccaccaggtcttcatgtcaagagagggagtaacatgtcttctcattgcccacggacccaacctctgtccaggtgcccctcatcatcacagtttaacacaagctcccctgctccagccaaattgatctcccagtcttgtccttacccattccaagtgctctgccagcccctgttcatccaagttttaagtcctccaccctgttctaagagactgttccaacggctctgggcctcagtggtcacttgaccaccattgtctcagagctgcccactttgtgtgtgtcacatgctgcctgagtcacatgtacatcttatttctgcctctagttttgtaagctcctggagggcggataacatcttatactactcttgtattctcatggcacctagtgcagtgctgggcacagagtaggtgctcaataaagacttgttgaatgaacag

SEQ ID NO: 299532 - DNA, 2334 bp, Homo sapiens
attgaagtcttatttgattcatattgatacttgtgcttttttctttcccttctaggacacgagagacttcctaaacaggtatccacggaagaagttctgggttgggaaacccattgctcgagtggttaaaaaaaagaccggagaattctcagataaactcctctctctgcaacgaggcctgagggaattccaggggaagctgctgagagacttggaatataagacagtgagcgtcaccctggacccacagtcggccagtgggtacctgcagctgtcagaggactggaagtgcgtgacctacaccagcctgtacaagagtgcctacctgcacccccagcagtttgactgtgagcctggggtgctaggcagcaagggcttcacctggggcaaggtctactgggaagtggaagtggagagggagggctggtctgaggatgaagaagagggggatgaggaggaagagggagaagaggaggaggaggaagaggaggccggctatggggatggatatgacgactgggaaacggacgaagatgaggaatcgttgggcgatgaagaggaagaagaggaggaggaagaggaggaagttctggaaagctgcatggtgggggtggctagagactctgtgaagaggaagggagacctctccctgcggccagaggatggcgtgtgggcgctgcgcctctcctcctccggcatctgggccaacaccagccccgaggctgagcttttcccagcactgcggccccggagagtgggcatcgccctggattatgaagggggcaccgtgactttcaccaacgcagagtcacaggaactcatctacaccttcactgccaccttcacccggcgcctggtccccttcctgtggctcaagtggccaggaacacgcctcctgctaagaccctgagccctgacatctgcccccagccccaaccctcagatgcttcacttctttggaattccaggactctcaatggggggacgggatgcctggcctaagcacctggagcaggggaccccatatccactggtagccacctccccattgctgtggccccctgaaatctcactcagtgctgttgctccatctactgccctaatggggctcttttcccacctcctgctggtttcccgagggaacttctgaccctggagtccatgagggctcctttcctttttgaccacgaccttggccccagctctgcactctctggaataagggcccgatgcagcattttcttgcccagtgtggcaagacctcagaaaaaccagtcaattacgcctaagatcattttgctgtccttaaaccccccaggttccttcttgcacaaatccactctgctgcccaccttccctggcattttaaacagacctaccccaccccaactcagagttaagcatacatggcaatgctgaaaataaacaaaatccactgaggcttcccaggccatttaaagcctggagtaccagcgcatatcatctcatggggtccagagtggagtccaggcttctctgaaaccagggctgagcatatttccatagccaaggaggtgggactccctggagctatctgtggtcttagggaaggatccagacatacacggctttggggtacaagctgtgatcactgatcaataaattatctctagattggtccttgtgaggggagttttaagaatccagaacatcttgctcttgatcagcacatccaaaaacaccaagacaaacatccagtggagcagaacctctcctgcctcgggagttctgaccgggttccccagcagggtgttaagcctctgtctctggccctaccagcatccaggttccactttcctaggagagagtggagatgggaagacagggaaaggaaggcagcaggaggccacaagcccaccaggtcttcatgtcaagagagggagtaacatgtcttctcattgcccacggacccaacctctgtccaggtgcccctcatcatcacagtttaacacaagctcccctgctccagccaaattgatctcccagtcttgtccttacccattccaagtgctctgccagcccctgttcatccaagttttaagtcctccaccctgttctaagagactgttccaacggctctgggcctcagtggtcacttgaccaccattgtctcagagctgcccactttgtgtgtgtcacatgctgcctgagtcacatgtacatcttatttctgcctctagttttgtaagctcctggagggcggataacatcttatactactcttgtattctcatggcacctagtgcagtgctgggcacagagtaggtgctcaataaagacttgttgaatgaacag

SEQ ID NO: 299533 - DNA, 2009 bp, Homo sapiens
gggacgggatgcctggcctaagcacctggagcaggggaccccatatccactggtagccacctccccattgctgtggccccctgaaatctcactcagggctggtctgaggatgaagaagagggggatgaggaggaagagggagaagaggaggaggaggaagaggaggccggctatggggatggatatgacgactgggaaacggacgaagatgaggaatcgttgggcgatgaagaggaagaagaggaggaggaagaggaggaagttctggaaagctgcatggtgggggtggctagagactctgtgaagaggaagggagacctctccctgcggccagaggatggcgtgtgggcgctgcgcctctcctcctccggcatctgggccaacaccagccccgaggctgagcttttcccagcactgcggccccggagagtgggcatcgccctggattatgaagggggcaccgtgactttcaccaacgcagagtcacaggaactcatctacaccttcactgccaccttcacccggcgcctggtccccttcctgtggctcaagtggccaggaacacgcctcctgctaagaccctgagccctgacatctgcccccagccccaaccctcagatgcttcacttctttggaattccaggactctcaatggggggacgggatgcctggcctaagcacctggagcaggggaccccatatccactggtagccacctccccattgctgtggccccctgaaatctcactcagtgctgttgctccatctactgccctaatggggctcttttcccacctcctgctggtttcccgagggaacttctgaccctggagtccatgagggctcctttcctttttgaccacgaccttggccccagctctgcactctctggaataagggcccgatgcagcattttcttgcccagtgtggcaagacctcagaaaaaccagtcaattacgcctaagatcattttgctgtccttaaaccccccaggttccttcttgcacaaatccactctgctgcccaccttccctggcattttaaacagacctaccccaccccaactcagagttaagcatacatggcaatgctgaaaataaacaaaatccactgaggcttcccaggccatttaaagcctggagtaccagcgcatatcatctcatggggtccagagtggagtccaggcttctctgaaaccagggctgagcatatttccatagccaaggaggtgggactccctggagctatctgtggtcttagggaaggatccagacatacacggctttggggtacaagctgtgatcactgatcaataaattatctctagattggtccttgtgaggggagttttaagaatccagaacatcttgctcttgatcagcacatccaaaaacaccaagacaaacatccagtggagcagaacctctcctgcctcgggagttctgaccgggttccccagcagggtgttaagcctctgtctctggccctaccagcatccaggttccactttcctaggagagagtggagatgggaagacagggaaaggaaggcagcaggaggccacaagcccaccaggtcttcatgtcaagagagggagtaacatgtcttctcattgcccacggacccaacctctgtccaggtgcccctcatcatcacagtttaacacaagctcccctgctccagccaaattgatctcccagtcttgtccttacccattccaagtgctctgccagcccctgttcatccaagttttaagtcctccaccctgttctaagagactgttccaacggctctgggcctcagtggtcacttgaccaccattgtctcagagctgcccactttgtgtgtgtcacatgctgcctgagtcacatgtacatcttatttctgcctctagttttgtaagctcctggagggcggataacatcttatactactcttgtattctcatggcacctagtgcagtgctgggcacagagtaggtgctcaataaagacttgttgaatgaacag

SEQ ID NO: 299534 - DNA, 2123 bp, Homo sapiens
aacgctttttgaattgaattttttaaaatgcatgtattccttttcaaactaaaatgatttttaagcacacaaaagagaatcaaaggctgagaaacaatgatttcacacactatgtttgcaagaacaagttattcccaaagcaattcctacaggttctgcacctgtgttgcttttataaagcaagcacagcgtaatgtgtaagcactattgtcctgaatgctttatccatgaaggtacgtgttaaggatccataactggtagaagggcgtttaaaacgcttttttttcttttaaagagacagggtctcactatgttgcccaggctgctctcttaactacgaggctcggagtcaggaatggagagaagggtaatggttttacctcttattgtggaaacctgttgagatcacagagaatatactgacggcataaaagggcagaaccatagcagggtgcggttgcttcattccagcctcgcagtcacctctgtgccctgctggttgtcttcccagcgctgctgtagttgccttccatggatctataggagagcaagtcctccaggagaagaagtcctcaccagtgaacggagacctctctgaactaaggataccatggccacgtcagccccactacggagcctggaagaggaggtgacctgctccatctgtcttgattacctgcgggaccctgtgaccattgactgtggccacgtcttctgccgcagctgcaccacagacgtccgccccatctcagggagccgccccgtctgcccactctgcaagaagccttttaagaaggagaacatccgacccgtgtggcaatggtagccacctccccattgctgtggccccctgaaatctcactcagtgctgttgctccatctactgccctaatggggctcttttcccacctcctgctggtttcccgagggaacttctgaccctggagtccatgagggctcctttcctttttgaccacgaccttggccccagctctgcactctctggaataagggcccgatgcagcattttcttgcccagtgtggcaagacctcagaaaaaccagtcaattacgcctaagatcattttgctgtccttaaaccccccaggttccttcttgcacaaatccactctgctgcccaccttccctggcattttaaacagacctaccccaccccaactcagagttaagcatacatggcaatgctgaaaataaacaaaatccactgaggcttcccaggccatttaaagcctggagtaccagcgcatatcatctcatggggtccagagtggagtccaggcttctctgaaaccagggctgagcatatttccatagccaaggaggtgggactccctggagctatctgtggtcttagggaaggatccagacatacacggctttggggtacaagctgtgatcactgatcaataaattatctctagattggtccttgtgaggggagttttaagaatccagaacatcttgctcttgatcagcacatccaaaaacaccaagacaaacatccagtggagcagaacctctcctgcctcgggagttctgaccgggttccccagcagggtgttaagcctctgtctctggccctaccagcatccaggttccactttcctaggagagagtggagatgggaagacagggaaaggaaggcagcaggaggccacaagcccaccaggtcttcatgtcaagagagggagtaacatgtcttctcattgcccacggacccaacctctgtccaggtgcccctcatcatcacagtttaacacaagctcccctgctccagccaaattgatctcccagtcttgtccttacccattccaagtgctctgccagcccctgttcatccaagttttaagtcctccaccctgttctaagagactgttccaacggctctgggcctcagtggtcacttgaccaccattgtctcagagctgcccactttgtgtgtgtcacatgctgcctgagtcacatgtacatcttatttctgcctctagttttgtaagctcctggagggcggataacatcttatactactcttgtattctcatggcacctagtgcagtgctgggcacagagtaggtgctcaataaagacttgttgaatgaacag

SEQ ID NO: 299535 - DNA, 2680 bp, Homo sapiens
gcaggagcgggacccggaacagaccgccgtgagagaggaggggtgccggccgggattcgcggcccggagctcgggaccggagtcaggaatggagagaagggtaatggttttacctcttattgtggaaacctgttgagatcacagagaatatactgacggcataaaagggcagaaccatagcagggtgcggttgcttcattccagcctcgcagtcacctctgtgccctgctggttgtcttcccagcgctgctgtagttgccttccatggatctataggagagcaagtcctccaggagaagaagtcctcaccagtgaacggagacctctctgaactaaggataccatggccacgtcagccccactacggagcctggaagaggaggtgacctgctccatctgtcttgattacctgcgggaccctgtgaccattgactgtggccacgtcttctgccgcagctgcaccacagacgtccgccccatctcagggagccgccccgtctgcccactctgcaagaagccttttaagaaggagaacatccgacccgtgtggcaactggccagcctggtggagaacattgagcggctgaaggtggacaagggcaggcagccgggagaggtgacccgggagcagcaggatgcaaagttgtgcgagcgacaccgagagaagctgcactactactgtgaggacgacgggaagctgctgtgcgtgatgtgccgggagtcccgggagcacaggccccacacggccgtcctcatggagaaggccgcccagccccacagggaaaaaatcctgaaccacctgagtaccctaaggagggacagagacaaaattcagggcttccaggcaaagggagaagctgatatcctggccgcgctgaagaagctccaggaccagaggcagtacattgtggctgagtttgagcagggtcatcagttcctgagggagcgggaggaacacctgctggaacagctggcgaagctggagcaggagctcacggagggcagggagaagttcaagagccggggcgtcggggagcttgcccggctggccctggtcatctccgaactggagggcaaggcgcagcagccagctgcagagctcatgcaggacacgagagacttcctaaacaggtatccacggaagaagttctgggttgggaaacccattgctcgagtggttaaaaaaaagaccggagaattctcagataaactcctctctctgcaacgaggcctgagggaattccaggggaagctgctgagagacttggaatataagacagtgagcgtcaccctggacccacagtcggccagtgggtacctgcagctgtcagaggactggaagtgcgtgacctacaccagcctgtacaagagtgcctacctgcacccccagcagtttgactgtgagcctggggtgctaggcagcaagggcttcacctggggcaaggtctactgggaagtggaagtggagagggagggctggtctgaggatgaagaagagggggatgaggaggaagagggagaagaggaggaggaggaagaggaggccggctatggggatggatatgacgactgggaaacggacgaagatgaggaatcgttgggcgatgaagaggaagaagaggaggaggaagaggaggaagttctggaaagctgcatggtgggggtggctagagactctgtgaagaggaagggagacctctccctgcggccagaggatggcgtgtgggcgctgcgcctctcctcctccggcatctgggccaacaccagccccgaggctgagcttttcccagcactgcggccccggagagtgggcatcgccctggattatgaagggggcaccgtgactttcaccaacgcagagtcacaggaactcatctacaccttcactgccaccttcacccggcgcctggtccccttcctgtggctcaagtggccaggaacacgcctcctgctaagaccctgagccctgacatctgcccccagccccaaccctcagatgcttcacttctttggaattccaggactctcaatggggggacgggatgcctggcctaagcacctggagcaggggaccccatatccactggtagccacctccccattgctgtggccccctgaaatctcactcagtgctgttgctccatctactgccctaatggggctcttttcccacctcctgctggtttcccgagggaacttctgaccctggagtccatgagggctcctttcctttttgaccacgaccttggccccagctctgcactctctggaataagggcccgatgcagcattttcttgcccagtgtggcaagacctcagaaaaaccagtcaattacgcctaagatcattttgctgtccttaaaccccccagtcttgtccttacccattccaagtgctctgccagcccctgttcatccaagttttaagtcctccaccctgttctaagagactgttccaacggctctgggcctcagtggtcacttgaccaccattgtctcagagctgcccactttgtgtgtgtcacatgctgcctgagtcacatgtacatcttatttctgcctctagttttgtaagctcctggagggcggataacatcttatactactcttgtattctcatggcacctagtgcagtgctgggcacagagtaggtgctcaataaagacttgttgaatgaacag

SEQ ID NO: 299536 - DNA, 2625 bp, Homo sapiens
  misc_feature (2393)..(2393): n is a, c, g, or t
  misc_feature (2409)..(2409): n is a, c, g, or t
  misc_feature (2442)..(2442): n is a, c, g, or t
  misc_feature (2466)..(2467): n is a, c, g, or t
  misc_feature (2599)..(2599): n is a, c, g, or t
  misc_feature (2604)..(2604): n is a, c, g, or t
gcaggagcgggacccggaacagaccgccgtgagagaggaggggtgccggccgggattcgcggcccggagctcgggaccggagtcaggaatggagagaagggtaatggttttacctcttattgtggaaacctgttgagatcacagagaatatactgacggcataaaagggcagaaccatagcagggtgcggttgcttcattccagcctcgcagtcacctctgtgccctgctggttgtcttcccagcgctgctgtagttgccttccatggatctataggagagcaagtcctccaggagaagaagtcctcaccagtgaacggagacctctctgaactaaggataccatggccacgtcagccccactacggagcctggaagaggaggtgacctgctccatctgtcttgattacctgcgggaccctgtgaccattgactgtggccacgtcttctgccgcagctgcaccacagacgtccgccccatctcagggagccgccccgtctgcccactctgcaagaagccttttaagaaggagaacatccgacccgtgtggcaactggccagcctggtggagaacattgagcggctgaaggtggacaagggcaggcagccgggagaggtgacccgggagcagcaggatgcaaagttgtgcgagcgacaccgagagaagctgcactactactgtgaggacgacgggaagctgctgtgcgtgatgtgccgggagtcccgggagcacaggccccacacggccgtcctcatggagaaggccgcccagccccacagggaaaaaatcctgaaccacctgagtaccctaaggagggacagagacaaaattcagggcttccaggcaaagggagaagctgatatcctggccgcgctgaagaagctccaggaccagaggcagtacattgtggctgagtttgagcagggtcatcagttcctgagggagcgggaggaacacctgctggaacagctggcgaagctggagcaggagctcacggagggcagggagaagttcaagagccggggcgtcggggagcttgcccggctggccctggtcatctccgaactggagggcaaggcgcagcagccagctgcagagctcatgcaggacacgagagacttcctaaacaggtatccacggaagaagttctgggttgggaaacccattgctcgagtggttaaaaaaaagaccggagaattctcagataaactcctctctctgcaacgaggcctgagggaattccaggggaagctgctgagagacttggaatataagacagtgagcgtcaccctggacccacagtcggccagtgggtacctgcagctgtcagaggactggaagtgcgtgacctacaccagcctgtacaagagtgcctacctgcacccccagcagtttgactgtgagcctggggtgctaggcagcaagggcttcacctggggcaaggtctactgggaagtggaagtggagagggagggctggtctgaggatgaagaagagggggatgaggaggaagagggagaagaggaggaggaggaagaggaggccggctatggggatggatatgacgactgggaaacggacgaagatgaggaatcgttgggcgatgaagaggaagaagaggaggaggaagaggaggaagttctggaaagctgcatggtgggggtggctagagactctgtgaagaggaagggagacctctccctgcggccagaggatggcgtgtgggcgctgcgcctctcctcctccggcatctgggccaacaccagccccgaggctgagcttttcccagcactgcggccccggagagtgggcatcgccctggattatgaagggggcaccgtgactttcaccaacgcagagtcacaggaactcatctacaccttcactgccaccttcacccggcgcctggtccccttcctgtggctcaagtggccaggaacacgcctcctgctaagaccctgagccctgacatctgcccccagccccaaccctcagatgcttcacttctttggaattccaggactctcaatggggggacgggatgcctggcctaagcacctggagcaggggaccccatatccactggtagccacctccccattgctgtggccccctgaaatctcactcagtgctgttgctccatctactgccctaatggggctcttttcccacctcctgctggtttcccgagggaacttctgaccctggagtccatgagggctcctttcctttttgaccacgaccttggccccagctctgcactctctggaataagggcccgatgcagcattttcttgcccagtgtggcaagacctcagaaaaaccagtcaattacgcctaagatcattttgctgtccttaaaccccccagagagagcgtcgacgctctctcngtggggccaaaggctnggggcggtgctacacccgtgtcgtctccttccnggagccttaggagcagacaggtgnnccctgccatcgagaaggtgcaggccaagtttgaacgcacatgctgctcccccaagtatggttctcccaagctgcagaggaagcccctccccaaagccgaccagccaaataacaggacgtcaccagggatggnccagnaagggtacagtgagtcagcct

SEQ ID NO: 299537 - DNA, 2376 bp, Homo sapiens
gcaggagcgggacccggaacagaccgccgtgagagaggaggggtgccggccgggattcgcggcccggagctcgggaccggagtcaggaatggagagaagggtaatggttttacctcttattgtggaaacctgttgagatcacagagaatatactgacggcataaaagggcagaaccatagcagggtgcggttgcttcattccagcctcgcagtcacctctgtgccctgctggttgtcttcccagcgctgctgtagttgccttccatggatctataggagagcaagtcctccaggagaagaagtcctcaccagtgaacggagacctctctgaactaaggataccatggccacgtcagccccactacggagcctggaagaggaggtgacctgctccatctgtcttgattacctgcgggaccctgtgaccattgactgtggccacgtcttctgccgcagctgcaccacagacgtccgccccatctcagggagccgccccgtctgcccactctgcaagaagccttttaagaaggagaacatccgacccgtgtggcaactggccagcctggtggagaacattgagcggctgaaggtggacaagggcaggcagccgggagaggtgacccgggagcagcaggatgcaaagttgtgcgagcgacaccgagagaagctgcactactactgtgaggacgacgggaagctgctgtgcgtgatgtgccgggagtcccgggagcacaggccccacacggccgtcctcatggagaaggccgcccagccccacagggaaaaaatcctgaaccacctgagtaccctaaggagggacagagacaaaattcagggcttccaggcaaagggagaagctgatatcctggccgcgctgaagaagctccaggaccagaggcagtacattgtggctgagtttgagcagggtcatcagttcctgagggagcgggaggaacacctgctggaacagctggcgaagctggagcaggagctcacggagggcagggagaagttcaagagccggggcgtcggggagcttgcccggctggccctggtcatctccgaactggagggcaaggcgcagcagccagctgcagagctcatgcaggacacgagagacttcctaaacaggtatccacggaagaagttctgggttgggaaacccattgctcgagtggttaaaaaaaagaccggagaattctcagataaactcctctctctgcaacgaggcctgagggaattccaggggaagctgctgagagacttggaatataagacagtgagcgtcaccctggacccacagtcggccagtgggtacctgcagctgtcagaggactggaagtgcgtgacctacaccagcctgtacaagagtgcctacctgcacccccagcagtttgactgtgagcctggggtgctaggcagcaagggcttcacctggggcaaggtctactgggaagtggaagtggagagggagggctggtctgaggatgaagaagagggggatgaggaggaagagggagaagaggaggaggaggaagaggaggccggctatggggatggatatgacgactgggaaacggacgaagatgaggaatcgttgggcgatgaagaggaagaagaggaggaggaagaggaggaagttctggaaagctgcatggtgggggtggctagagactctgtgaagaggaagggagacctctccctgcggccagaggatggcgtgtgggcgctgcgcctctcctcctccggcatctgggccaacaccagccccgaggctgagcttttcccagcactgcggccccggagagtgggcatcgccctggattatgaagggggcaccgtgactttcaccaacgcagagtcacaggaactcatctacaccttcactgccaccttcacccggcgcctggtccccttcctgtggctcaagtggccaggaacacgcctcctgctaagaccctgagccctgacatctgcccccagccccaaccctcagatgcttcacttctttggaattccaggactctcaatggggggacgggatgcccagccaaattgatctcccagtcttgtccttacccattccaagtgctctgccagcccctgttcatccaagttttaagtcctccaccctgttctaagagactgttccaacggctctgggcctcagtggtcacttgaccaccattgtctcagagctgcccactttgtgtgtgtcacatgctgcctgagtcacatgtacatcttatttctgcctctagttttgtaagctcctggagggcggataacatcttatactactcttgtattctcatggcacctagtgcagtgctgggcacagagtaggtgctcaataaagacttgttgaatgaacag

SEQ ID NO: 299538 - DNA, 2258 bp, Homo sapiens
gcaggagcgggacccggaacagaccgccgtgagagaggaggggtgccggccgggattcgcggcccggagctcgggaccggagtcaggaatggagagaagggtaatggttttacctcttattgtggaaacctgttgagatcacagagaatatactgacggcataaaagggcagaaccatagcagggtgcggttgcttcattccagcctcgcagtcacctctgtgccctgctggttgtcttcccagcgctgctgtagttgccttccatggatctataggagagcaagtcctccaggagaagaagtcctcaccagtgaacggagacctctctgaactaaggataccatggccacgtcagccccactacggagcctggaagaggaggtgacctgctccatctgtcttgattacctgcgggaccctgtgaccattgactgtggccacgtcttctgccgcagctgcaccacagacgtccgccccatctcagggagccgccccgtctgcccactctgcaagaagccttttaagaaggagaacatccgacccgtgtggcaactggccagcctggtggagaacattgagcggctgaaggtggacaagggcaggcagccgggagaggtgacccgggagcagcaggatgcaaagttgtgcgagcgacaccgagagaagctgcactactactgtgaggacgacgggaagctgctgtgcgtgatgtgccgggagtcccgggagcacaggccccacacggccgtcctcatggagaaggccgcccagccccacagggaaaaaatcctgaaccacctgagtaccctaaggagggacagagacaaaattcagggcttccaggcaaagggagaagctgatatcctggccgcgctgaagaagctccaggaccagaggcagtacattgtggctgagtttgagcagggtcatcagttcctgagggagcgggaggaacacctgctggaacagctggcgaagctggagcaggagctcacggagggcagggagaagttcaagagccggggcgtcggggagcttgcccggctggccctggtcatctccgaactggagggcaaggcgcagcagccagctgcagagctcatgcaggacacgagagacttcctaaacaggtatccacggaagaagttctgggttgggaaacccattgctcgagtggttaaaaaaaagaccggagaattctcagataaactcctctctctgcaacgaggcctgagggaattccaggggaagctgctgagagacttggaatataagacagtgagcgtcaccctggacccacagtcggccagtgggtacctgcagctgtcagaggactggaagtgcgtgacctacaccagcctgtacaagagtgcctacctgcacccccagcagtttgactgtgagcctggggtgctaggcagcaagggcttcacctggggcaaggtctactgggaagtggaagtggagagggagggctggtctgaggatgaagaagagggggatgaggaggaagagggagaagaggaggaggaggaagaggaggccggctatggggatggatatgacgactgggaaacggacgaagatgaggaatcgttgggcgatgaagaggaagaagaggaggaggaagaggaggaagttctggaaagctgcatggtgggggtggctagagactctgtgaagaggaagggagacctctccctgcggccagaggatggcgtgtgggcgctgcgcctctcctcctccggcatctgggccaacaccagccccgaggctgagcttttcccagcactgcggccccggagagtgggcatcgccctggattatgaagggggcaccgtgactttcaccaacgcagagtcacaggaactcatctacaccttcactgccaccttcacccggcgcctggtccccttcctgtggctcaagtggccaggaacacgcctcctgctaagaccctgagccctgacatctgcccccacccctgttcatccaagttttaagtcctccaccctgttctaagagactgttccaacggctctgggcctcagtggtcacttgaccaccattgtctcagagctgcccactttgtgtgtgtcacatgctgcctgagtcacatgtacatcttatttctgcctctagttttgtaagctcctggagggcggataacatcttatactactcttgtattctcatggcacctagtgcagtgctgggcacagagtaggtgctcaataaagacttgttgaatgaacag

SEQ ID NO: 299539 - DNA, 1303 bp, Homo sapiens
aacgctttttgaattgaattttttaaaatgcatgtattccttttcaaactaaaatgatttttaagcacacaaaagagaatcaaaggctgagaaacaatgatttcacacactatgtttgcaagaacaagttattcccaaagcaattcctacaggttctgcacctgtgttgcttttataaagcaagcacagcgtaatgtgtaagcactattgtcctgaatgctttatccatgaaggtacgtgttaaggatccataactggtagaagggcgtttaaaacgcttttttttcttttaaagagacagggtctcactatgttgcccaggctgctctcttaactacgaggctcggagtcaggaatggagagaagggtaatggttttacctcttattgtggaaacctgttgagatcacagagaatatactgacggcataaaagggcagaaccatagcagggtgcggtaagttggggaagagtttttggagagggtgaattttgcattggacctgacagaattgtgtatggggaaggggagcggttattctggtctgctcacatctctcatactcaacctcatttctcctaattctgaaatcttgagatcctctatcactaagaaggaaaactactgtccaacagggacactttattgctcaccccatatgtgaaagtttgtcatagctaaggctagggtgcttttggtcagtatcagcagaatatatgccccctttcttttgtcagcattactccgcttacaaagcccttccatgtagatgacctcatctgagcttcctaacaaaggagctggtattagaccccattttacagtgtgcctgggtagggaagagagtgtagtggattgagcagaggccttggcaccagacactgcttcctagccatgtgctcttgggcaagttgcttaaccctgctgagcctcagtttcctcaagaaggagtctgtataagcaaggggaagggattggtcatagaagtggtactgtgtttcatttatctagttatggcagactctcaaaaacaaatggttctatacaactaacattgtctgcaattcccctgaatccattcacttgttcagtaaatgtgtattgagcttctacaaggtgtcaagcaccatgatctctgtatcagtgatttaaccatttttgatggttactacagacctctttaagaatgtgatagaaaactgtagctccctccccagaaaacttttctagctttttattttgctttgcagtgagccaagatagttccactgcactcgggggacagagtaagaccctgtctcaa

SEQ ID NO: 299540 - DNA, 1106 bp, Homo sapiens
gcaggagcgggacccggaacagaccgccgtgagagaggaggggtgccggccgggattcgcggcccggagctcgggaccggagtcaggaatggagagaagggtaatggttttacctcttattgtggaaacctgttgagatcacagagaatatactgacggcataaaagggcagaaccatagcagggtgcggttgcttcattccagcctcgcagtcacctctgtgccctgctggttgtcttcccagcgctgctgtagttgccttccatggatctataggagagcaagtcctccaggagaagaagtcctcaccagtgaacggagacctctctgaactaaggataccatggccacgtcagccccactacggagcctggaagaggaggtgacctgctccatctgtcttgattacctgcgggaccctgtgaccattgactgtggccacgtcttctgccgcagctgcaccacagacgtccgccccatctcagggagccgccccgtctgcccactctgcaagaagccttttaagaaggagaacatccgacccgtgtggcaactggccagcctggtggagaacattgagcggctgaaggtggacaagggcaggcagccgggagaggtgacccgggagcagcaggatgcaaagttgtgcgagcgacaccgagagaagctgcactactactgtgaggacgacgggaagctgctgtgcgtgatgtgccgggagtcccgggagcacaggccccacacggccgtcctcatggagaaggccgcccagccccacagggaaaaaatcctgaaccacctgagtaccctaaggagggacagagacaaaattcagggcttccaggcaaagggagaagctgatatcctggccgcgctggttccaacggctctgggcctcagtggtcacttgaccaccattgtctcagagctgcccactttgtgtgtgtcacatgctgcctgagtcacatgtacatcttatttctgcctctagttttgtaagctcctggagggcggataacatcttatactactcttgtattctcatggcacctagtgcagtgctgggcacagagtaggtgctcaataaagacttgttgaatgaacag

SEQ ID NO: 299541 - DNA, 1541 bp, Homo sapiens
gcaggagcgggacccggaacagaccgccgtgagagaggaggggtgccggccgggattcgcggcccggagctcgggaccggagtcaggaatggagagaagggtaatggttttacctcttattgtggaaacctgttgagatcacagagaatatactgacggcataaaagggcagaaccatagcagggtgcggttgcttcattccagcctcgcagtcacctctgtgccctgctggttgtcttcccagcgctgctgtagttgccttccatggatctataggagagcaagtcctccaggagaagaagtcctcaccagtgaacggagacctctctgaactaaggataccatggccacgtcagccccactacggagcctggaagaggaggtgacctgctccatctgtcttgattacctgcgggaccctgtgaccattgactgtggccacgtcttctgccgcagctgcaccacagacgtccgccccatctcagggagccgccccgtctgcccactctgcaagaagccttttaagaaggagaacatccgacccgtgtggcaactggccagcctggtggagaacattgagcggctgaaggtggacaagggcaggcagccgggagaggtgacccgggagcagcaggatgcaaagttgtgcgagcgacaccgagagaagctgcactactactgtgaggacgacgggaagctgctgtgcgtgatgtgccgggagtcccgggagcacaggccccacacggccgtcctcatggagaaggccgcccagccccacagggaaaaaatcctgaaccacctgagtaccctaaggagggacagagacaaaattcagggcttccaggcaaagggagaagctgatatcctggccgcgctgaagaagctccaggaccagaggcagtacattgtggctgagtttgagcagggtcatcagttcctgagggagcgggaggaacacctgctggaacagctggcgaagctggagcaggagctcacggagggcagggagaagttcaagagccggggcgtcggggagcttgcccggctggccctggtcatctccgaactggagggcaaggcgcagcagccagctgcagagctcatgcagacacgagagacttcctaaacaggtatccacggaagaagttcttattgtggaaacctgttgagatcacagagaatatactgacggcataaaagggcagaaccatagcagggtgcggttgcttcattccagcctcgcagtcacctctgtgccctgctggttgtcttcccagcgctgctgtagttgccttccatggatctataggaggttccaacggctctgggcctcagtggtcacttgaccaccattgtctcagagctgcccactttgtgtgtgtcacatgctgcctgagtcacatgtacatcttatttctgcctctagttttgtaagctcctggagggcggataacatcttatactactcttgtattctcatggcacctagtgcagtgctgggcacagagtaggtgctcaataaagacttgttgaatgaacag

SEQ ID NO: 299542 - DNA, 996 bp, Homo sapiens
gcaggagcgggacccggaacagaccgccgtgagagaggaggggtgccggccgggattcgcggcccggagctcgggaccggttgcttcattccagcctcgcagtcacctctgtgccctgctggttgtcttcccagcgctgctgtagttgccttccatggatctataggagagcaagtcctccaggagaagaagtcctcaccagtgaacggagacctctctgaactaaggataccatggccacgtcagccccactacggagcctggaagaggaggtgacctgctccatctgtcttgattacctgcgggaccctgtgaccattgactgtggccacgtcttctgccgcagctgcaccacagacgtccgccccatctcagggagccgccccgtctgcccactctgcaagaagccttttaagaaggagaacatccgacccgtgtggcaactggccagcctggtggagaacattgagcggctgaaggtggacaagggcaggcagccgggagaggtgacccgggagcagcaggatgcaaagttgtgcgagcgacaccgagagaagctgcactactactgtgaggacgacgggaagctgctgtgcgtgatgtgccgggagtcccgggagcacaggccccacacggccgtcctcatggagaaggccgcccagccccacagggaaaaaatcctgaaccacctgagtaccctaaggagggacagagacaaaattcagggcttccaggcaaagggagaagctgatatcctggccgcgctggttccaacggctctgggcctcagtggtcacttgaccaccattgtctcagagctgcccactttgtgtgtgtcacatgctgcctgagtcacatgtacatcttatttctgcctctagttttgtaagctcctggagggcggataacatcttatactactcttgtattctcatggcacctagtgcagtgctgggcacagagtaggtgctcaataaagacttgttgaatgaacag

SEQ ID NO: 299543 - DNA, 657 bp, Homo sapiens
aacgctttttgaattgaattttttaaaatgcatgtattccttttcaaactaaaatgatttttaagcacacaaaagagaatcaaaggctgagaaacaatgatttcacacactatgtttgcaagaacaagttattcccaaagcaattcctacaggttctgcacctgtgttgcttttataaagcaagcacagcgtaatgtgtaagcactattgtcctgaatgctttatccatgaaggtacgtgttaaggatccataactggtagaagggcgtttaaaacgcttttttttcttttaaagagacagggtctcactatgttgcccaggctgctctcttaactacgaggctcggagtcaggaatggagagaagggtaatggttttacctcttattgtggaaacctgttgagatcacagagaatatactgacggcataaaagggcagaaccatagcagggtgcggttgcttcattccagcctcgcagtcacctctgtgccctgctggttgtcttcccagcgctgctgtagttgccttccatggatctataggagagcaagtcctccagggcggataacatcttatactactcttgtattctcatggcacctagtgcagtgctgggcacagagtaggtgctcaataaagacttgttgaatgaacag

SEQ ID NO: 299544 - DNA, 2395 bp, Homo sapiens
cggagcccgtcaggtgtctgacagcccatcgatccctttgtctatcccccgaccatggcgaagctgattgcgctcaccctcttggggatgggactggcactcttcaggaaccaccagtcttcttaccaaacacgacttaatgctctccgagaggtacaacccgtagaacttcctaactgtaatttagttaaaggaatcgaaactggctctgaagacttggagatactgcctaatggactggctttcattagctctggattaaagtatcctggaataaagagcttcaaccccaacagtcctggaaaaatacttctgatggacctgaatgaagaagatccaacagtgttggaattggggatcactggaagtaaatttgatgtatcttcatttaaccctcatgggattagcacattcacagatgaagataatgccatgtacctcctggtggtgaaccatccagatgccaagtccacagtggagttgtttaaatttcaagaagaagaaaaatcgcttttgcatctaaaaaccatcagacataaacttctgcctaatttgaatgatattgttgctgtgggacctgagcacttttatggcacaaatgatcactattttcttgacccctacttacaatcctgggagatgtatttgggtttagcgtggtcgtatgttgtctactatagtccaagtgaagttcgagtggtggcagaaggatttgattttgctaatggaatcaacatttcacccgatggcaagtatgtctatatagctgagttgctggctcataagattcatgtgtatgaaaagcatgctaattggactttaactccattgaagtcccttgactttaataccctcgtggataacatatctgtggatcctgagacaggagacctttgggttggatgccatcccaatggcatgaaaatcttcttctatgactcagagaatcctcctgcatcagaggtgcttcgaatccagaacattctaacagaagaacctaaagtgacacaggtttatgcagaaaatggcacagtgttgcaaggcagtacagttgcctctgtgtacaaagggaaactgctgattggcacagtgtttcacaaagctctttactgtgagctctaacagaccgatttgcacccatgccatagaaactgaggccattatttcaaccgcttgccatattccgaggacccagtgttcttagctgaacaatgaatgctgaccctaaatgtggacatcatgaagcatcaaagcactgtttaactgggagtgatatgatgtgtagggcttttttttgagaatacactatcaaatcagtcttggaatacttgaaaacctcatttaccataaaaatccttctcactaaaatggataaatcagttatgtcaattgtcagatattaaataacagtgtgtgaccccaaaagtacttaccctaaaacatgtgttgcctgaaagcacatgtgtgtatcgctgccttgccatgtcttgttcagaagacacaggggagcagggttagctcacgtgtctttagaactccagtactcacccagggactccagttcacaggccagaaaacatatgcattatgaagttcccctctactccatgcacatagtaagtctgactatggcagtcagacttacttactcccattttcccttcgatatatgactttttctcagtaaatattaacctgaactattccaactccccttgtactcttgctttttcaattctcctgttgcaatgacacataggaaaatcttaaaattcttgggagtgttgtcacacacctgaaaattatgagtctctatgatcttggcacaaattgtacatttgagtgtctttgacttggttaaaaggaagtttgttcacttcgatgactggatacagaatgaatcccataattgacatgggcgacagtaaaagtgtccccaaagactacactgttgttgaggtggtggtagtgctggtgggtttttgtttaatatttaaacttcttgttgtggaggctgaaaagaaaaaaaataatagaaaggtaaacaaacaaataaatagaaaagatcaacaacccctttggctatctactgagacatgactaggaagaaaacatgactttatcattttgttatagaagctgatatataaggttacacattttcatttatttgtttttctgatttgaaggtataaccttcatgatgaattacttcttcagggtgttaaggcagtgactttagaaacaaatttttttcttgcttttgttttgtttttgagaccgaatctcactctgttgcccaggctggagtgcagtggtgcgatcttggctcactgcaacttctacctccgaggttcaagagattcttgtgcctcagcctcccggatagctgccg

SEQ ID NO: 299545 - DNA, 2315 bp, Homo sapiens
ctcgtgccgaatcggcacgagcttcaggaaccaccagtcttcttaccaaacacgacttaatgctctccgagaggtacaacccgtagaacttcctaactgtaatttagttaaaggaatcgaaactggctctgaagacttggagatactgcctaatggactggctttcattagctctggattaaagtatcctggaataaagagcttcaaccccaacagtcctggaaaaatacttctgatggacctgaatgaagaagatccaacagtgttggaattggggatcactggaagtaaatttgatgtatcttcatttaaccctcatgggattagcacattcacagatgaagataatgccatgtacctcctggtggtgaaccatccagatgccaagtccacagtggagttgtttaaatttcaagaagaagaaaaatcgcttttgcatctaaaaaccatcagacataaacttctgcctaatttgaatgatattgttgctgtgggacctgagcacttttatggcacaaatgatcactattttcttgacccctacttacaatcctgggagatgtatttgggtttagcgtggtcgtatgttgtctactatagtccaagtgaagttcgagtggtggcagaaggatttgattttgctaatggaatcaacatttcacccgatggcaagtatgtctatatagctgagttgctggctcataagattcatgtgtatgaaaagcatgctaattggactttaactccattgaagtcccttgactttaataccctcgtggataacatatctgtggatcctgagacaggagacctttgggttggatgccatcccaatggcatgaaaatcttcttctatgactcagagaatcctcctgcatcagaggtgcttcgaatccagaacattctaacagaagaacctaaagtgacacaggtttatgcagaaaatggcacagtgttgcaaggcagtacagttgcctctgtgtacaaagggaaactgctgattggcacagtgtttcacaaagctctttactgtgagctctaacagaccgatttgcacccatgccatagaaactgaggccattatttcaaccgcttgccatattccgaggacccagtgttcttagctgaacaatgaatgctgaccctaaatgtggacatcatgaagcatcaaagcactgtttaactgggagtgatatgatgtgtagggcttttttttgagaatacactatcaaatcagtcttggaatacttgaaaacctcatttaccataaaaatccttctcactaaaatggataaatcagttatgtcaattgtcagatattaaataacagtgtgtgaccccaaaagtacttaccctaaaacatgtgttgcctgaaagcacatgtgtgtatcgctgccttgccatgtcttgttcagaagacacaggggagcagggttagctcacgtgtctttagaactccagtactcacccagggactccagttcacaggccagaaaacatatgcattatgaagttcccctctactccatgcacatagtaagtctgactatggcagtcagacttacttactcccattttcccttcgatatatgactttttctcagtaaatattaacctgaactattccaactccccttgtactcttgctttttcaattctcctgttgcaatgacacataggaaaatcttaaaattcttgggagtgttgtcacacacctgaaaattatgagtctctatgatcttggcacaaattgtacatttgagtgtctttgacttggttaaaaggaagtttgttcacttcgatgactggatacagaatgaatcccataattgacatgggcgacagtaaaagtgtccccaaagactacactgttgttgaggtggtggtagtgctggtgggtttttgtttaatatttaaacttcttgttgtggaggctgaaaagaaaaaaaataatagaaaggtaaacaaacaaataaatagaaaagatcaacaacccctttggctatctactgagacatgactaggaagaaaacatgactttatcattttgttatagaagctgatatataaggttacacattttcatttatttgtttttctgatttgaaggtataaccttcatgatgaattacttcttcagggtgttaaggcagtgactttagaaacaaatttttttcttgcttttgttttgtttttgagaccgaatctcactctgttgcccaggctggagtgcagtggtgcgatcttggctcactgcaacttctacctccgaggttcaagagattcttgtgcctcagcctcccggatagctgccg

SEQ ID NO: 299546 - DNA, 2600 bp, Homo sapiens
taggaggctgcccatctgtcagcaactctaaaacatcaatggaataaactggaaccatgttgccatttacccggactttccacctaggagtccttacacactgatgaaattgctcctgttcctgccaaagtacacagagccctagagaggatattatgtatctcttatgtgtacctatccacctctgctaaataaaaactaaatattgtacccagagttccccacttgtcttgccctggccttgcctggaaaaattgcaggaatgcctacctttgcaacttattataatttctgaatagttttgtgtgtgttttatttctttctcccccacagaacacgacttaatgctctccgagaggtacaacccgtagaacttcctaactgtaatttagttaaaggaatcgaaactggctctgaagacttggagatactgcctaatggactggctttcattagctctggattaaagtatcctggaataaagagcttcaaccccaacagtcctggaaaaatacttctgatggacctgaatgaagaagatccaacagtgttggaattggggatcactggaagtaaatttgatgtatcttcatttaaccctcatgggattagcacattcacagatgaagataatgccatgtacctcctggtggtgaaccatccagatgccaagtccacagtggagttgtttaaatttcaagaagaagaaaaatcgcttttgcatctaaaaaccatcagacataaacttctgcctaatttgaatgatattgttgctgtgggacctgagcacttttatggcacaaatgatcactattttcttgacccctacttacaatcctgggagatgtatttgggtttagcgtggtcgtatgttgtctactatagtccaagtgaagttcgagtggtggcagaaggatttgattttgctaatggaatcaacatttcacccgatggcaagtatgtctatatagctgagttgctggctcataagattcatgtgtatgaaaagcatgctaattggactttaactccattgaagtcccttgactttaataccctcgtggataacatatctgtggatcctgagacaggagacctttgggttggatgccatcccaatggcatgaaaatcttcttctatgactcagagaatcctcctgcatcagaggtgcttcgaatccagaacattctaacagaagaacctaaagtgacacaggtttatgcagaaaatggcacagtgttgcaaggcagtacagttgcctctgtgtacaaagggaaactgctgattggcacagtgtttcacaaagctctttactgtgagctctaacagaccgatttgcacccatgccatagaaactgaggccattatttcaaccgcttgccatattccgaggacccagtgttcttagctgaacaatgaatgctgaccctaaatgtggacatcatgaagcatcaaagcactgtttaactgggagtgatatgatgtgtagggcttttttttgagaatacactatcaaatcagtcttggaatacttgaaaacctcatttaccataaaaatccttctcactaaaatggataaatcagttatgtcaattgtcagatattaaataacagtgtgtgaccccaaaagtacttaccctaaaacatgtgttgcctgaaagcacatgtgtgtatcgctgccttgccatgtcttgttcagaagacacaggggagcagggttagctcacgtgtctttagaactccagtactcacccagggactccagttcacaggccagaaaacatatgcattatgaagttcccctctactccatgcacatagtaagtctgactatggcagtcagacttacttactcccattttcccttcgatatatgactttttctcagtaaatattaacctgaactattccaactccccttgtactcttgctttttcaattctcctgttgcaatgacacataggaaaatcttaaaattcttgggagtgttgtcacacacctgaaaattatgagtctctatgatcttggcacaaattgtacatttgagtgtctttgacttggttaaaaggaagtttgttcacttcgatgactggatacagaatgaatcccataattgacatgggcgacagtaaaagtgtccccaaagactacactgttgttgaggtggtggtagtgctggtgggtttttgtttaatatttaaacttcttgttgtggaggctgaaaagaaaaaaaataatagaaaggtaaacaaacaaataaatagaaaagatcaacaacccctttggctatctactgagacatgactaggaagaaaacatgactttatcattttgttatagaagctgatatataaggttacacattttcatttatttgtttttctgatttgaaggtataaccttcatgatgaattacttcttcagggtgttaaggcagtgactttagaaacaaatttttttcttgcttttgttttgtttttgagaccgaatctcactctgttgcccaggctggagtgcagtggtgcgatcttggctcactgcaacttctacctccgaggttcaagagattcttgtgcctcagcctcccggatagctgccg

SEQ ID NO: 299547 - DNA, 2261 bp, Homo sapiens
ctcgtgccgaatcggcacgagcttcaggaaccaccagtcttcttaccaaacacgacttaatgctctccgagaggtacaacccgtagaacttcctaactgtaatttagttaaaggaatcgaaactggctctgaagacttggagatactgcctaatggactggctttcattagctctggattaaagtatcctggaataaagagcttcaaccccaacagtcctggaatcactggaagtaaatttgatgtatcttcatttaaccctcatgggattagcacattcacagatgaagataatgccatgtacctcctggtggtgaaccatccagatgccaagtccacagtggagttgtttaaatttcaagaagaagaaaaatcgcttttgcatctaaaaaccatcagacataaacttctgcctaatttgaatgatattgttgctgtgggacctgagcacttttatggcacaaatgatcactattttcttgacccctacttacaatcctgggagatgtatttgggtttagcgtggtcgtatgttgtctactatagtccaagtgaagttcgagtggtggcagaaggatttgattttgctaatggaatcaacatttcacccgatggcaagtatgtctatatagctgagttgctggctcataagattcatgtgtatgaaaagcatgctaattggactttaactccattgaagtcccttgactttaataccctcgtggataacatatctgtggatcctgagacaggagacctttgggttggatgccatcccaatggcatgaaaatcttcttctatgactcagagaatcctcctgcatcagaggtgcttcgaatccagaacattctaacagaagaacctaaagtgacacaggtttatgcagaaaatggcacagtgttgcaaggcagtacagttgcctctgtgtacaaagggaaactgctgattggcacagtgtttcacaaagctctttactgtgagctctaacagaccgatttgcacccatgccatagaaactgaggccattatttcaaccgcttgccatattccgaggacccagtgttcttagctgaacaatgaatgctgaccctaaatgtggacatcatgaagcatcaaagcactgtttaactgggagtgatatgatgtgtagggcttttttttgagaatacactatcaaatcagtcttggaatacttgaaaacctcatttaccataaaaatccttctcactaaaatggataaatcagttatgtcaattgtcagatattaaataacagtgtgtgaccccaaaagtacttaccctaaaacatgtgttgcctgaaagcacatgtgtgtatcgctgccttgccatgtcttgttcagaagacacaggggagcagggttagctcacgtgtctttagaactccagtactcacccagggactccagttcacaggccagaaaacatatgcattatgaagttcccctctactccatgcacatagtaagtctgactatggcagtcagacttacttactcccattttcccttcgatatatgactttttctcagtaaatattaacctgaactattccaactccccttgtactcttgctttttcaattctcctgttgcaatgacacataggaaaatcttaaaattcttgggagtgttgtcacacacctgaaaattatgagtctctatgatcttggcacaaattgtacatttgagtgtctttgacttggttaaaaggaagtttgttcacttcgatgactggatacagaatgaatcccataattgacatgggcgacagtaaaagtgtccccaaagactacactgttgttgaggtggtggtagtgctggtgggtttttgtttaatatttaaacttcttgttgtggaggctgaaaagaaaaaaaataatagaaaggtaaacaaacaaataaatagaaaagatcaacaacccctttggctatctactgagacatgactaggaagaaaacatgactttatcattttgttatagaagctgatatataaggttacacattttcatttatttgtttttctgatttgaaggtataaccttcatgatgaattacttcttcagggtgttaaggcagtgactttagaaacaaatttttttcttgcttttgttttgtttttgagaccgaatctcactctgttgcccaggctggagtgcagtggtgcgatcttggctcactgcaacttctacctccgaggttcaagagattcttgtgcctcagcctcccggatagctgccg

SEQ ID NO: 299548 - DNA, 2341 bp, Homo sapiens
cggagcccgtcaggtgtctgacagcccatcgatccctttgtctatcccccgaccatggcgaagctgattgcgctcaccctcttggggatgggactggcactcttcaggaaccaccagtcttcttaccaaacacgacttaatgctctccgagaggtacaacccgtagaacttcctaactgtaatttagttaaaggaatcgaaactggctctgaagacttggagatactgcctaatggactggctttcattagctctggattaaagtatcctggaataaagagcttcaaccccaacagtcctggaatcactggaagtaaatttgatgtatcttcatttaaccctcatgggattagcacattcacagatgaagataatgccatgtacctcctggtggtgaaccatccagatgccaagtccacagtggagttgtttaaatttcaagaagaagaaaaatcgcttttgcatctaaaaaccatcagacataaacttctgcctaatttgaatgatattgttgctgtgggacctgagcacttttatggcacaaatgatcactattttcttgacccctacttacaatcctgggagatgtatttgggtttagcgtggtcgtatgttgtctactatagtccaagtgaagttcgagtggtggcagaaggatttgattttgctaatggaatcaacatttcacccgatggcaagtatgtctatatagctgagttgctggctcataagattcatgtgtatgaaaagcatgctaattggactttaactccattgaagtcccttgactttaataccctcgtggataacatatctgtggatcctgagacaggagacctttgggttggatgccatcccaatggcatgaaaatcttcttctatgactcagagaatcctcctgcatcagaggtgcttcgaatccagaacattctaacagaagaacctaaagtgacacaggtttatgcagaaaatggcacagtgttgcaaggcagtacagttgcctctgtgtacaaagggaaactgctgattggcacagtgtttcacaaagctctttactgtgagctctaacagaccgatttgcacccatgccatagaaactgaggccattatttcaaccgcttgccatattccgaggacccagtgttcttagctgaacaatgaatgctgaccctaaatgtggacatcatgaagcatcaaagcactgtttaactgggagtgatatgatgtgtagggcttttttttgagaatacactatcaaatcagtcttggaatacttgaaaacctcatttaccataaaaatccttctcactaaaatggataaatcagttatgtcaattgtcagatattaaataacagtgtgtgaccccaaaagtacttaccctaaaacatgtgttgcctgaaagcacatgtgtgtatcgctgccttgccatgtcttgttcagaagacacaggggagcagggttagctcacgtgtctttagaactccagtactcacccagggactccagttcacaggccagaaaacatatgcattatgaagttcccctctactccatgcacatagtaagtctgactatggcagtcagacttacttactcccattttcccttcgatatatgactttttctcagtaaatattaacctgaactattccaactccccttgtactcttgctttttcaattctcctgttgcaatgacacataggaaaatcttaaaattcttgggagtgttgtcacacacctgaaaattatgagtctctatgatcttggcacaaattgtacatttgagtgtctttgacttggttaaaaggaagtttgttcacttcgatgactggatacagaatgaatcccataattgacatgggcgacagtaaaagtgtccccaaagactacactgttgttgaggtggtggtagtgctggtgggtttttgtttaatatttaaacttcttgttgtggaggctgaaaagaaaaaaaataatagaaaggtaaacaaacaaataaatagaaaagatcaacaacccctttggctatctactgagacatgactaggaagaaaacatgactttatcattttgttatagaagctgatatataaggttacacattttcatttatttgtttttctgatttgaaggtataaccttcatgatgaattacttcttcagggtgttaaggcagtgactttagaaacaaatttttttcttgcttttgttttgtttttgagaccgaatctcactctgttgcccaggctggagtgcagtggtgcgatcttggctcactgcaacttctacctccgaggttcaagagattcttgtgcctcagcctcccggatagctgccg

SEQ ID NO: 299549 - DNA, 2346 bp, Homo sapiens
cggagcccgtcaggtgtctgacagcccatcgatccctttgtctatcccccgaccatggcgaagctgattgcgctcaccctcttggggatgggactggcactcttcaggaaccaccagtcttcttaccaaacacgacttaatgctctccgagaggtacaacccgtagaacttcctaactgtaatttagttaaaggaatcgaaactggctctgaagacttggagatactgcctaatggactggctttcattagctctggattaaagtatcctggaataaagagcttcaaccccaacagtcctggaaaaatacttctgatggacctgaatgaagaagatccaacagtgttggaattggggatcactggaagtaaatttgatgtatcttcatttaaccctcatgggattagcacattcacagatgaagataatgccatgtacctcctggtggtgaaccatccagatgccaagtccacagtggagttgtttaaatttcaagaagaagtttgaatgatattgttgctgtgggacctgagcacttttatggcacaaatgatcactattttcttgacccctacttacaatcctgggagatgtatttgggtttagcgtggtcgtatgttgtctactatagtccaagtgaagttcgagtggtggcagaaggatttgattttgctaatggaatcaacatttcacccgatggcaagtatgtctatatagctgagttgctggctcataagattcatgtgtatgaaaagcatgctaattggactttaactccattgaagtcccttgactttaataccctcgtggataacatatctgtggatcctgagacaggagacctttgggttggatgccatcccaatggcatgaaaatcttcttctatgactcagagaatcctcctgcatcagaggtgcttcgaatccagaacattctaacagaagaacctaaagtgacacaggtttatgcagaaaatggcacagtgttgcaaggcagtacagttgcctctgtgtacaaagggaaactgctgattggcacagtgtttcacaaagctctttactgtgagctctaacagaccgatttgcacccatgccatagaaactgaggccattatttcaaccgcttgccatattccgaggacccagtgttcttagctgaacaatgaatgctgaccctaaatgtggacatcatgaagcatcaaagcactgtttaactgggagtgatatgatgtgtagggcttttttttgagaatacactatcaaatcagtcttggaatacttgaaaacctcatttaccataaaaatccttctcactaaaatggataaatcagttatgtcaattgtcagatattaaataacagtgtgtgaccccaaaagtacttaccctaaaacatgtgttgcctgaaagcacatgtgtgtatcgctgccttgccatgtcttgttcagaagacacaggggagcagggttagctcacgtgtctttagaactccagtactcacccagggactccagttcacaggccagaaaacatatgcattatgaagttcccctctactccatgcacatagtaagtctgactatggcagtcagacttacttactcccattttcccttcgatatatgactttttctcagtaaatattaacctgaactattccaactccccttgtactcttgctttttcaattctcctgttgcaatgacacataggaaaatcttaaaattcttgggagtgttgtcacacacctgaaaattatgagtctctatgatcttggcacaaattgtacatttgagtgtctttgacttggttaaaaggaagtttgttcacttcgatgactggatacagaatgaatcccataattgacatgggcgacagtaaaagtgtccccaaagactacactgttgttgaggtggtggtagtgctggtgggtttttgtttaatatttaaacttcttgttgtggaggctgaaaagaaaaaaaataatagaaaggtaaacaaacaaataaatagaaaagatcaacaacccctttggctatctactgagacatgactaggaagaaaacatgactttatcattttgttatagaagctgatatataaggttacacattttcatttatttgtttttctgatttgaaggtataaccttcatgatgaattacttcttcagggtgttaaggcagtgactttagaaacaaatttttttcttgcttttgttttgtttttgagaccgaatctcactctgttgcccaggctggagtgcagtggtgcgatcttggctcactgcaacttctacctccgaggttcaagagattcttgtgcctcagcctcccggatagctgccg

SEQ ID NO: 299550 - DNA, 2357 bp, Homo sapiens
cggagcccgtcaggtgtctgacagcccatcgatccctttgtctatcccccgaccatggcgaagctgattgcgctcaccctcttggggatgggactggcactcttcaggaaccaccagtcttcttaccaaacacgacttaatgctctccgagaggtacaacccgtagaacttcctaactgtaatttagttaaaggaatcgaaactggctctgaagacttggagatactgcctaatggactggctttcattagctctggattaaagtatcctggaataaagagcttcaaccccaacagtcctggaaaaatacttctgatggacctgaatgaagaagatccaacagtgttggaattggggatcactggaagtaaatttgatgtatcttcatttaaccctcatgggattagcacattcacagatgaagataatgccatgtacctcctggtggtgaaccatccagatgccaagtccacagtggagttgtttaaatttcaagaagaagaaaaatcgcttttgcatctaaaaaccatcagacataaacttctgcctaaatggcacaaatgatcactattttcttgacccctacttacaatcctgggagatgtatttgggtttagcgtggtcgtatgttgtctactatagtccaagtgaagttcgagtggtggcagaaggatttgattttgctaatggaatcaacatttcacccgatggcaagtatgtctatatagctgagttgctggctcataagattcatgtgtatgaaaagcatgctaattggactttaactccattgaagtcccttgactttaataccctcgtggataacatatctgtggatcctgagacaggagacctttgggttggatgccatcccaatggcatgaaaatcttcttctatgactcagagaatcctcctgcatcagaggtgcttcgaatccagaacattctaacagaagaacctaaagtgacacaggtttatgcagaaaatggcacagtgttgcaaggcagtacagttgcctctgtgtacaaagggaaactgctgattggcacagtgtttcacaaagctctttactgtgagctctaacagaccgatttgcacccatgccatagaaactgaggccattatttcaaccgcttgccatattccgaggacccagtgttcttagctgaacaatgaatgctgaccctaaatgtggacatcatgaagcatcaaagcactgtttaactgggagtgatatgatgtgtagggcttttttttgagaatacactatcaaatcagtcttggaatacttgaaaacctcatttaccataaaaatccttctcactaaaatggataaatcagttatgtcaattgtcagatattaaataacagtgtgtgaccccaaaagtacttaccctaaaacatgtgttgcctgaaagcacatgtgtgtatcgctgccttgccatgtcttgttcagaagacacaggggagcagggttagctcacgtgtctttagaactccagtactcacccagggactccagttcacaggccagaaaacatatgcattatgaagttcccctctactccatgcacatagtaagtctgactatggcagtcagacttacttactcccattttcccttcgatatatgactttttctcagtaaatattaacctgaactattccaactccccttgtactcttgctttttcaattctcctgttgcaatgacacataggaaaatcttaaaattcttgggagtgttgtcacacacctgaaaattatgagtctctatgatcttggcacaaattgtacatttgagtgtctttgacttggttaaaaggaagtttgttcacttcgatgactggatacagaatgaatcccataattgacatgggcgacagtaaaagtgtccccaaagactacactgttgttgaggtggtggtagtgctggtgggtttttgtttaatatttaaacttcttgttgtggaggctgaaaagaaaaaaaataatagaaaggtaaacaaacaaataaatagaaaagatcaacaacccctttggctatctactgagacatgactaggaagaaaacatgactttatcattttgttatagaagctgatatataaggttacacattttcatttatttgtttttctgatttgaaggtataaccttcatgatgaattacttcttcagggtgttaaggcagtgactttagaaacaaatttttttcttgcttttgttttgtttttgagaccgaatctcactctgttgcccaggctggagtgcagtggtgcgatcttggctcactgcaacttctacctccgaggttcaagagattcttgtgcctcagcctcccggatagctgccg

SEQ ID NO: 299551 - DNA, 993 bp, Homo sapiens
ctcgtgccgaatcggcacgagcttcaggaaccaccagtcttcttaccaaacacgacttaatgctctccgagaggtacaacccgtagaacttcctaactgtaatttagttaaaggaatcgaaactggctctgaagacttggagatactgcctaatggactggctttcattagctctggattaaagtatcctggaataaagagcttcaaccccaacagtcctggaatcactggaagtaaatttgatgtatcttcatttaaccctcatgggattagcacattcacagatgaagataatgccatgtacctcctggtggtgaaccatccagatgccaagtccacagtggagttgtttaaatttcaagaagaagaaaaatcgcttttgcatctaaaaaccatcagacataaacttctgcctaactgcctaagtactgagatatatcacatttctattttcctttagctgtagcggatagttaatccacttttagtttttccttttggccagagtaggtatggctgttcaactctcatttctaatgatcacaaactcctccacatgctcttctgaagaaccttctgaggactcaagcccctcagagacggcccattcttttcctctcttgtttctcgagctgattggatgctggctcctggcctcaggatctccattcaagttattaccaggaaaaaaatcctcttcttcagaaccagacttagtatttcaaacccaaaccggcttcatagataaatttgacatcatgagcttatttatttatattaaaaagtagactcttagatgtttccatgaattagaaacacagacccaagaggagaccctgaatcaagtgcatctaagacctccttatactgcctccgctgctgtttgattgcacaaaatttatgcaatagcagatctgtggtaacactcaattccccctaggcaccttgttcatgtaacatatggtgaaataaaacactcaagaatctccaatc

SEQ ID NO: 299552 - DNA, 2571 bp, Homo sapiens
agaaaagaagtgccattatgtgaactaatgaaacccttgggctttagcaggtgtacggtcgaatccttgatgaggaggccgcggcgcgggacgcatagagctgcggctcgggcggcgcctccctgcggcggcccggcccggctccggcccccgctggggcaatgctccccggggccgcgggatgagccagcgatcctgaactgtgttcctgcccacagtgactcggccggtccgggcatggcagacccagtggcgggcatcgcgggctcggcggccaagagcgtgcggccatttcgctccagtgaggcctacgtggaggccatgaaggaggacctggccgagtggctcaatgccttgtacggcctgggtctcccgggtggtggcgatggcttcctgacagggctggccacgggcacgaccctgtgccaacatgccaacgccgtgaccgaggctgcccgtgcattggcagccgcccgcccggcccgaggtgtggccttccaggcgcacagtgtagtgcctggctccttcatggcgcgcgacaacgtggccaccttcatcggctggtgccgcgtggagctgggtgtgccggaggtgctcatgtttgagactgaggacctggtgctgcgcaagaacgagaagagcgtggtgctgtgcctgctggaggtggcgcggcgtggggcacgcctgggcctgctggccccacgcctcgtgcagtttgagcaggagattgagcgggagctgcgtgctgcacccccagcccccaacgcccctgccgctggggaggacaccactgaaaccgcccccgcaccagggactcctgcccgcggcccccgcatgacacccagcgacctgcgcaacctcgacgagctggtgagggagattctgggccgctgcacctgccctgaccagtttcccatgatcaaggtctcagaggggaagtaccgtgtgggggactcgagcctgctcatctttgtgcgggtgctgaggagccacgtgatggtgcgagtgggtggtggctgggacacgctggagcattacctggacaagcacgacccgtgccgctgctcctccactgctcatcgcccaccccagccgagggtctgcaccttttctccacagagggtgtcgcccaccaccagtccccgccctgctagcccagtccctgggagtgagcgccggggctcccggcctgagatgactcccgttagcttacgaagcacaaaggaggggcccgagaccccacccaggccccgggatcagctgcccccccatccccgctcccgccgctactccggggacagtgactcctcagcctcctccgcccagagcggcccccttggtacccgcagtgatgacacaggcactggcccccggagggagcgacccagccggcggctgaccacaggcaccccggcctctccgagacggcctcctgccctgcgcagccagtcccgagaccggctggatcgcggccggccccggggggccccaggaggcaggggagcccagctgtcggtccccagccctgcccggcgggcccggagccagagccgcgaggagcaggctgtgctgcttgtgcgcagggatcgagacgggcagcactcatgggtgccaaggggcaggggcagtgggggctcgggcaggagcaccccccagactccccgtgcccgcagccctgcagcaccccggctttcccgggtctccagccccagtccagagttgggcaccacaccggccagcatcttccgcacacccctgcagctcgacccgcagcaggagcagcagctgttccggcgcctggaagaggagttcctggccaatgcccgggcccttgaggctgttgctagcgtgacccccactggaccagcccctgacccagctcgggcccccgaccctccagctcctgactctgcctattgttcctccagttcctcctcttcgtccctcagcgtcctgggtggcaaatgtggccaacctggggactctggccggacggccaatgggctgcctgggccccgaagccaagccctttccagctcctccgatgaaggcagcccctgccctggcatgggggggccactagatgcacctgggagccccctggcttgcactgaaccctcgaggacctgggcacggggtcggatggacacacagccagaccgtaaaccctcacgtatccccacgcctcggggcccccgccgcccctccggacccgcagagctggggacatggcatgccctgcactcagtcaccccgagggctgagccagattcctggatgtgatggaccagctcagctgtccccagaccccatcccttctccttttcctttgtggccttaacccttctgcatcagggagccccctctgcctcttgagtaccagacctcatgggaccagaccccttgggaccacatggcacaatgggacctctgttgtacattccggttgggggatgagcgttgctatttaattactaatattattgaatgccttagaggaggccgggcgagcccggtgttctgaagacctgtggcccagcagagcctctgacagtaaagttttgctccagc

SEQ ID NO: 299553 - DNA, 3388 bp, Homo sapiens
cgcggcggtgccgtttatctggccaggggaggtccacccgggaggaggtgactttgcagcctccagccgctatcgcttcctgacttcatcttgggaacaggccgtgctgtgcgccagcccggggagcccaccgtctggggaggggggcgattaaaaggtcccaacctcctccccaggagaccaaagaggttggacggggccccgggtactaggctgggtgggggttgggcgcctgggccggtcgcagttgtctgggggccctggggctctctgcgtcgagagcgctcgaagacccgggattcctggcccgatcgcgggcggggggagaccccagctccaccccagctcccgccggctcggggaaggggcggcccctttaagagcgcgcggccccgcccgccccctccgggcaggatccgaattccagggaggcggggcggagacggcggcgaggaggaggccgcggcgcgggacgcatagagctgcggctcgggcggcgcctccctgcggcggcccggcccggctccggcccccgctggggcaatgctccccggggccgcgggatgagccagtgactcggccggtccgggcatggcagacccagtggcgggcatcgcgggctcggcggccaagagcgtgcggccatttcgctccagtgaggcctacgtggaggccatgaaggaggacctggccgagtggctcaatgccttgtacggcctgggtctcccgggtggtggcgatggcttcctgacagggctggccacgggcacgaccctgtgccaacatgccaacgccgtgaccgaggctgcccgtgcattggcagccgcccgcccggcccgaggtgtggccttccaggcgcacagtgtagtgcctggctccttcatggcgcgcgacaacgtggccaccttcatcggctggtgccgcgtggagctgggtgtgccggaggtgctcatgtttgagactgaggacctggtgctgcgcaagaacgagaagagcgtggtgctgtgcctgctggaggtggcgcggcgtggggcacgcctgggcctgctggccccacgcctcgtgcagtttgagcaggagattgagcgggagctgcgtgctgcacccccagcccccaacgcccctgccgctggggaggacaccactgaaaccgcccccgcaccagggactcctgcccgcggcccccgcatgacacccagcgacctgcgcaacctcgacgagctggtgagggagattctgggccgctgcacctgccctgaccagtttcccatgatcaaggtctcagaggggaagtaccgtgtgggggactcgagcctgctcatctttgtgcgggtgctgaggagccacgtgatggtgcgagtgggtggtggctgggacacgctggagcattacctggacaagcacgacccgtgccgctgctcctccactgctcatcgcccaccccagccgagggtctgcaccttttctccacagagggtgtcgcccaccaccagtccccgccctgctagcccagtccctgggagtgagcgccggggctcccggcctgagatgactcccgttagcttacgaagcacaaaggaggggcccgagaccccacccaggtgagatgcaggaggacgaggagtgaggggtccagagggtgggggggcgtcagccctggcctgcatgatgggttgcctgtgcgccagagtgactcacaccctgggaaaagttcccgtgggtgggggcgggcctggcttcccatctccatggcaacccaaccaaaccaacaacacagctggggcgggccctgtggctgggcggcagccagtccagctcttgcttcctctggcccgtcctgggaaggggggtgtctagagcccaggaaacttcttcttccgtggcttttggggccctgggccgctggaggaagctgctcacttctccctggaagtccccaggacagaccgatgcccctgacagccccgtccaccagccacataccctgctgttcctctccctgcctgttctgcatgccagtccttccgtggtaccccatctgtctctattgtccccctgccccaggccccgggatcagctgcccccccatccccgctcccgccgctactccggggacagtgactcctcagcctcctccgcccagagcggcccccttggtacccgcagtgatgacacaggcactggcccccggagggagcgacccagccggcggctgaccacaggcaccccggcctctccgagacggcctcctgccctgcgcagccagtcccgagaccggctggatcgcggccggccccggggggccccaggaggcaggggagcccagctgtcggtccccagccctgcccggcgggcccggagccagagccgcgaggagcaggctgtgctgcttgtgcgcagggatcgagacgggcagcactcatgggtgccaaggggcaggggcagtgggggctcgggcaggagcaccccccagactccccgtgcccgcagccctgcagcaccccggctttcccgggtctccagccccagtccagagttgggcaccacaccggccagcatcttccgcacacccctgcagctcgacccgcagcaggagcagcagctgttccggcgcctggaagaggagttcctggccaatgcccgggcccttgaggctgttgctagcgtgacccccactggaccagcccctgacccagctcgggcccccgaccctccagctcctgactctgcctattgttcctccagttcctcctcttcgtccctcagcgtcctgggtggcaaatgtggccaacctggggactctggccggacggccaatgggctgcctgggccccgaagccaagccctttccagctcctccgatgaaggcagcccctgccctggcatgggggggccactagatgcacctgggagccccctggcttgcactgaaccctcgaggacctgggcacggggtcggatggacacacagccagaccgtaaaccctcacgtatccccacgcctcggggcccccgccgcccctccggacccgcagagctggggacatggcatgccctgcactcagtcaccccgagggctgagccagattcctggatgtgatggaccagctcagctgtccccagaccccatcccttctccttttcctttgtggccttaacccttctgcatcagggagccccctctgcctcttgagtaccagacctcatgggaccagaccccttgggaccacatggcacaatgggacctctgttgtacattccggttgggggatgagcgttgctatttaattactaatattattgaatgccttagaggaggccgggcgagcccggtgttctgaagacctgtggcccagcagagcctctgacagtaaagttttgctccagc

SEQ ID NO: 299554 - DNA, 3643 bp, Homo sapiens
cgcggcggtgccgtttatctggccaggggaggtccacccgggaggaggtgactttgcagcctccagccgctatcgcttcctgacttcatcttgggaacaggccgtgctgtgcgccagcccggggagcccaccgtctggggaggggggcgattaaaaggtcccaacctcctccccaggagaccaaagaggttggacggggccccgggtactaggctgggtgggggttgggcgcctgggccggtcgcagttgtctgggggccctggggctctctgcgtcgagagcgctcgaagacccgggattcctggcccgatcgcgggcggggggagaccccagctccaccccagctcccgccggctcggggaaggggcggcccctttaagagcgcgcggccccgcccgccccctccgggcaggatccgaattccagggaggcggggcggagacggcggcgaggaggaggccgcggcgcgggacgcatagagctgcggctcgggcggcgcctccctgcggcggcccggcccggctccggcccccgctggggcaatgctccccggggccgcgggatgagccagtgactcggccggtccgggcatggcagacccagtggcgggcatcgcgggctcggcggccaagagcgtgcggccatttcgctccagtgaggcctacgtggaggccatgaaggaggacctggccgagtggctcaatgccttgtacggcctgggtctcccgggtggtggcgatggcttcctgacagggctggccacgggcacgaccctgtgccaacatgccaacgccgtgaccgaggctgcccgtgcattggcagccgcccgcccggcccgaggtgtggccttccaggcgcacagtgtagtgcctggctccttcatggcgcgcgacaacgtggccaccttcatcggctggtgccgcgtggagctgggtgtgccggaggtgctcatgtttgagactgaggacctggtgctgcgcaagaacgagaagagcgtggtgctgtgcctgctggaggtggcgcggcgtggggcacgcctgggcctgctggccccacgcctcgtgcagtttgagcaggagattgagcgggagctgcgtgctgcacccccagcccccaacgcccctgccgctggggaggacaccactgaaaccgcccccgcaccagggactcctgcccgcggcccccgcatgacacccagcgacctgcgcaacctcgacgagctggtgagggagattctgggccgctgcacctgccctgaccagtttcccatgatcaaggtctcagaggggaagtaccgtgtgggggactcgagcctgctcatctttgtgcgggtgctgaggagccacgtgatggtgcgagtgggtggtggctgggacacgctggagcattacctggacaagcacgacccgtgccgctgctcctccactgctcatcgcccaccccagccgagggtctgcaccttttctccacagagggtgtcgcccaccaccagtccccgccctgctagcccagtccctgggagtgagcgccggggctcccggcctgagatgactcccgttagcttacgaagcacaaaggaggggcccgagaccccacccaggtgagatgcaggaggacgaggagtgaggggtccagagggtgggggggcgtcagccctggcctgcatgatgggttgcctgtgcgccagagtgactcacaccctgggaaaagttcccgtgggtgggggcgggcctggcttcccatctccatggcaacccaaccaaaccaacaacacagctggggcgggccctgtggctgggcggcagccagtccagctcttgcttcctctggcccgtcctgggaaggggggtgtctagagcccaggaaacttcttcttccgtggcttttggggccctgggccgctggaggaagctgctcacttctccctggaagtccccaggacagaccgatgcccctgacagccccgtccaccagccacataccctgctgttcctctccctgcctgttctgcatgccagtccttccgtggtaccccatctgtctctattgtccccctgccccaggccccgggatcagctgcccccccatccccgctcccgccgctactccggggacagtgactcctcagcctcctccgcccagagcggcccccttggtacccgcagtgatgacacaggcactggcccccggagggagcgacccagccggcggctgaccacaggcaccccggcctctccgagacggcctcctgccctgcgcagccagtcccgagaccggctggatcgcggccggccccggggggccccaggaggcaggggagcccagctgtcggtccccagccctgcccggcgggcccggagccagagccgcgaggagcaggctgtgctgcttgtgcgcagggatcgagacgggcagcactcatgggtgccaaggggcaggggcagtgggggctcgggcaggagcaccccccagactccccgtgcccgcagccctgcagcaccccggctttcccgggtctccagccccagtccagagttgggcaccacaccggccagcatcttccgcacacccctgcagctcgacccgcagcaggagcagcagctgttccggcgcctggaagaggagttcctggccaatgcccgggcccttgaggctgttgctagcgtgacccccactggaccagcccctgacccagctcgggcccccgaccctccagctcctgactctgcctattgttcctccagttcctcctcttcgtccctcagcgtcctgggtggcaaatgtggccaacctggggactctggccggacggccaatgggctgcctgggccccgaagccaagccctttccagctcctccgatgaaggcagcccctgccctggcatgggggggccactagatgcacctgggagccccctggcttgcactgaaccctcgaggacctgggcacggggtcggatggacacacagccagaccgtaaaccctcacgtatccccacgcctcggggcccccgccgcccctccggacccgcagagctggggacatggcatgccctgcactcagtcaccccgagggctgagccagattcctggatgtgatggaccagctcagctgtccccagaccccatcccttctccttttcctttgtggccttaacccttctgcatcagggagccccctctgcctcttgagtaccagacctcatgggaccagaccccttgggaccacatggcacaatgggacctctgttgtacattccggttgggggatgagcgttgctatttaattactaatattattgaatgccttagaggaggccgggcgagcccggtgttctgaagacctgtggcccagcagagcctctgacagtaaagttttgctccagcaaaaaaaaaaaaaaaaaaaaaaaaaaaaacctcgtgccgaattcggcacgaggtgggcacccacaagttctccagtgccattggcctggtgctgctgatggaggcggtggccgtgctcgtcgggcccccttcgggaggcaaactcctggatgcgacccacgtctacatgtacgtgttcatcctggcgggggccgaggtgctcacctcctccctgattttgctgctgggcaacttcttctgcattaggaagaagcc

SEQ ID NO: 299555 - DNA, 2753 bp, Homo sapiens
cgcggcggtgccgtttatctggccaggggaggtccacccgggaggaggtgactttgcagcctccagccgctatcgcttcctgacttcatcttgggaacaggccgtgctgtgcgccagcccggggagcccaccgtctggggaggggggcgattaaaaggtcccaacctcctccccaggagaccaaagaggttggacggggccccgggtactaggctgggtgggggttgggcgcctgggccggtcgcagttgtctgggggccctggggctctctgcgtcgagagcgctcgaagacccgggattcctggcccgatcgcgggcggggggagaccccagctccaccccagctcccgccggctcggggaaggggcggcccctttaagagcgcgcggccccgcccgccccctccgggcaggatccgaattccagggaggcggggcggagacggcggcgaggaggaggccgcggcgcgggacgcatagagctgcggctcgggcggcgcctccctgcggcggcccggcccggctccggcccccgctggggcaatgctccccggggccgcgggatgagccagtgactcggccggtccgggcatggcagacccagtggcgggcatcgcgggctcggcggccaagagcgtgcggccatttcgctccagtgaggcctacgtggaggccatgaaggaggacctggccgagtggctcaatgccttgtacggcctgggtctcccgggtggtggcgatggcttcctgacagggctggccacgggcacgaccctgtgccaacatgccaacgccgtgaccgaggctgcccgtgcattggcagccgcccgcccggcccgaggtgtggccttccaggcgcacagtgtagtgcctggctccttcatggcgcgcgacaacgtggccaccttcatcggctggtgccgcgtggagctgggtgtgccggaggtgctcatgtttgagactgaggacctggtgctgcgcaagaacgagaagagcgtggtgctgtgcctgctggaggtggcgcggcgtggggcacgcctgggcctgctggccccacgcctcgtgcagtttgagcaggagattgagcgggagctgcgtgctgcacccccagcccccaacgcccctgccgctggggaggacaccactgaaaccgcccccgcaccagggactcctgcccgcggcccccgcatgacacccagcgacctgcgcaacctcgacgagctggtgagggagattctgggccgctgcacctgccctgaccagtttcccatgatcaaggtctcagaggggaagtaccgtgtgggggactcgagcctgctcatctttgtgcgggtgctgaggagccacgtgatggtgcgagtgggtggtggctgggacacgctggagcattacctggacaagcacgacccgtgccgctgctcctccactggccccgggatcagctgcccccccatccccgctcccgccgctactccggggacagtgactcctcagcctcctccgcccagagcggcccccttggtacccgcagtgatgacacaggcactggcccccggagggagcgacccagccggcggctgaccacaggcaccccggcctctccgagacggcctcctgccctgcgcagccagtcccgagaccggctggatcgcggccggccccggggggccccaggaggcaggggagcccagctgtcggtccccagccctgcccggcgggcccggagccagagccgcgaggagcaggctgtgctgcttgtgcgcagggatcgagacgggcagcactcatgggtgccaaggggcaggggcagtgggggctcgggcaggagcaccccccagactccccgtgcccgcagccctgcagcaccccggctttcccgggtctccagccccagtccagagttgggcaccacaccggccagcatcttccgcacacccctgcagctcgacccgcagcaggagcagcagctgttccggcgcctggaagaggagttcctggccaatgcccgggcccttgaggctgttgctagcgtgacccccactggaccagcccctgacccagctcgggcccccgaccctccagctcctgactctgcctattgttcctccagttcctcctcttcgtccctcagcgtcctgggtggcaaatgtggccaacctggggactctggccggacggccaatgggctgcctgggccccgaagccaagccctttccagctcctccgatgaaggcagcccctgccctggcatgggggggccactagatgcacctgggagccccctggcttgcactgaaccctcgaggacctgggcacggggtcggatggacacacagccagaccgtaaaccctcacgtatccccacgcctcggggcccccgccgcccctccggacccgcagagctggggacatggcatgccctgcactcagtcaccccgagggctgagccagattcctggatgtgatggaccagctcagctgtccccagaccccatcccttctccttttcctttgtggccttaacccttctgcatcagggagccccctctgcctcttgagtaccagacctcatgggaccagaccccttgggaccacatggcacaatgggacctctgttgtacattccggttgggggatgagcgttgctatttaattactaatattattgaatgccttagaggaggccgggcgagcccggtgttctgaagacctgtggcccagcagagcctctgacagtaaagttttgctccagc

SEQ ID NO: 299556 - DNA, 3006 bp, Homo sapiens
agaaaagaagtgccattatgtgaactaatgaaacccttgggctttagcaggtgtacggtcgaatccttgatgaggaggccgcggcgcgggacgcatagagctgcggctcgggcggcgcctccctgcggcggcccggcccggctccggcccccgctggggcaatgctccccggggccgcgggatgagccagtgactcggccggtccgggcatggcagacccagtggcgggcatcgcgggctcggcggccaagagcgtgcggccatttcgctccagtgaggcctacgtggaggccatgaaggaggacctggccgagtggctcaatgccttgtacggcctgggtctcccgggtggtggcgatggcttcctgacagggctggccacgggcacgaccctgtgccaacatgccaacgccgtgaccgaggctgcccgtgcattggcagccgcccgcccggcccgaggtgtggccttccaggcgcacagtgtagtgcctggctccttcatggcgcgcgacaacgtggccaccttcatcggctggtgccgcgtggagctgggtgtgccggaggtgctcatgtttgagactgaggacctggtgctgcgcaagaacgagaagagcgtggtgctgtgcctgctggaggtggcgcggcgtggggcacgcctgggcctgctggccccacgcctcgtgcagtttgagcaggagattgagcgggagctgcgtgctgcacccccagcccccaacgcccctgccgctggggaggacaccactgaaaccgcccccgcaccagggactcctgcccgcggcccccgcatgacacccagcgacctgcgcaacctcgacgagctggtgagggagattctgggccgctgcacctgccctgaccagtttcccatgatcaaggtctcagaggggaagtaccgtgtgggggactcgagcctgctcatctttgtgcgggtgctgaggagccacgtgatggtgcgagtgggtggtggctgggacacgctggagcattacctggacaagcacgacccgtgccgctgctcctccactgctcatcgcccaccccagccgagggtctgcaccttttctccacagagggtgtcgcccaccaccagtccccgccctgctagcccagtccctgggagtgagcgccggggctcccggcctgagatgactcccgttagcttacgaagcacaaaggaggggcccgagaccccacccaggtgagatgcaggaggacgaggagtgaggggtccagagggtgggggggcgtcagccctggcctgcatgatgggttgcctgtgcgccagagtgactcacaccctgggaaaagttcccgtgggtgggggcgggcctggcttcccatctccatggcaacccaaccaaaccaacaacacagctggggcgggccctgtggctgggcggcagccagtccagctcttgcttcctctggcccgtcctgggaaggggggtgtctagagcccaggaaacttcttcttccgtggcttttggggccctgggccgctggaggaagctgctcacttctccctggaagtccccaggacagaccgatgcccctgacagccccgtccaccagccacataccctgctgttcctctccctgcctgttctgcatgccagtccttccgtggtaccccatctgtctctattgtccccctgccccaggccccgggatcagctgcccccccatccccgctcccgccgctactccggggacagtgactcctcagcctcctccgcccagagcggcccccttggtacccgcagtgatgacacaggcactggcccccggagggagcgacccagccggcggctgaccacaggcaccccggcctctccgagacggcctcctgccctgcgcagccagtcccgagaccggctggatcgcggccggccccggggggccccaggaggcaggggagcccagctgtcggtccccagccctgcccggcgggcccggagccagagccgcgaggagcaggctgtgctgcttgtgcgcagggatcgagacgggcagcactcatgggtgccaaggggcaggggcagtgggggctcgggcaggagcaccccccagactccccgtgcccgcagccctgcagcaccccggctttcccgggtctccagccccagtccagagttgggcaccacaccggccagcatcttccgcacacccctgcagctcgacccgcagcaggagcagcagctgttccggcgcctggaagaggagttcctggccaatgcccgggcccttgaggctgttgctagcgtgacccccactggaccagcccctgacccagctcgggcccccgaccctccagctcctgactctgcctattgttcctccagttcctcctcttcgtccctcagcgtcctgggtggcaaatgtggccaacctggggactctggccggacggccaatgggctgcctgggccccgaagccaagccctttccagctcctccgatgaaggcagcccctgccctggcatgggggggccactagatgcacctgggagccccctggcttgcactgaaccctcgaggacctgggcacggggtcggatggacacacagccagaccgtaaaccctcacgtatccccacgcctcggggcccccgccgcccctccggacccgcagagctggggacatggcatgccctgcactcagtcaccccgagggctgagccagattcctggatgtgatggaccagctcagctgtccccagaccccatcccttctccttttcctttgtggccttaacccttctgcatcagggagccccctctgcctcttgagtaccagacctcatgggaccagaccccttgggaccacatggcacaatgggacctctgttgtacattccggttgggggatgagcgttgctatttaattactaatattattgaatgccttagaggaggccgggcgagcccggtgttctgaagacctgtggcccagcagagcctctgacagtaaagttttgctccagc

SEQ ID NO: 299557 - DNA, 2726 bp, Homo sapiens
gctttcgtgtccactgggggccttagccgttgtcttcacttctctaggtcccagcccttcacaatgggcgcgcctccctgcctgagagggaggccccagccaagccccagtttccaccgcaaaaagccacacagcaaacacttaatggaccctaaatttataaaaattatcccatagagtcctatgaggcagggaatgttactgtacccatttcgcagatgaggaaacttggggcaccgacatttcccagagccaacatgtaaaccaggcatttggcctgagtgacagactggtgcaggtggccagcagcttaatttgtactgagcgcttactgggtccccacagcgatcctgaactgtgttcctgcccacagtgactcggccggtccgggcatggcagacccagtggcgggcatcgcgggctcggcggccaagagcgtgcggccatttcgctccagtgaggcctacgtggaggccatgaaggaggacctggccgagtggctcaatgccttgtacggcctgggtctcccgggtggtggcgatggcttcctgacagggctggccacgggcacgaccctgtgccaacatgccaacgccgtgaccgaggctgcccgtgcattggcagccgcccgcccggcccgaggtgtggccttccaggcgcacagtgtagtgcctggctccttcatggcgcgcgacaacgtggccaccttcatcggctggtgccgcgtggagctgggtgtgccggaggtgctcatgtttgagactgaggacctggtgctgcgcaagaacgagaagagcgtggtgctgtgcctgctggaggtggcgcggcgtggggcacgcctgggcctgctggccccacgcctcgtgcagtttgagcaggagattgagcgggagctgcgtgctgcacccccagcccccaacgcccctgccgctggggaggacaccactgaaaccgcccccgcaccagggactcctgcccgcggcccccgcatgacacccagcgacctgcgcaacctcgacgagctggtgagggagattctgggccgctgcacctgccctgaccagtttcccatgatcaaggtctcagaggggaagtaccgtgtgggggactcgagcctgctcatctttgtgcgggtgctgaggagccacgtgatggtgcgagtgggtggtggctgggacacgctggagcattacctggacaagcacgacccgtgccgctgctcctccactgctcatcgcccaccccagccgagggtctgcaccttttctccacagagggtgtcgcccaccaccagtccccgccctgctagcccagtccctgggagtgagcgccggggctcccggcctgagatgactcccgttagcttacgaagcacaaaggaggggcccgagaccccacccaggccccgggatcagctgcccccccatccccgctcccgccgctactccggggacagtgactcctcagcctcctccgcccagagcggcccccttggtacccgcagtgatgacacaggcactggcccccggagggagcgacccagccggcggctgaccacaggcaccccggcctctccgagacggcctcctgccctgcgcagccagtcccgagaccggctggatcgcggccggccccggggggccccaggaggcaggggagcccagctgtcggtccccagccctgcccggcgggcccggagccagagccgcgaggagcaggctgtgctgcttgtgcgcagggatcgagacgggcagcactcatgggtgccaaggggcaggggcagtgggggctcgggcaggagcaccccccagactccccgtgcccgcagccctgcagcaccccggctttcccgggtctccagccccagtccagagttgggcaccacaccggccagcatcttccgcacacccctgcagctcgacccgcagcaggagcagcagctgttccggcgcctggaagaggagttcctggccaatgcccgggcccttgaggctgttgctagcgtgacccccactggaccagcccctgacccagctcgggcccccgaccctccagctcctgactctgcctattgttcctccagttcctcctcttcgtccctcagcgtcctgggtggcaaatgtggccaacctggggactctggccggacggccaatgggctgcctgggccccgaagccaagccctttccagctcctccgatgaaggcagcccctgccctggcatgggggggccactagatgcacctgggagccccctggcttgcactgaaccctcgaggacctgggcacggggtcggatggacacacagccagaccgtaaaccctcacgtatccccacgcctcggggcccccgccgcccctccggacccgcagagctggggacatggcatgccctgcactcagtcaccccgagggctgagccagattcctggatgtgatggaccagctcagctgtccccagaccccatcccttctccttttcctttgtggccttaacccttctgcatcagggagccccctctgcctcttgagtaccagacctcatgggaccagaccccttgggaccacatggcacaatgggacctctgttgtacattccggttgggggatgagcgttgctatttaattactaatattattgaatgccttagaggaggccgggcgagcccggtgttctgaagacctgtggcccagcagagcctctgacagtaaagttttgctccagc

SEQ ID NO: 299558 - DNA, 2435 bp, Homo sapiens
tctaaggtaactaatcatatgttaactgtatcatgtctagactagcttgatatgtggctgctggagagtagtgataactgagtattatgtatgaccaatatattacacaggagctagtgagaatcgcgggctcggcggccaagagcgtgcggccatttcgctccagtgaggcctacgtggaggccatgaaggaggacctggccgagtggctcaatgccttgtacggcctgggtctcccgggtggtggcgatggcttcctgacagggctggccacgggcacgaccctgtgccaacatgccaacgccgtgaccgaggctgcccgtgcattggcagccgcccgcccggcccgaggtgtggccttccaggcgcacagtgtagtgcctggctccttcatggcgcgcgacaacgtggccaccttcatcggctggtgccgcgtggagctgggtgtgccggaggtgctcatgtttgagactgaggacctggtgctgcgcaagaacgagaagagcgtggtgctgtgcctgctggaggtggcgcggcgtggggcacgcctgggcctgctggccccacgcctcgtgcagtttgagcaggagattgagcgggagctgcgtgctgcacccccagcccccaacgcccctgccgctggggaggacaccactgaaaccgcccccgcaccagggactcctgcccgcggcccccgcatgacacccagcgacctgcgcaacctcgacgagctggtgagggagattctgggccgctgcacctgccctgaccagtttcccatgatcaaggtctcagaggggaagtaccgtgtgggggactcgagcctgctcatctttgtgcgggtgctgaggagccacgtgatggtgcgagtgggtggtggctgggacacgctggagcattacctggacaagcacgacccgtgccgctgctcctccactgctcatcgcccaccccagccgagggtctgcaccttttctccacagagggtgtcgcccaccaccagtccccgccctgctagcccagtccctgggagtgagcgccggggctcccggcctgagatgactcccgttagcttacgaagcacaaaggaggggcccgagaccccacccaggccccgggatcagctgcccccccatccccgctcccgccgctactccggggacagtgactcctcagcctcctccgcccagagcggcccccttggtacccgcagtgatgacacaggcactggcccccggagggagcgacccagccggcggctgaccacaggcaccccggcctctccgagacggcctcctgccctgcgcagccagtcccgagaccggctggatcgcggccggccccggggggccccaggaggcaggggagcccagctgtcggtccccagccctgcccggcgggcccggagccagagccgcgaggagcaggctgtgctgcttgtgcgcagggatcgagacgggcagcactcatgggtgccaaggggcaggggcagtgggggctcgggcaggagcaccccccagactccccgtgcccgcagccctgcagcaccccggctttcccgggtctccagccccagtccagagttgggcaccacaccggccagcatcttccgcacacccctgcagctcgacccgcagcaggagcagcagctgttccggcgcctggaagaggagttcctggccaatgcccgggcccttgaggctgttgctagcgtgacccccactggaccagcccctgacccagctcgggcccccgaccctccagctcctgactctgcctattgttcctccagttcctcctcttcgtccctcagcgtcctgggtggcaaatgtggccaacctggggactctggccggacggccaatgggctgcctgggccccgaagccaagccctttccagctcctccgatgaaggcagcccctgccctggcatgggggggccactagatgcacctgggagccccctggcttgcactgaaccctcgaggacctgggcacggggtcggatggacacacagccagaccgtaaaccctcacgtatccccacgcctcggggcccccgccgcccctccggacccgcagagctggggacatggcatgccctgcactcagtcaccccgagggctgagccagattcctggatgtgatggaccagctcagctgtccccagaccccatcccttctccttttcctttgtggccttaacccttctgcatcagggagccccctctgcctcttgagtaccagacctcatgggaccagaccccttgggaccacatggcacaatgggacctctgttgtacattccggttgggggatgagcgttgctatttaattactaatattattgaatgccttagaggaggccgggcgagcccggtgttctgaagacctgtggcccagcagagcctctgacagtaaagttttgctccagc

SEQ ID NO: 299559 - DNA, 2324 bp, Homo sapiens
aaagaaaggtcacgtgtggaagctgtaccccatccggggcaacactgcctccatccacttacccggaaagcctgacttcctcctgaccctggaatggctgacattaagccccaggaggaggacttgacctctgacccctaccctctctctctggcctcaggtgagggagattctgggccgctgcacctgccctgaccagtttcccatgatcaaggtctcagaggggaagtaccgtgtgggggactcgagcctgctcatctttgtgcgggtgctgaggagccacgtgatggtgcgagtgggtggtggctgggacacgctggagcattacctggacaagcacgacccgtgccgctgctcctccactgctcatcgcccaccccagccgagggtctgcaccttttctccacagagggtgtcgcccaccaccagtccccgccctgctagcccagtccctgggagtgagcgccggggctcccggcctgagatgactcccgttagcttacgaagcacaaaggaggggcccgagaccccacccaggtgagatgcaggaggacgaggagtgaggggtccagagggtgggggggcgtcagccctggcctgcatgatgggttgcctgtgcgccagagtgactcacaccctgggaaaagttcccgtgggtgggggcgggcctggcttcccatctccatggcaacccaaccaaaccaacaacacagctggggcgggccctgtggctgggcggcagccagtccagctcttgcttcctctggcccgtcctgggaaggggggtgtctagagcccaggaaacttcttcttccgtggcttttggggccctgggccgctggaggaagctgctcacttctccctggaagtccccaggacagaccgatgcccctgacagccccgtccaccagccacataccctgctgttcctctccctgcctgttctgcatgccagtccttccgtggtaccccatctgtctctattgtccccctgccccaggccccgggatcagctgcccccccatccccgctcccgccgctactccggggacagtgactcctcagcctcctccgcccagagcggcccccttggtacccgcagtgatgacacaggcactggcccccggagggagcgacccagccggcggctgaccacaggcaccccggcctctccgagacggcctcctgccctgcgcagccagtcccgagaccggctggatcgcggccggccccggggggccccaggaggcaggggagcccagctgtcggtccccagccctgcccggcgggcccggagccagagccgcgaggagcaggctgtgctgcttgtgcgcagggatcgagacgggcagcactcatgggtgccaaggggcaggggcagtgggggctcgggcaggagcaccccccagactccccgtgcccgcagccctgcagcaccccggctttcccgggtctccagccccagtccagagttgggcaccacaccggccagcatcttccgcacacccctgcagctcgacccgcagcaggagcagcagctgttccggcgcctggaagaggagttcctggccaatgcccgggcccttgaggctgttgctagcgtgacccccactggaccagcccctgacccagctcgggcccccgaccctccagctcctgactctgcctattgttcctccagttcctcctcttcgtccctcagcgtcctgggtggcaaatgtggccaacctggggactctggccggacggccaatgggctgcctgggccccgaagccaagccctttccagctcctccgatgaaggcagcccctgccctggcatgggggggccactagatgcacctgggagccccctggcttgcactgaaccctcgaggacctgggcacggggtcggatggacacacagccagaccgtaaaccctcacgtatccccacgcctcggggcccccgccgcccctccggacccgcagagctggggacatggcatgccctgcactcagtcaccccgagggctgagccagattcctggatgtgatggaccagctcagctgtccccagaccccatcccttctccttttcctttgtggccttaacccttctgcatcagggagccccctctgcctcttgagtaccagacctcatgggaccagaccccttgggaccacatggcacaatgggacctctgttgtacattccggttgggggatgagcgttgctatttaattactaatattattgaatgccttagaggaggccgggcgagcccggtgttctgaagacctgtggcccagcagagcctctgacagtaaagttttgctccagc

SEQ ID NO: 299560 - DNA, 1758 bp, Homo sapiens
cgcggcggtgccgtttatctggccaggggaggtccacccgggaggaggtgactttgcagcctccagccgctatcgcttcctgacttcatcttgggaacaggccgtgctgtgcgccagcccggggagcccaccgtctggggaggggggcgattaaaaggtcccaacctcctccccaggagaccaaagaggttggacggggccccgggtactaggctgggtgggggttgggcgcctgggccggtcgcagttgtctgggggccctggggctctctgcgtcgagagcgctcgaagacccgggattcctggcccgatcgcgggcggggggagaccccagctccaccccagctcccgccggctcggggaaggggcggcccctttaagagcgcgcggccccgcccgccccctccgggcaggatccgaattccagggaggcggggcggagacggcggcgaggaggaggccgcggcgcgggacgcatagagctgcggctcgggcggcgcctccctgcggcggcccggcccggctccggcccccgctggggcaatgctccccggggccgcgggatgagccagtgactcggccggtccgggcatggcagacccagtggcgggcatcgcgggctcggcggccaagagcgtgcggccatttcgctccagtgaggcctacgtggaggccatgaaggaggacctggccgagtggctcaatgccttgtacggcctgggtctcccgggtggtggcgatggcttcctgacagggctggccacgggcacgaccctgtgccaacatgccaacgccgtgaccgaggctgcccgtgcattggcagccgcccgcccggcccgaggtgtggccttccaggcgcacagtgtagtgcctggctccttcatggcgcgcgacaacgtggccaccttcatcggctggtgccgcgtggagctgggtgtgccggaggtgctcatgtttgagactgaggacctggtgctgcgcaagaacgagaagagcgtggtgctgtgcctgctggaggtggcgcggcgtggggcacgcctgggcctgctggccccacgcctcgtgcagtttgagcaggagattgagcgggagctgcgtgctgcacccccagcccccaacgcccctgccgctggggaggacaccactgaaaccgcccccgcaccagggactcctgcccgcggcccccgcatgacacccagcgacctgcgcaacctcgacgagctggtgagggagattctgggccgctgcacctgccctgaccagtttcccatgatcaaggtctcagaggggaagtaccgtgtgggggactcgagcctgctcatctttgtgcgggtgctgaggagccacgtgatggtgcgagtgggtggtggctgggacacgctggagcattacctggacaccgcagagctggggacatggcatgccctgcactcagtcaccccgagggctgagccagattcctggatgtgatggaccagctcagctgtccccagaccccatcccttctccttttcctttgtggccttaacccttctgcatcagggagccccctctgcctcttgagtaccagacctcatgggaccagaccccttgggaccacatggcacaatgggacctctgttgtacattccggttgggggatgagcgttgctatttaattactaatattattgaatgccttagaggaggccgggcgagcccggtgttctgaagacctgtggcccagcagagcctctgacagtaaagttttgctccagc

SEQ ID NO: 299561 - DNA, 574 bp, Homo sapiens
ctggcatcccgagaagccaggaagcagtgagcccaggagtcctcggccagccctgcctgcccaccaggaggatgaaggtctccgtggctgccctctcctgcctcatgcttgttactgcccttggatcccaggcccgggtcacaaaagatgcagagacagagttcatgatgtcaaagcttccattggaaaatccagtacttctggacagattccatgctactagtgctgactgctgcatctcctacaccccacgaagcatcccgtgttcactcctggagagttactttgaaacgaacagcgagtgctccaagccgggtgtcatcttcctcaccaagaaggggcgacgtttctgtgccaaccccagtgataagcaagttcaggtttgcatgagaatgctgaagctggacacacggatcaagaccaggaagaattgaacttgtcaaggtgaagggacacaagttgccagccaccaactttcttgcctcaactaccttcctgaattatttttttaagaagcatttattcttgtgttctggatttagagcaattcatctaataaacagtttctcacttt

SEQ ID NO: 299562 - DNA, 625 bp, Homo sapiens
ctggcatcccgagaagccaggaagcagtgagcccaggagtcctcggccagccctgcctgcccaccaggaggatgaaggtctccgtggctgccctctcctgcctcatgcttgttactgcccttggatcccaggcccgggtcacaaaagatgcagagacagagttcatgatgtcaaagcttccattggaaaatccagtacttctggacatgctctggaggagaaagattggtcctcagatgaccctttctcatgctgcaggattccatgctactagtgctgactgctgcatctcctacaccccacgaagcatcccgtgttcactcctggagagttactttgaaacgaacagcgagtgctccaagccgggtgtcatcttcctcaccaagaaggggcgacgtttctgtgccaaccccagtgataagcaagttcaggtttgcatgagaatgctgaagctggacacacggatcaagaccaggaagaattgaacttgtcaaggtgaagggacacaagttgccagccaccaactttcttgcctcaactaccttcctgaattatttttttaagaagcatttattcttgtgttctggatttagagcaattcatctaataaacagtttctcacttt

SEQ ID NO: 299563 - DNA, 674 bp, Homo sapiens
  misc_feature (541)..(541): n is a, c, g, or t
ctggcatcccgagaagccaggaagcagtgagcccaggagtcctcggccagccctgcctgcccaccaggaggatgaaggtctccgtggctgccctctcctgcctcatgcttgttactgcccttggatcccaggcccgggtcacaaaagatgcagagacagggggtcagggggggggaggtttccatttgaaaaatcaggacttttggacatgcttctggagggaaaaagatggggccctaaaaataccccttttttaatgcctgagggaatcccaagcctattaaggcctgacctggtgaatttcccaaccccccacaaaacatcccccgggttcccttccgtgaaaatttttttttaaaaaaaaaaagagagggctctcaaaccggggtggtatttttttcccaccaaaaaaaaggggaaaatttctttttggccccccccccccattaaaaaaaaactctacattttttctttaaaaaaatttgtgaggtggccccacccctttttaaaacccaaaataatatttcttcttttgtggggngagaggaacacatttggtcgcccacaccacaattttttttcacacaacccacctctctccaaatatttttataaaaaaaaaattttcattttgttcgcgggggtgggggggagttcttataaaaaaaactcct

SEQ ID NO: 299564 - DNA, 3290 bp, Homo sapiens
tgcatggtttatggtgctgctctaatattttctctttaaaactgtgtcatttttggagaatgaatttttcaaccttttcattgtggaggatttttcccacaaggtagtaatgggcagtggatcaaaatcctatcataaatgattgaattttcaatgtcatagtgtgtggaaatactactccctttcctccatgtctatcttcttagatgttctgtctttgtcatcatctgctccagcacatactttggactcctttacaggtgaccttcccccctccctcctcaataggtgtcctcagtgttttctaagcatttaaaactgaatttgacaagtggctaaaaacttagtctgagacttgtacttagtatatggttaattatagaaacaacaactattttaaacagttactctgttgactgctctttatgactacacttgtatgccaggaggcagcagcaccaccaggacgactctttacaagcaaccaacgaaccaattgcagtggttgcagttgtcacagtagtcttgcccaggctccagtctggctagagagcatccagcccattccttgcctcagtgccacctttttctgggcaagtagccaagaagtgactttatatgcagtgagtacttcagataaacttacagctacagctgccgaagagtggagaaggttgaccaccatttatttaattctctagtgtaaaaacaattgagagcagtgtgcgtgagcccacagacacctgtgtttctgggagctctggcagtggcggattcataggcacttgggctgcactttgaatgacacacttggctttattagattcactagtttttaaaaaattgttgttcgtttcttttcattaaaggtttaatcagacagatcagacagcataattttgtatttaatgacagaaacgttggtacatttcttcatgaatgagcttgcattctgaagcaagagcctacaaaaggcacttgttataaatgaaagttctggctctagaggccagtactctggagtttcagagcagccagtgattgttccagtcagtgatgcctagttatatagaggaggagtacactgtgcactcttctaggtgtaagggtatgcaactttggatcttaaaattctgtacacatacacactttatatatatgtatgtatgtatgaaaacatgaaattagtttgtcaaatatgtgtgtgtttagtattttagcttagtgcaactatttccacattatttattaaattgatctaagacactttcttgttgacaccttgaatattaatgttcaagggtgcaatgtgtattcctttagattgttaaagcttaattactatgatttgtagtaaattaacttttaaaatgtatttgagcccttctgtagtgtcgtagggctcttacagggtgggaaagattttaattttccagttgctaattgaacagtatggcctcattatatattttgatttataggagtttgtgtctgggtcccaggaacatctactggggatgactgttaggcagcttgtgatgatgttttttaaaaaacctaagtaacttggggagacagagcatttcaaacccatatagacacctatcatacctgtatatcccctaatacatggaacataaatttcatttcagctttatgcattaatgtattgaagaggcaggctttttttccagtaataatactgtacatctaaggttgctattcagtaaaactaatagaagagataattattgaataccttggaatatgtagtgagaagaggccaaatttttcatgtttgtgagcatgtctttcagatactcgctaatggagaaattcactttagacctctagaccccaaaaccaagttagcaagtgacaaaaagtaaattattaatagtctgtaaagtggatgctggtcttacaaagctcctattcacatgaaccctatggttaattagaaagaacttgctgtctccagaaaagggaatggaaataataactatgtatcttcttttcatgtaatttggtcacagaataaggtattcaagttaagtctaatccaagtcttagagatctttaagtatcctaaaatagcagcctaagtagtcatcatgtaaagaagttgactttcaggaatgtcagcattgacctctccttgccactgttactcagctaaacataacttgccattcttaaaaataaaaaagctcccacccagaaactctagtgatactcagttttgacctcttactgcttccatgtgggacttcttttcagcttttaaccattggaattttctacctgctatgttcctctctggaaaatatcaatttggaaatgctgcctttcaaatcaatgccatgatcatccatattgttgagtttgttgttggtgttccagaagtgtccccattttacaactttatgcacacacctggcaaatcattaacatgagcattcaacagtactgggatgggtggggtgggggtagggggctcaccaacagaactggccagttgacattgcctgaaaaggcaccacctttaagggccagttgtggggttggtaagcacagttatgaaaatttctatctagcctccgttttgaatggttttaagaaattttgtatatggaggatggaaatgcttatatatttattgaaaatccttttatttgaaattaaaattatttggtatataattgtttgatatttggggagggttttggaggggagataatgtcactgataaattaaaagcctgttgattttgcagaaaggtactgttagtgactgataaggatgcctttgttttgtacatgaaccaaatctttgttttacatttcttttatccaaaatatttaggcatctgacattttcaaccagaatttcaattatatactgtgatttttatttgttgcaatacattacaatttcagaggtactttggggctcaaaagctaggatttctaagtcagtatgtgcatttcacacgataaagctgttaatggtgagcaaagtattatatactaactagatttttccacatctgtatagtatattatatgtattttgtggtattgagagtatagaaagtttagagtgtcaaacatgcgtttaatgtgtatttttaaacaaatttatggcaattaaaatatttggagacaagggtatcacatttcaatttgtaaagatctttttaactctactgtgtcattaagatgctttgtacaatgccaaaccatagttggagaaactaagtttaataaatatcaaatagattttctgta

SEQ ID NO: 299565 - DNA, 3353 bp, Homo sapiens
tgcatggtttatggtgctgctctaatattttctctttaaaactgtgtcatttttggagaatgaatttttcaaccttttcattgtggaggatttttcccacaaggtagtaatgggcagtggatcaaaatcctatcataaatgattgaattttcaatgtcatagtgtgtggaaatactactccctttcctccatgtctatcttcttagatgttctgtctttgtcatcatctgctccagcacatactttggactcctttacaggtgaccttcccccctccctcctcaataggtgtcctcagtgttttctaagcatttaaaactgaatttgacaagtggctaaaaacttagtctgagacttgtacttagtatatggttaattatagaaacaacaactattttaaacagttactctgttgactgctctttatgactacacttgtatgccaggaggcagcagcaccaccaggacgactctttacaagcaaccaacgaaccaattgcagtggttgcagttgtcacagtagtcttgcctgggccagactgggctgggctgtgggaagcattccccttcaggggagtttccacagctcagcccaggctccagtctggctagagagcatccagcccattccttgcctcagtgccacctttttctgggcaagtagccaagaagtgactttatatgcagtgagtacttcagataaacttacagctacagctgccgaagagtggagaaggttgaccaccatttatttaattctctagtgtaaaaacaattgagagcagtgtgcgtgagcccacagacacctgtgtttctgggagctctggcagtggcggattcataggcacttgggctgcactttgaatgacacacttggctttattagattcactagtttttaaaaaattgttgttcgtttcttttcattaaaggtttaatcagacagatcagacagcataattttgtatttaatgacagaaacgttggtacatttcttcatgaatgagcttgcattctgaagcaagagcctacaaaaggcacttgttataaatgaaagttctggctctagaggccagtactctggagtttcagagcagccagtgattgttccagtcagtgatgcctagttatatagaggaggagtacactgtgcactcttctaggtgtaagggtatgcaactttggatcttaaaattctgtacacatacacactttatatatatgtatgtatgtatgaaaacatgaaattagtttgtcaaatatgtgtgtgtttagtattttagcttagtgcaactatttccacattatttattaaattgatctaagacactttcttgttgacaccttgaatattaatgttcaagggtgcaatgtgtattcctttagattgttaaagcttaattactatgatttgtagtaaattaacttttaaaatgtatttgagcccttctgtagtgtcgtagggctcttacagggtgggaaagattttaattttccagttgctaattgaacagtatggcctcattatatattttgatttataggagtttgtgtctgggtcccaggaacatctactggggatgactgttaggcagcttgtgatgatgttttttaaaaaacctaagtaacttggggagacagagcatttcaaacccatatagacacctatcatacctgtatatcccctaatacatggaacataaatttcatttcagctttatgcattaatgtattgaagaggcaggctttttttccagtaataatactgtacatctaaggttgctattcagtaaaactaatagaagagataattattgaataccttggaatatgtagtgagaagaggccaaatttttcatgtttgtgagcatgtctttcagatactcgctaatggagaaattcactttagacctctagaccccaaaaccaagttagcaagtgacaaaaagtaaattattaatagtctgtaaagtggatgctggtcttacaaagctcctattcacatgaaccctatggttaattagaaagaacttgctgtctccagaaaagggaatggaaataataactatgtatcttcttttcatgtaatttggtcacagaataaggtattcaagttaagtctaatccaagtcttagagatctttaagtatcctaaaatagcagcctaagtagtcatcatgtaaagaagttgactttcaggaatgtcagcattgacctctccttgccactgttactcagctaaacataacttgccattcttaaaaataaaaaagctcccacccagaaactctagtgatactcagttttgacctcttactgcttccatgtgggacttcttttcagcttttaaccattggaattttctacctgctatgttcctctctggaaaatatcaatttggaaatgctgcctttcaaatcaatgccatgatcatccatattgttgagtttgttgttggtgttccagaagtgtccccattttacaactttatgcacacacctggcaaatcattaacatgagcattcaacagtactgggatgggtggggtgggggtagggggctcaccaacagaactggccagttgacattgcctgaaaaggcaccacctttaagggccagttgtggggttggtaagcacagttatgaaaatttctatctagcctccgttttgaatggttttaagaaattttgtatatggaggatggaaatgcttatatatttattgaaaatccttttatttgaaattaaaattatttggtatataattgtttgatatttggggagggttttggaggggagataatgtcactgataaattaaaagcctgttgattttgcagaaaggtactgttagtgactgataaggatgcctttgttttgtacatgaaccaaatctttgttttacatttcttttatccaaaatatttaggcatctgacattttcaaccagaatttcaattatatactgtgatttttatttgttgcaatacattacaatttcagaggtactttggggctcaaaagctaggatttctaagtcagtatgtgcatttcacacgataaagctgttaatggtgagcaaagtattatatactaactagatttttccacatctgtatagtatattatatgtattttgtggtattgagagtatagaaagtttagagtgtcaaacatgcgtttaatgtgtatttttaaacaaatttatggcaattaaaatatttggagacaagggtatcacatttcaatttgtaaagatctttttaactctactgtgtcattaagatgctttgtacaatgccaaaccatagttggagaaactaagtttaataaatatcaaatagattttctgta

SEQ ID NO: 299566 - DNA, 3382 bp, Homo sapiens
gggtgaggcttcaacacaggaattttggggggacacatcagcattcactccatcacaggtggttagccctttaatccacgggaattttgtttggggttgtgtgagatacgggtctaatattttctctttaaaactgtgtcatttttggagaatgaatttttcaaccttttcattgtggaggatttttcccacaaggtagtaatgggcagtggatcaaaatcctatcataaatgattgaattttcaatgtcatagtgtgtggaaatactactccctttcctccatgtctatcttcttagatgttctgtctttgtcatcatctgctccagcacatactttggactcctttacaggtgaccttcccccctccctcctcaataggtgtcctcagtgttttctaagcatttaaaactgaatttgacaagtggctaaaaacttagtctgagacttgtacttagtatatggttaattatagaaacaacaactattttaaacagttactctgttgactgctctttatgactacacttgtatgccaggaggcagcagcaccaccaggacgactctttacaagcaaccaacgaaccaattgcagtggttgcagttgtcacagtagtcttgcccaggctccagtctggctagagagcatccagcccattccttgcctcagtgccacctttttctgggcaagtagccaagaagtgactttatatgcagtgagtacttcagataaacttacagctacagctgccgaagagtggagaaggttgaccaccatttatttaattctctagtgtaaaaacaattgagagcagtgtgcgtgagcccacagacacctgtgtttctgggagctctggcagtggcggattcataggcacttgggctgcactttgaatgacacacttggctttattagattcactagtttttaaaaaattgttgttcgtttcttttcattaaaggtttaatcagacagatcagacagcataattttgtatttaatgacagaaacgttggtacatttcttcatgaatgagcttgcattctgaagcaagagcctacaaaaggcacttgttataaatgaaagttctggctctagaggccagtactctggagtttcagagcagccagtgattgttccagtcagtgatgcctagttatatagaggaggagtacactgtgcactcttctaggtgtaagggtatgcaactttggatcttaaaattctgtacacatacacactttatatatatgtatgtatgtatgaaaacatgaaattagtttgtcaaatatgtgtgtgtttagtattttagcttagtgcaactatttccacattatttattaaattgatctaagacactttcttgttgacaccttgaatattaatgttcaagggtgcaatgtgtattcctttagattgttaaagcttaattactatgatttgtagtaaattaacttttaaaatgtatttgagcccttctgtagtgtcgtagggctcttacagggtgggaaagattttaattttccagttgctaattgaacagtatggcctcattatatattttgatttataggagtttgtgtctgggtcccaggaacatctactggggatgactgttaggcagcttgtgatgatgttttttaaaaaacctaagtaacttggggagacagagcatttcaaacccatatagacacctatcatacctgtatatcccctaatacatggaacataaatttcatttcagctttatgcattaatgtattgaagaggcaggctttttttccagtaataatactgtacatctaaggttgctattcagtaaaactaatagaagagataattattgaataccttggaatatgtagtgagaagaggccaaatttttcatgtttgtgagcatgtctttcagatactcgctaatggagaaattcactttagacctctagaccccaaaaccaagttagcaagtgacaaaaagtaaattattaatagtctgtaaagtggatgctggtcttacaaagctcctattcacatgaaccctatggttaattagaaagaacttgctgtctccagaaaagggaatggaaataataactatgtatcttcttttcatgtaatttggtcacagaataaggtattcaagttaagtctaatccaagtcttagagatctttaagtatcctaaaatagcagcctaagtagtcatcatgtaaagaagttgactttcaggaatgtcagcattgacctctccttgccactgttactcagctaaacataacttgccattcttaaaaataaaaaagctcccacccagaaactctagtgatactcagttttgacctcttactgcttccatgtgggacttcttttcagcttttaaccattggaattttctacctgctatgttcctctctggaaaatatcaatttggaaatgctgcctttcaaatcaatgccatgatcatccatattgttgagtttgttgttggtgttccagaagtgtccccattttacaactttatgcacacacctggcaaatcattaacatgagcattcaacagtactgggatgggtggggtgggggtagggggctcaccaacagaactggccagttgacattgcctgaaaaggcaccacctttaagggccagttgtggggttggtaagcacagttatgaaaatttctatctagcctccgttttgaatggttttaagaaattttgtatatggaggatggaaatgcttatatatttattgaaaatccttttatttgaaattaaaattatttggtatataattgtttgatatttggggagggttttggaggggagataatgtcactgataaattaaaagcctgttgattttgcagaaaggtactgttagtgactgataaggatgcctttgttttgtacatgaaccaaatctttgttttacatttcttttatccaaaatatttaggcatctgacattttcaaccagaatttcaattatatactgtgatttttatttgttgcaatacattacaatttcagaggtactttggggctcaaaagctaggatttctaagtcagtatgtgcatttcacacgataaagctgttaatggtgagcaaagtattatatactaactagatttttccacatctgtatagtatattatatgtattttgtggtattgagagtatagaaagtttagagtgtcaaacatgcgtttaatgtgtatttttaaacaaatttatggcaattaaaatatttggagacaagggtatcacatttcaatttgtaaagatctttttaactctactgtgtcattaagatgctttgtacaatgccaaaccatagttggagaaactaagtttaataaatatcaaatagattttctgta

SEQ ID NO: 299567 - DNA, 3347 bp, Homo sapiens
tgcatggtttatggtgctgctctaatattttctctttaaaactgtgtcatttttggagaatgaatttttcaaccttttcattgtggaggatttttcccacaaggtagtaatgggcagtggatcaaaatcctatcataaatgattgaattttcaatgtcatagtgtgtggaaatactactccctttcctccatgtctatcttcttagatgttctgtctttgtcatcatctgctccagcacatactttggactcctttacaggtgaccttcccccctccctcctcaataggtgtcctcagtgttttctaagcatttaaaactgaatttgacaagtggctaaaaacttagtctgagacttgtacttagtatatggttaattatagaaacaacaactattttaaacagttactctgttgactgctctttatgactacacttgtatgccaggaggcagcagcaccaccaggacgactctttacaagcaaccaacgaaccaattgcagtggttgcagttgtcacagtagtcttgcccaggctccagtctggctagagagcatccagcccattccttgcctcagtgccacctttttctgggcaagtagccaagaagtgactttatatgcagtgagtacttcagataaacttacagctacagctgccgaagagtggagaaggttgaccaccatttatttaattctctagtgtaaaaacaattgagagcagtgtgcgtgagcccacagacacctgtgtttctgggagctctggcagtggcggattcataggcacttgggctgcactttgaatgacacacttggctttattagattcactagtttttaaaaaattgttgttcgtttcttttcattaaaggtttaatcagacagatcagacagcataattttgtatttaatgacagaaacgttggtacatttcttcatgaatgagcttgcattctgaagcaagagcctacaaaaggcacttgttataaatgaaagttctggctctagaggccagtactctggagtttcagagcagccagtgattgttccagtcagtgatgcctagttatatagaggaggagtacactgtgcactcttctaggtgtaagggtatgcaactttggatcttaaaattctgtacacatacacactttatatatatgtatgtatgtatgaaaacatgaaattagtttgtcaaatatgtgtgtgtttagtattttagcttagtgcaactatttccacattatttattaaattgatctaagacactttcttgttgacaccttgaatattaatgttcaagggtgcaatgtgtattcctttagattgttaaagcttaattactatgatttgtagtaaattaacttttaaaatgtatttgagcccttctgtagtgtcgtagggctcttacagggtgggaaagattttaattttccagttgctaattgaacagtatggcctcattatatattttgatttataggagtttgtgtctgggtcccaggaacatctactggggatgactgttaggcagcttgtgatgatgttttttaaaaaacctaagtaacttggggagacagagcatttcaaacccatatagacacctatcatacctgtatatcccctaatacatggaacataaatttcatttcagctttatgcattaatgtattgaagaggcaggctttttttccagtaataatactgtacatctaaggttgctattcagtaaaactaatagaagagataattattgaataccttggaatatgtagtgagaagaggccaaatttttcatgtttgtgagcatgtctttcagatactcgctaatggagaaattcactttagacctctagaccccaaaaccaagttagcaagtgacaaaaagtaaattattaatagtctgtaaagtggatgctggtcttacaaagctcctattcacatgaaccctatggttaattagaaagaacttgctgtctccagaaaagggaatggaaataataactatgtatcttcttttcatgtaatttggtcacagaataaggtattcaagttaagtctaatccaagtcttagagatctttaagtatcctaaaatagcagcctaagtagtcatcatgtaaagaagttgactttcaggaatgtcagcattgacctctccttgccactgttactcagctaaacataacttgccattcttaaaaataaaaaagctcccacccagaaactctagtgatactcagttttgacctcttactgcttccatgtgggacttcttttcagcttttaaccattggaattttctacctgctatgttcctctctggaaaatatcaatttggaaatgctgcctttcaaatcaatgccatgatcatccatattgttgagtttgttgttggtgttccagaagtgtccccattttacaactttatgcacacacctggcaaatcattaacatgagcattcaacagtactgggatgggtggggtgggggtagggggctcaccaacagaactggccagttgacattgcctgaaaaggcaccacctttaagggccagttgtggggttggtaagcacagttatgaaaatttctatctagcctccgttttgaatggttttaagaaattttgtatatggaggatggaaatgcttatatatttattgaaaatccttttatttgaaattaaaattatttggtatataattgtttgatatttggggagggttttggaggggagataatgtcactgataaattaaaagcctgttgattttgcagaaaggtactgttagtgactgataaggatgcctttgttttgtacatgaaccaaatctttgttttacatttcttttatccaaaatatttaggcatctgacattttcaaccagaatttcaattatatactgtgatttttatttgttgcaatacattacaatttcagaggtactttggggctcaaaagctaggatttctaagtcagtatgtgcatttcacacgataaagctgttaatggtgagcaaagtattatatactaactagatttttccacatctgtatagtatattatatgtattttgtggtattgagagtatagaaagtttagagtgtcaaacatgcgtttaatgtgtatttttaaacaaatttatggcaattaaaatatttggagacaagggtatcacatttcaatttgtaaagatctttttaactctactgtgtcattaagatgctttgtacaatgccaaaccatagttggagaaactaagtttaataaatatcaaatagattttctgtattaaagttactgaacactgtactctttatatttcttcaactctgagcccttttcatg

SEQ ID NO: 299568 - DNA, 4553 bp, Homo sapiens
ggaagcgaattcgctcacgttttaggacaaggaagagagagaggcacgggagaagagcccagcaagatttggattgaaaccgagacaccctccggaggctcggagcagaggaaggaggaggagggcggcgaacggaagccagtttgcaattcaagttttgatagcgctggtagaagggggtttaaatcagatttttttttttttaaaggagagagactttttccgctctctcgctccctgttaaagccgggtctagcacagctgcagacgccaccagcgagaaagagggagaggaagacagatagggggcgggggaagaagaaaaagaaaggtaaaaagtcttctaggagaacctttcacatttgcaacaaaagacctaggggctggagagagattcctgggacgcagggctggagtgtctatttcgagctcagcggcagggctcgggcgcgagtcgagaccctgctcgctcctctcgcttctgaaaccgacgttcaggagcggctttttaaaaacgcaaggcacaaggacggtcacccgcgcgactatgtttgctgatttttcgccttgccctctttaaaagcggcctcccattctccaaaagacacttcccctcctccctttgaagtgcattagttgtgatttctgcctccttttcttttttctttcttttttgttttgctttttccccccttttgaattatgtgctgctgttaaaacaacaacaaaaaaacaacaaaacacagcagctgcggacttgtccccggctggagcccagcgccccgcctggagtggatgagcctctccatgagagatccggtcattcctgggacaagcatggcctaccatccgttcctacctcaccgggcgccggacttcgccatgagcgcggtgctgggtcaccagccgccgttcttccccgcgctgacgctgcctcccaacggcgcggcggcgctctcgctgccgggcgccctggccaagccgatcatggatcaattggtgggggcggccgagaccggcatcccgttctcctccctggggccccaggcgcatctgaggcctttgaagaccatggagcccgaagaagaggtggaggacgaccccaaggtgcacctggaggctaaagaactttgggatcagtttcacaagcggggcaccgagatggtcattaccaagtcgggaaggcgaatgtttcctccatttaaagtgagatgttctgggctggataaaaaagccaaatacattttattgatggacattatagctgctgatgactgtcgttataaatttcacaattctcggtggatggtggctggtaaggccgaccccgaaatgccaaagaggatgtacattcacccggacagccccgctactggggaacagtggatgtccaaagtcgtcactttccacaaactgaaactcaccaacaacatttcagacaaacatggatttactatattgaactccatgcacaaataccagccccggttccacattgtaagagccaatgacatcttgaaactcccttatagtacatttcggacatacttgttccccgaaactgaattcatcgctgtgactgcataccagaatgataagataacccagttaaaaatagacaacaacccttttgcaaaaggtttccgggacactggaaatggccgaagagaaaaaagaaaacagctcaccctgcagtccatgagggtgtttgatgaaagacacaaaaaggagaatgggacctctgatgagtcctccagtgaacaagcagctttcaactgcttcgcccaggcttcttctccagccgcctccactgtagggacatcgaacctcaaagatttatgtcccagcgagggtgagagcgacgccgaggccgagagcaaagaggagcatggccccgaggcctgcgacgcggccaagatctccaccaccacgtcggaggagccctgccgtgacaagggcagccccgcggtcaaggctcaccttttcgctgctgagcggccccgggacagcgggcggctggacaaagcgtcgcccgactcacgccatagccccgccaccatctcgtccagcactcgcggcctgggcgcggaggagcgcaggagcccggttcgcgagggcacagcgccggccaaggtggaagaggcgcgcgcgctcccgggcaaggaggccttcgcgccgctcacggtgcagacggacgcggccgccgcgcacctggcccagggccccctgcctggcctcggcttcgccccgggcctggcgggccaacagttcttcaacgggcacccgctcttcctgcaccccagccagtttgccatggggggcgccttctccagcatggcggccgctggcatgggtcccctcctggccacggtttctggggcctccaccggtgtctcgggcctggattccacggccatggcctctgccgctgcggcgcagggactgtccggggcgtccgcggccaccctgcccttccacctccagcagcacgtcctggcctctcagggcctggccatgtcccctttcggaagcctgttcccttacccctacacgtacatggccgcagcggcggccgcctcctctgcggcagcctccagctcggtgcaccgccaccccttcctcaatctgaacaccatgcgcccgcggctgcgctacagcccctactccatcccggtgccggtcccggacggcagcagtctgctcaccaccgccctgccctccatggcggcggccgcggggcccctggacggcaaagtcgccgccctggccgccagcccggcctcggtggcagtggactcgggctctgaactcaacagccgctcctccacgctctcctccagctccatgtccttgtcgcccaaactctgcgcggagaaagaggcggccaccagcgaactgcagagcatccagcggttggttagcggcttggaagccaagccggacaggtcccgcagcgcgtccccgtagacccgtcccagacacgtcttttcattccagtccagttcaggctgccgtgcactttgtcggatataaaataaaccacgggcccgccatggcgttagcccttccttttgcagttgcgtctgggaaggggccccggactccctcgagagaatgtgctagagacagcccctgtcttcttggcgtggtttatatgtccgggatctggatcagattctgggggctcagaaacgtcggttgcattgagctactgggggtaggagttccaacatttatgtccagagcaacttccagcaaggctggtctgggtctctgcccaccaggcggggaggtgttcaaagacatctccctcagtgcggatttatatatatatttttccttcactgtgtcaagtggaaacaaaaacaaaatctttcaaaaaaaaaatcgggacaagtgaacacattaacatgattctgtttgtgcagattaaaaactttatagggacttgcattatcggttctcaataaattactgagcagctttgtttggggagggaagtccctaccatccttgtttagtctatattaagaaaatctgtgtctttttaatattcttgtgatgttttcagagccgctgtaggtctcttcttgcatgtccacagtaatgtatttgtggtttttattttgaacgcttgcttttagagagaaaacaatatagccccctacccttttcccaatcctttgccctcaaatcagtgacccaagggagggggggatttaaagggaaggagtgggcaaaacacataaaatgaatttattatatctaagctctgtagcaggattcatgtcgttctttgacagttctttctctttcctgtatatgcaataacaaggttttaaaaaaataataaagaagtgagactattagacaaagtatttatgtaattatttgataactcttgtaaataggtggaatatgaatgcttggaaaattaaactttaatttattgacattgtacatagctctgtgtaaatagaattgcaactgtcaggttttgtgttcttgttttcctttagttgggtttatttccaggtcacagaattgctgttaacactagaaaacacacttcctgcaccaacaccaataccctttcaaaagagttgtctgcaacatttttgttttcttttttaatgtccaaaagtgggggaaagtgctatttcctattttcaccaaaattggggaaggagtgccactttccagctccacttcaaattccttaaaatataactgagattgctgtggggagggaggagggcagaggctgcggtttgactttttaatttttcttttgttatttgtatttgctagtctctgatttcctcaaaacgaagtggaatttactactgttgtcagtatcggtgttttgaattggtgcctgcctatagagatatattcacagttcaaaagtcaggtgctgagagatggtttaaagacaaattcatgaaggtatattttgtgttatagttgttgatgagttctttggttttctgtatttttccccctctctttaaaacatcactgaaatttcaataaatttttattgaaatgtc

SEQ ID NO: 299569 - DNA, 4253 bp, Homo sapiens
taaggctagtagaggctggggttgaatcggccgaggaagtcttctaggagaacctttcacatttgcaacaaaagacctaggggctggagagagattcctgggacgcagggctggagtgtctatttcgagctcagcggcagggctcgggcgcgagtcgagaccctgctcgctcctctcgcttctgaaaccgacgttcaggagcggctttttaaaaacgcaaggcacaaggacggtcacccgcgcgactatgtttgctgatttttcgccttgccctctttaaaagcggcctcccattctccaaaagacacttcccctcctccctttgaagtgcattagttgtgatttctgcctccttttcttttttctttcttttttgttttgctttttccccccttttgaattatgtgctgctgttaaaacaacaacaaaaaaacaacaaaacacagcagctgcggacttgtccccggctggagcccagcgccccgcctggagtggatgagcctctccatgagagatccggtcattcctgggacaagcatggcctaccatccgttcctacctcaccgggcgccggacttcgccatgagcgcggtgctgggtcaccagccgccgttcttccccgcgctgacgctgcctcccaacggcgcggcggcgctctcgctgccgggcgccctggccaagccgatcatggatcaattggtgggggcggccgagaccggcatcccgttctcctccctggggccccaggcgcatctgaggcctttgaagaccatggagcccgaagaagaggtggaggacgaccccaaggtgcacctggaggctaaagaactttgggatcagtttcacaagcggggcaccgagatggtcattaccaagtcgggaaggcgaatgtttcctccatttaaagtgagatgttctgggctggataaaaaagccaaatacattttattgatggacattatagctgctgatgactgtcgttataaatttcacaattctcggtggatggtggctggtaaggccgaccccgaaatgccaaagaggatgtacattcacccggacagccccgctactggggaacagtggatgtccaaagtcgtcactttccacaaactgaaactcaccaacaacatttcagacaaacatggatttactatattgaactccatgcacaaataccagccccggttccacattgtaagagccaatgacatcttgaaactcccttatagtacatttcggacatacttgttccccgaaactgaattcatcgctgtgactgcataccagaatgataagataacccagttaaaaatagacaacaacccttttgcaaaaggtttccgggacactggaaatggccgaagagaaaaaagaaaacagctcaccctgcagtccatgagggtgtttgatgaaagacacaaaaaggagaatgggacctctgatgagtcctccagtgaacaagcagctttcaactgcttcgcccaggcttcttctccagccgcctccactgtagggacatcgaacctcaaagatttatgtcccagcgagggtgagagcgacgccgaggccgagagcaaagaggagcatggccccgaggcctgcgacgcggccaagatctccaccaccacgtcggaggagccctgccgtgacaagggcagccccgcggtcaaggctcaccttttcgctgctgagcggccccgggacagcgggcggctggacaaagcgtcgcccgactcacgccatagccccgccaccatctcgtccagcactcgcggcctgggcgcggaggagcgcaggagcccggttcgcgagggcacagcgccggccaaggtggaagaggcgcgcgcgctcccgggcaaggaggccttcgcgccgctcacggtgcagacggacgcggccgccgcgcacctggcccagggccccctgcctggcctcggcttcgccccgggcctggcgggccaacagttcttcaacgggcacccgctcttcctgcaccccagccagtttgccatggggggcgccttctccagcatggcggccgctggcatgggtcccctcctggccacggtttctggggcctccaccggtgtctcgggcctggattccacggccatggcctctgccgctgcggcgcagggactgtccggggcgtccgcggccaccctgcccttccacctccagcagcacgtcctggcctctcagggcctggccatgtcccctttcggaagcctgttcccttacccctacacgtacatggccgcagcggcggccgcctcctctgcggcagcctccagctcggtgcaccgccaccccttcctcaatctgaacaccatgcgcccgcggctgcgctacagcccctactccatcccggtgccggtcccggacggcagcagtctgctcaccaccgccctgccctccatggcggcggccgcggggcccctggacggcaaagtcgccgccctggccgccagcccggcctcggtggcagtggactcgggctctgaactcaacagccgctcctccacgctctcctccagctccatgtccttgtcgcccaaactctgcgcggagaaagaggcggccaccagcgaactgcagagcatccagcggttggttagcggcttggaagccaagccggacaggtcccgcagcgcgtccccgtagacccgtcccagacacgtcttttcattccagtccagttcaggctgccgtgcactttgtcggatataaaataaaccacgggcccgccatggcgttagcccttccttttgcagttgcgtctgggaaggggccccggactccctcgagagaatgtgctagagacagcccctgtcttcttggcgtggtttatatgtccgggatctggatcagattctgggggctcagaaacgtcggttgcattgagctactgggggtaggagttccaacatttatgtccagagcaacttccagcaaggctggtctgggtctctgcccaccaggcggggaggtgttcaaagacatctccctcagtgcggatttatatatatatttttccttcactgtgtcaagtggaaacaaaaacaaaatctttcaaaaaaaaaatcgggacaagtgaacacattaacatgattctgtttgtgcagattaaaaactttatagggacttgcattatcggttctcaataaattactgagcagctttgtttggggagggaagtccctaccatccttgtttagtctatattaagaaaatctgtgtctttttaatattcttgtgatgttttcagagccgctgtaggtctcttcttgcatgtccacagtaatgtatttgtggtttttattttgaacgcttgcttttagagagaaaacaatatagccccctacccttttcccaatcctttgccctcaaatcagtgacccaagggagggggggatttaaagggaaggagtgggcaaaacacataaaatgaatttattatatctaagctctgtagcaggattcatgtcgttctttgacagttctttctctttcctgtatatgcaataacaaggttttaaaaaaataataaagaagtgagactattagacaaagtatttatgtaattatttgataactcttgtaaataggtggaatatgaatgcttggaaaattaaactttaatttattgacattgtacatagctctgtgtaaatagaattgcaactgtcaggttttgtgttcttgttttcctttagttgggtttatttccaggtcacagaattgctgttaacactagaaaacacacttcctgcaccaacaccaataccctttcaaaagagttgtctgcaacatttttgttttcttttttaatgtccaaaagtgggggaaagtgctatttcctattttcaccaaaattggggaaggagtgccactttccagctccacttcaaattccttaaaatataactgagattgctgtggggagggaggagggcagaggctgcggtttgactttttaatttttcttttgttatttgtatttgctagtctctgatttcctcaaaacgaagtggaatttactactgttgtcagtatcggtgttttgaattggtgcctgcctatagagatatattcacagttcaaaagtcaggtgctgagagatggtttaaagacaaattcatgaaggtatattttgtgttatagttgttgatgagttctttggttttctgtatttttccccctctctttaaaacatcactgaaatttcaataaatttttattgaaatgtc

SEQ ID NO: 299570 - DNA, 4651 bp, Homo sapiens
  misc_feature (4567)..(4567): n is a, c, g, or t
  misc_feature (4570)..(4570): n is a, c, g, or t
ggaagcgaattcgctcacgttttaggacaaggaagagagagaggcacgggagaagagcccagcaagatttggattgaaaccgagacaccctccggaggctcggagcagaggaaggaggaggagggcggcgaacggaagccagtttgcaattcaagttttgatagcgctggtagaagggggtttaaatcagatttttttttttttaaaggagagagactttttccgctctctcgctccctgttaaagccgggtctagcacagctgcagacgccaccagcgagaaagagggagaggaagacagatagggggcgggggaagaagaaaaagaaaggtaaaaagtcttctaggagaacctttcacatttgcaacaaaagacctaggggctggagagagattcctgggacgcagggctggagtgtctatttcgagctcagcggcagggctcgggcgcgagtcgagaccctgctcgctcctctcgcttctgaaaccgacgttcaggagcggctttttaaaaacgcaaggcacaaggacggtcacccgcgcgactatgtttgctgatttttcgccttgccctctttaaaagcggcctcccattctccaaaagacacttcccctcctccctttgaagtgcattagttgtgatttctgcctccttttcttttttctttcttttttgttttgctttttccccccttttgaattatgtgctgctgttaaaacaacaacaaaaaaacaacaaaacacagcagctgcggacttgtccccggctggagcccagcgccccgcctggagtggatgagcctctccatgagagatccggtcattcctgggacaagcatggcctaccatccgttcctacctcaccgggcgccggacttcgccatgagcgcggtgctgggtcaccagccgccgttcttccccgcgctgacgctgcctcccaacggcgcggcggcgctctcgctgccgggcgccctggccaagccgatcatggatcaattggtgggggcggccgagaccggcatcccgttctcctccctggggccccaggcgcatctgaggcctttgaagaccatggagcccgaagaagaggtggaggacgaccccaaggtgcacctggaggctaaagaactttgggatcagtttcacaagcggggcaccgagatggtcattaccaagtcgggaaggcgaatgtttcctccatttaaagtgagatgttctgggctggataaaaaagccaaatacattttattgatggacattatagctgctgatgactgtcgttataaatttcacaattctcggtggatggtggctggtaaggccgaccccgaaatgccaaagaggatgtacattcacccggacagccccgctactggggaacagtggatgtccaaagtcgtcactttccacaaactgaaactcaccaacaacatttcagacaaacatggatttactatattgaactccatgcacaaataccagccccggttccacattgtaagagccaatgacatcttgaaactcccttatagtacatttcggacatacttgttccccgaaactgaattcatcgctgtgactgcataccagaatgataagataacccagttaaaaatagacaacaacccttttgcaaaaggtttccgggacactggaaatggccgaagagaaaaaagaaaacagctcaccctgcagtccatgagggtgtttgatgaaagacacaaaaaggagaatgggacctctgatgagtcctccagtgaacaagcagctttcaactgcttcgcccaggcttcttctccagccgcctccactgtagggacatcgaacctcaaagatttatgtcccagcgagggtgagagcgacgccgaggccgagagcaaagaggagcatggccccgaggcctgcgacgcggccaagatctccaccaccacgtcggaggagccctgccgtgacaagggcagccccgcggtcaaggctcaccttttcgctgctgagcggccccgggacagcgggcggctggacaaagcgtcgcccgactcacgccatagccccgccaccatctcgtccagcactcgcggcctgggcgcggaggagcgcaggagcccggttcgcgagggcacagcgccggccaaggtggaagaggcgcgcgcgctcccgggcaaggaggccttcgcgccgctcacggtgcagacggacgcggccgccgcgcacctggcccagggccccctgcctggcctcggcttcgccccgggcctggcgggccaacagttcttcaacgggcacccgctcttcctgcaccccagccagtttgccatggggggcgccttctccagcatggcggccgctggcatgggtcccctcctggccacggtttctggggcctccaccggtgtctcgggcctggattccacggccatggcctctgccgctgcggcgcagggactgtccggggcgtccgcggccaccctgcccttccacctccagcagcacgtcctggcctctcagggcctggccatgtcccctttcggaagcctgttcccttacccctacacgtacatggccgcagcggcggccgcctcctctgcggcagcctccagctcggtgcaccgccaccccttcctcaatctgaacaccatgcgcccgcggctgcgctacagcccctactccatcccggtgccggtcccggacggcagcagtctgctcaccaccgccctgccctccatggcggcggccgcggggcccctggacggcaaagtcgccgccctggccgccagcccggcctcggtggcagtggactcgggctctgaactcaacagccgctcctccacgctctcctccagctccatgtccttgtcgcccaaactctgcgcggagaaagaggcggccaccagcgaactgcagagcatccagcggttggttagcggcttggaagccaagccggacaggtcccgcagcgcgtccccgtagacccgtcccagacacgtcttttcattccagtccagttcaggctgccgtgcactttgtcggatataaaataaaccacgggcccgccatggcgttagcccttccttttgcagttgcgtctgggaaggggccccggactccctcgagagaatgtgctagagacagcccctgtcttcttggcgtggtttatatgtccgggatctggatcagattctgggggctcagaaacgtcggttgcattgagctactgggggtaggagttccaacatttatgtccagagcaacttccagcaaggctggtctgggtctctgcccaccaggcggggaggtgttcaaagacatctccctcagtgcggatttatatatatatttttccttcactgtgtcaagtggaaacaaaaacaaaatctttcaaaaaaaaaatcgggacaagtgaacacattaacatgattctgtttgtgcagattaaaaactttatagggacttgcattatcggttctcaataaattactgagcagctttgtttggggagggaagtccctaccatccttgtttagtctatattaagaaaatctgtgtctttttaatattcttgtgatgttttcagagccgctgtaggtctcttcttgcatgtccacagtaatgtatttgtggtttttattttgaacgcttgcttttagagagaaaacaatatagccccctacccttttcccaatcctttgccctcaaatcagtgacccaagggagggggggatttaaagggaaggagtgggcaaaacacataaaatgaatttattatatctaagctctgtagcaggattcatgtcgttctttgacagttctttctctttcctgtatatgcaataacaaggttttaaaaaaataataaagaagtgagactattagacaaagtatttatgtaattatttgataactcttgtaaataggtggaatatgaatgcttggaaaattaaactttaatttattgacattgtacatagctctgtgtaaatagaattgcaactgtcaggttttgtgttcttgttttcctttagttgggtttatttccaggtcacagaattgctgttaacactagaaaacacacttcctgcaccaacaccaataccctttcaaaagagttgtctgcaacatttttgttttcttttttaatgtccaaaagtgggggaaagtgctatttcctattttcaccaaaattggggaaggagtgccactttccagctccacttcaaattccttaaaatataactgagattgctgtggggagggaggagggcagaggctgcggtttgactttttaatttttcttttgttatttgtatttgctagtctctgatttcctcaaaacgaagtggaatttactactgttgtcagtatcggtgttttgaattggtgcctgcctatagagatatattcacagttcaaaagtcaggtgctgagagatggtttaaagacaaattcatgaaggtatattttgtgttatagttgttgatgagttctttggttttctgtatttttccccctctctttaaaacatcactgaaatttcaataaatttttattgaaatgtcaaaaaaaaaaaaanaanaaaaactttgggggggcccgttcccattatcctttggtgggcggttccaattactggtcggctttaccaccctggacctgg

SEQ ID NO: 299571 - DNA, 4596 bp, Homo sapiens
  misc_feature (4512)..(4512): n is a, c, g, or t
  misc_feature (4515)..(4515): n is a, c, g, or t
ggaagcgaattcgctcacgttttaggacaaggaagagagagaggcacgggagaagagcccagcaagatttggattgaaaccgagacaccctccggaggctcggagcagaggaaggaggaggagggcggcgaacggaagccagtttgcaattcaagttttgatagcgctggtagaagggggtttaaatcagatttttttttttttaaaggagagagactttttccgctctctcgctccctgttaaagccgggtctagcacagctgcagacgccaccagcgagaaagagggagaggaagacagatagggggcgggggaagaagaaaaagaaaggtaaaaagtcttctaggagaacctttcacatttgcaacaaaagacctaggggctggagagagattcctgggacgcagggctggagtgtctatttcgagctcagcggcagggctcgggcgcgagtcgagaccctgctcgctcctctcgcttctgaaaccgacgttcaggagcggctttttaaaaacgcaaggcacaaggacggtcacccgcgcgactatgtttgctgatttttcgccttgccctctttaaaagcggcctcccattctccaaaagacacttcccctcctccctttgaagtgcattagttgtgatttctgcctccttttcttttttctttcttttttgttttgctttttccccccttttgaattatgtgctgctgttaaaacaacaacaaaaaaacaacaaaacacagcagctgcggacttgtccccggctggagcccagcgccccgcctggagtggatgagcctctccatgagagatccggtcattcctgggacaagcatggcctaccatccgttcctacctcaccgggcgccggacttcgccatgagcgcggtgctgggtcaccagccgccgttcttccccgcgctgacgctgcctcccaacggcgcggcggcgctctcgctgccgggcgccctggccaagccgatcatggatcaattggtgggggcggccgagaccggcatcccgttctcctccctggggccccaggcgcatctgaggcctttgaagaccatggagcccgaagaagaggtggaggacgaccccaaggtgcacctggaggctaaagaactttgggatcagtttcacaagcggggcaccgagatggtcattaccaagtcgggaaggcgaatgtttcctccatttaaagtgagatgttctgggctggataaaaaagccaaatacattttattgatggacattatagctgctgatgactgtcgttataaatttcacaattctcggtggatggtggctggtaaggccgaccccgaaatgccaaagaggatgtacattcacccggacagccccgctactggggaacagtggatgtccaaagtcgtcactttccacaaactgaaactcaccaacaacatttcagacaaacatggatttactatattgaactccatgcacaaataccagccccggttccacattgtaagagccaatgacatcttgaaactcccttatagtacatttcggacatacttgttccccgaaactgaattcatcgctgtgactgcataccagaatgataagataacccagttaaaaatagacaacaacccttttgcaaaaggtttccgggacactggaaatggccgaagagaaaaaagaaaacagctcaccctgcagtccatgagggtgtttgatgaaagacacaaaaaggagaatgggacctctgatgagtcctccagtgaacaagcagctttcaactgcttcgcccaggcttcttctccagccgcctccactgtagggacatcgaacctcaaagatttatgtcccagcgagggtgagagcgacgccgaggccgagagcaaagaggagcatggccccgaggcctgcgacgcggccaagatctccaccaccacgtcggaggagccctgccgtgacaagggcagccccgcggtcaaggctcaccttttcgctgctgagcggccccgggacagcgggcggctggacaaagcgtcgcccgactcacgccatagccccgccaccatctcgtccagcactcgcggcctgggcgcggaggagcgcaggagcccggttcgcgagggcacagcgccggccaaggtggaagaggcgcgcgcgctcccgggcaaggaggccttcgcgccgctcacggtgcagacggacgcggccgccgcgcacctggcccagggccccctgcctggcctcggcttcgccccgggcctggcgggccaacagttcttcaacgggcacccgctcttcctgcaccccagccagtttgccatggggggcgccttctccagcatggcggccgctggcatgggtcccctcctggccacggtttctggggcctccaccggtgtctcgggcctggattccacggccatggcctctgccgctgcggcgcagggactgtccggggcgtccgcggccaccctgcccttccacctccagcagcacgtcctggcctctcagggcctggccatgtcccctttcggaagcctgttcccttacccctacacgtacatggccgcagcggcggccgcctcctctgcggcagcctccagctcggtgcaccgccaccccttcctcaatctgaacaccatgcgcccgcggctgcgctacagcccctactccatcccggtgccggtcccggacggcagcagtctgctcaccaccgccctgccctccatggcggcggccgcggggcccctggacggcaaagtcgccgccctggccgccagcccggcctcggtggcagtggactcgggctctgaactcaacagccgctcctccacgctctcctccagctccatgtccttgtcgcccaaactctgcgcggagaaagaggcggccaccagcgaactgcagagcatccagcggttggttagcggcttggaagccaagccggacaggtcccgcagcgcgtccccgtagacccgtcccagacacgtcttttcattccagtccagttcaggctgccgtgcactttgtcggatataaaataaaccacgggcccgccatggcgttagcccttccttttgcagttgcgtctgggaaggggccccggactccctcgagagaatgtgctagagacagcccctgtcttcttggcgtggtttatatgtccgggatctggatcagattctgggggctcagaaacgtcggttgcattgagctactgggggtaggagttccaacatttatgtccagagcaacttccagcaaggctggtctgggtctctgcccaccaggcggggaggtgttcaaagacatctccctcagtgcggatttatatatatatttttccttcactgtgtcaagtggaaacaaaaacaaaatctttcaaaaaaaaaatcgggacaagtgaacacattaacatgattctgtttgtgcagattaaaaactttatagggacttgcattatcggttctcaataaattactgagcagctttgtttggggagggaagtccctaccatccttgtttagtctatattaagaaaatctgtgtctttttaatattcttgtgatgttttcagagccgctgtaggtctcttcttgcatgtccacagtaatgtatttgtggtttttattttgaacgcttgcttttagagagaaaacaatatagccccctacccttttcccaatcctttgccctcaaatcagtgacccaagggagggggggatttaaagggaaggagtgggcaaaacacataaaatgaatttattatatctaagctctgtagcaggattcatgtcgttctttgacagttctttctctttcctgtatatgcaataacaaggttttaaaaaaataataaagaagtgagactattagacaaagtatttatgtaattatttgataactcttgtaaataggtggaatatgaataattgcaactgtcaggttttgtgttcttgttttcctttagttgggtttatttccaggtcacagaattgctgttaacactagaaaacacacttcctgcaccaacaccaataccctttcaaaagagttgtctgcaacatttttgttttcttttttaatgtccaaaagtgggggaaagtgctatttcctattttcaccaaaattggggaaggagtgccactttccagctccacttcaaattccttaaaatataactgagattgctgtggggagggaggagggcagaggctgcggtttgactttttaatttttcttttgttatttgtatttgctagtctctgatttcctcaaaacgaagtggaatttactactgttgtcagtatcggtgttttgaattggtgcctgcctatagagatatattcacagttcaaaagtcaggtgctgagagatggtttaaagacaaattcatgaaggtatattttgtgttatagttgttgatgagttctttggttttctgtatttttccccctctctttaaaacatcactgaaatttcaataaatttttattgaaatgtcaaaaaaaaaaaaanaanaaaaactttgggggggcccgttcccattatcctttggtgggcggttccaattactggtcggctttaccaccctggacctgg

SEQ ID NO: 299572 - DNA, 4596 bp, Homo sapiens
  misc_feature (4512)..(4512): n is a, c, g, or t
  misc_feature (4515)..(4515): n is a, c, g, or t
ggaagcgaattcgctcacgttttaggacaaggaagagagagaggcacgggagaagagcccagcaagatttggattgaaaccgagacaccctccggaggctcggagcagaggaaggaggaggagggcggcgaacggaagccagtttgcaattcaagttttgatagcgctggtagaagggggtttaaatcagatttttttttttttaaaggagagagactttttccgctctctcgctccctgttaaagccgggtctagcacagctgcagacgccaccagcgagaaagagggagaggaagacagatagggggcgggggaagaagaaaaagaaaggtaaaaagtcttctaggagaacctttcacatttgcaacaaaagacctaggggctggagagagattcctgggacgcagggctggagtgtctatttcgagctcagcggcagggctcgggcgcgagtcgagaccctgctcgctcctctcgcttctgaaaccgacgttcaggagcggctttttaaaaacgcaaggcacaaggacggtcacccgcgcgactatgtttgctgatttttcgccttgccctctttaaaagcggcctcccattctccaaaagacacttcccctcctccctttgaagtgcattagttgtgatttctgcctccttttcttttttctttcttttttgttttgctttttccccccttttgaattatgtgctgctgttaaaacaacaacaaaaaaacaacaaaacacagcagctgcggacttgtccccggctggagcccagcgccccgcctggagtggatgagcctctccatgagagatccggtcattcctgggacaagcatggcctaccatccgttcctacctcaccgggcgccggacttcgccatgagcgcggtgctgggtcaccagccgccgttcttccccgcgctgacgctgcctcccaacggcgcggcggcgctctcgctgccgggcgccctggccaagccgatcatggatcaattggtgggggcggccgagaccggcatcccgttctcctccctggggccccaggcgcatctgaggcctttgaagaccatggagcccgaagaagaggtggaggacgaccccaaggtgcacctggaggctaaagaactttgggatcagtttcacaagcggggcaccgagatggtcattaccaagtcgggaaggcgaatgtttcctccatttaaagtgagatgttctgggctggataaaaaagccaaatacattttattgatggacattatagctgctgatgactgtcgttataaatttcacaattctcggtggatggtggctggtaaggccgaccccgaaatgccaaagaggatgtacattcacccggacagccccgctactggggaacagtggatgtccaaagtcgtcactttccacaaactgaaactcaccaacaacatttcagacaaacatggatttactatattgaactccatgcacaaataccagccccggttccacattgtaagagccaatgacatcttgaaactcccttatagtacatttcggacatacttgttccccgaaactgaattcatcgctgtgactgcataccagaatgataagataacccagttaaaaatagacaacaacccttttgcaaaaggtttccgggacactggaaatggccgaagagaaaaaagaaaacagctcaccctgcagtccatgagggtgtttgatgaaagacacaaaaaggagaatgggacctctgatgagtcctccagtgaacaagcagctttcaactgcttcgcccaggcttcttctccagccgcctccactgtagggacatcgaacctcaaagatttatgtcccagcgagggtgagagcgacgccgaggccgagagcaaagaggagcatggccccgaggcctgcgacgcggccaagatctccaccaccacgtcggaggagccctgccgtgacaagggcagccccgcggtcaaggctcaccttttcgctgctgagcggccccgggacagcgggcggctggacaaagcgtcgcccgactcacgccatagccccgccaccatctcgtccagcactcgcggcctgggcgcggaggagcgcaggagcccggttcgcgagggcacagcgccggccaaggtggaagaggcgcgcgcgctcccgggcaaggaggccttcgcgccgctcacggtgcagacggacgcggccgccgcgcacctggcccagggccccctgcctggcctcggcttcgccccgggcctggcgggccaacagttcttcaacgggcacccgctcttcctgcaccccagccagtttgccatggggggcgccttctccagcatggcggccgctggcatgggtcccctcctggccacggtttctggggcctccaccggtgtctcgggcctggattccacggccatggcctctgccgctgcggcgcagggactgtccggggcgtccgcggccaccctgcccttccacctccagcagcacgtcctggcctctcagggcctggccatgtcccctttcggaagcctgttcccttacccctacacgtacatggccgcagcggcggccgcctcctctgcggcagcctccagctcggtgcaccgccaccccttcctcaatctgaacaccatgcgcccgcggctgcgctacagcccctactccatcccggtgccggtcccggacggcagcagtctgctcaccaccgccctgccctccatggcggcggccgcggggcccctggacggcaaagtcgccgccctggccgccagcccggcctcggtggcagtggactcgggctctgaactcaacagccgctcctccacgctctcctccagctccatgtccttgtcgcccaaactctgcgcggagaaagaggcggccaccagcgaactgcagagcatccagcggttggttagcggcttggaagccaagccggacaggtcccgcagcgcgtccccgtagacccgtcccagacacgtcttttcattccagtccagttcaggctgccgtgcactttgtcggatataaaataaaccacgggcccgccatggcgttagcccttccttttgcagttgcgtctgggaaggggccccggactccctcgagagaatgtgctagagacagcccctgtcttcttggcgtggtttatatgtccgggatctggatcagattctgggggctcagaaacgtcggttgcattgagctactgggggtaggagttccaacatttatgtccagagcaacttccagcaaggctggtctgggtctctgcccaccaggcggggaggtgttcaaagacatctccctcagtgcggatttatatatatatttttccttcactgtgtcaagtggaaacaaaaacaaaatctttcaaaaaaaaaatcgggacaagtgaacacattaacatgattctgtttgtgcagattatttggggagggaagtccctaccatccttgtttagtctatattaagaaaatctgtgtctttttaatattcttgtgatgttttcagagccgctgtaggtctcttcttgcatgtccacagtaatgtatttgtggtttttattttgaacgcttgcttttagagagaaaacaatatagccccctacccttttcccaatcctttgccctcaaatcagtgacccaagggagggggggatttaaagggaaggagtgggcaaaacacataaaatgaatttattatatctaagctctgtagcaggattcatgtcgttctttgacagttctttctctttcctgtatatgcaataacaaggttttaaaaaaataataaagaagtgagactattagacaaagtatttatgtaattatttgataactcttgtaaataggtggaatatgaatgcttggaaaattaaactttaatttattgacattgtacatagctctgtgtaaatagaattgcaactgtcaggttttgtgttcttgttttcctttagttgggtttatttccaggtcacagaattgctgttaacactagaaaacacacttcctgcaccaacaccaataccctttcaaaagagttgtctgcaacatttttgttttcttttttaatgtccaaaagtgggggaaagtgctatttcctattttcaccaaaattggggaaggagtgccactttccagctccacttcaaattccttaaaatataactgagattgctgtggggagggaggagggcagaggctgcggtttgactttttaatttttcttttgttatttgtatttgctagtctctgatttcctcaaaacgaagtggaatttactactgttgtcagtatcggtgttttgaattggtgcctgcctatagagatatattcacagttcaaaagtcaggtgctgagagatggtttaaagacaaattcatgaaggtatattttgtgttatagttgttgatgagttctttggttttctgtatttttccccctctctttaaaacatcactgaaatttcaataaatttttattgaaatgtcaaaaaaaaaaaaanaanaaaaactttgggggggcccgttcccattatcctttggtgggcggttccaattactggtcggctttaccaccctggacctgg

SEQ ID NO: 299573 - DNA, 4269 bp, Homo sapiens
  misc_feature (4185)..(4185): n is a, c, g, or t
  misc_feature (4188)..(4188): n is a, c, g, or t
ggaagcgaattcgctcacgttttaggacaaggaagagagagaggcacgggagaagagcccagcaagatttggattgaaaccgagacaccctccggaggctcggagcagaggaaggaggaggagggcggcgaacggaagccagtttgcaattcaagttttgatagcgctggtagaagggggtttaaatcagatttttttttttttaaaggagagagactttttccgctctctcgctccctgttaaagccgggtctagcacagctgcagacgccaccagcgagaaagagggagaggaagacagatagggggcgggggaagaagaaaaagaaaggtaaaaagtcttctaggagaacctttcacatttgcaacaaaagacctaggggctggagagagattcctgggacgcagggctggagtgtctatttcgagctcagcggcagggctcgggcgcgagtcgagaccctgctcgctcctctcgcttctgaaaccgacgttcaggagcggctttttaaaaacgcaaggcacaaggacggtcacccgcgcgactatgtttgctgatttttcgccttgccctctttaaaagcggcctcccattctccaaaagacacttcccctcctccctttgaagtgcattagttgtgatttctgcctccttttcttttttctttcttttttgttttgctttttccccccttttgaattatgtgctgctgttaaaacaacaacaaaaaaacaacaaaacacagcagctgcggacttgtccccggctggagcccagcgccccgcctggagtggatgagcctctccatgagagatccggtcattcctgggacaagcatggcctaccatccgttcctacctcaccgggcgccggacttcgccatgagcgcggtgctgggtcaccagccgccgttcttccccgcgctgacgctgcctcccaacggcgcggcggcgctctcgctgccgggcgccctggccaagccgatcatggatcaattggtgggggcggccgagaccggcatcccgttctcctccctggggccccaggcgcatctgaggcctttgaagaccatggagcccgaagaagaggtggaggacgaccccaaggtgcacctggaggctaaagaactttgggatcagtttcacaagcggggcaccgagatggtcattaccaagtcgggaaggcgaatgtttcctccatttaaagtgagatgttctgggctggataaaaaagccaaatacattttattgatggacattatagctgctgatgactgtcgttataaatttcacaattctcggtggatggtggctggtaaggccgaccccgaaatgccaaagaggatgtacattcacccggacagccccgctactggggaacagtggatgtccaaagtcgtcactttccacaaactgaaactcaccaacaacatttcagacaaacatggatttactttggccttcccaagtgatcacgctacgtggcaggggaattatagttttggtactcagactatattgaactccatgcacaaataccagccccggttccacattgtaagagccaatgacatcttgaaactcccttatagtacatttcggacatacttgttccccgaaactgaattcatcgctgtgactgcataccagaatgataagataacccagttaaaaatagacaacaacccttttgcaaaaggtttccgggacactggaaatggccgaagagaaaaaagaaaacagctcaccctgcagtccatgagggtgtttgatgaaagacacaaaaaggagaatgggacctctgatgagtcctccagtgaacaagcagctttcaactgcttcgcccaggcttcttctccagccgcctccactgtagggacatcgaacctcaaagatttatgtcccagcgagggtgagagcgacgccgaggccgagagcaaagaggagcatggccccgaggcctgcgacgcggccaagatctccaccaccacgtcggaggagccctgccgtgacaagggcagccccgcggtcaaggctcaccttttcgctgctgagcggccccgggacagcgggcggctggacaaagcgtcgcccgactcacgccatagccccgccaccatctcgtccagcactcgcggcctgggcgcggaggagcgcaggagcccggttcgcgagggcacagcgccggccaaggtggaagaggcgcgcgcgctcccgggcaaggaggccttcgcgccgctcacggtgcagacggacgcgcctccagctcggtgcaccgccaccccttcctcaatctgaacaccatgcgcccgcggctgcgctacagcccctactccatcccggtgccggtcccggacggcagcagtctgctcaccaccgccctggccgccagcccggcctcggtggcagtggactcgggctctgaactcaacagccgctcctccacgctctcctccagctccatgtccttgtcgcccaaactctgcgcggagaaagaggcggccaccagcgaactgcagagcatccagcggttggttagcggcttggaagccaagccggacaggtcccgcagcgcgtccccgtagacccgtcccagacacgtcttttcattccagtccagttcaggctgccgtgcactttgtcggatataaaataaaccacgggcccgccatggcgttagcccttccttttgcagttgcgtctgggaaggggccccggactccctcgagagaatgtgctagagacagcccctgtcttcttggcgtggtttatatgtccgggatctggatcagattctgggggctcagaaacgtcggttgcattgagctactgggggtaggagttccaacatttatgtccagagcaacttccagcaaggctggtctgggtctctgcccaccaggcggggaggtgttcaaagacatctccctcagtgcggatttatatatatatttttccttcactgtgtcaagtggaaacaaaaacaaaatctttcaaaaaaaaaatcgggacaagtgaacacattaacatgattctgtttgtgcagattaaaaactttatagggacttgcattatcggttctcaataaattactgagcagctttgtttggggagggaagtccctaccatccttgtttagtctatattaagaaaatctgtgtctttttaatattcttgtgatgttttcagagccgctgtaggtctcttcttgcatgtccacagtaatgtatttgtggtttttattttgaacgcttgcttttagagagaaaacaatatagccccctacccttttcccaatcctttgccctcaaatcagtgacccaagggagggggggatttaaagggaaggagtgggcaaaacacataaaatgaatttattatatctaagctctgtagcaggattcatgtcgttctttgacagttctttctctttcctgtatatgcaataacaaggttttaaaaaaataataaagaagtgagactattagacaaagtatttatgtaattatttgataactcttgtaaataggtggaatatgaatgcttggaaaattaaactttaatttattgacattgtacatagctctgtgtaaatagaattgcaactgtcaggttttgtgttcttgttttcctttagttgggtttatttccaggtcacagaattgctgttaacactagaaaacacacttcctgcaccaacaccaataccctttcaaaagagttgtctgcaacatttttgttttcttttttaatgtccaaaagtgggggaaagtgctatttcctattttcaccaaaattggggaaggagtgccactttccagctccacttcaaattccttaaaatataactgagattgctgtggggagggaggagggcagaggctgcggtttgactttttaatttttcttttgttatttgtatttgctagtctctgatttcctcaaaacgaagtggaatttactactgttgtcagtatcggtgttttgaattggtgcctgcctatagagatatattcacagttcaaaagtcaggtgctgagagatggtttaaagacaaattcatgaaggtatattttgtgttatagttgttgatgagttctttggttttctgtatttttccccctctctttaaaacatcactgaaatttcaataaatttttattgaaatgtcaaaaaaaaaaaaanaanaaaaactttgggggggcccgttcccattatcctttggtgggcggttccaattactggtcggctttaccaccctggacctgg

SEQ ID NO: 299574 - DNA, 4874 bp, Homo sapiens
ggaagcgaattcgctcacgttttaggacaaggaagagagagaggcacgggagaagagcccagcaagatttggattgaaaccgagacaccctccggaggctcggagcagaggaaggaggaggagggcggcgaacggaagccagtttgcaattcaagttttgatagcgctggtagaagggggtttaaatcagatttttttttttttaaaggagagagactttttccgctctctcgctccctgttaaagccgggtctagcacagctgcagacgccaccagcgagaaagagggagaggaagacagatagggggcgggggaagaagaaaaagaaaggtaaaaagtcttctaggagaacctttcacatttgcaacaaaagacctaggggctggagagagattcctgggacgcagggctggagtgtctatttcgagctcagcggcagggctcgggcgcgagtcgagaccctgctcgctcctctcgcttctgaaaccgacgttcaggagcggctttttaaaaacgcaaggcacaaggacggtcacccgcgcgactatgtttgctgatttttcgccttgccctctttaaaagcggcctcccattctccaaaagacacttcccctcctccctttgaagtgcattagttgtgatttctgcctccttttcttttttctttcttttttgttttgctttttccccccttttgaattatgtgctgctgttaaaacaacaacaaaaaaacaacaaaacacagcagctgcggacttgtccccggctggagcccagcgccccgcctggagtggatgagcctctccatgagagatccggtcattcctgggacaagcatggcctaccatccgttcctacctcaccgggcgccggacttcgccatgagcgcggtgctgggtcaccagccgccgttcttccccgcgctgacgctgcctcccaacggcgcggcggcgctctcgctgccgggcgccctggccaagccgatcatggatcaattggtgggggcggccgagaccggcatcccgttctcctccctggggccccaggcgcatctgaggcctttgaagaccatggagcccgaagaagaggtggaggacgaccccaaggtgcacctggaggctaaagaactttgggatcagtttcacaagcggggcaccgagatggtcattaccaagtcgggaaggcgaatgtttcctccatttaaagtgagatgttctgggctggataaaaaagccaaatacattttattgatggacattatagctgctgatgactgtcgttataaatttcacaattctcggtggatggtggctggtaaggccgaccccgaaatgccaaagaggatgtacattcacccggacagccccgctactggggaacagtggatgtccaaagtcgtcactttccacaaactgaaactcaccaacaacatttcagacaaacatggatttactttggccttcccaagtgatcacgctacgtggcaggggaattatagttttggtactcaggtaggctagggttcaaggtatgaatgatccttagatggtgagggtggggggggccctttggcaactgaggagcaatttggattctccagaagataacatctgtggagcgaaacgtacccagggggtactccaaggaggtgggctcggtacaagcgtggtaccctgcggtggggaagatttcagcctggcaggggtcctaagatcccgtttgttctgctaaatccttgttttatgtatgtctcctcttccctgcccctgcagactatattgaactccatgcacaaataccagccccggttccacattgtaagagccaatgacatcttgaaactcccttatagtacatttcggacatacttgttccccgaaactgaattcatcgctgtgactgcataccagaatgataagataacccagttaaaaatagacaacaacccttttgcaaaaggtttccgggacactggaaatggccgaagagaaaaaagaaaacagctcaccctgcagtccatgagggtgtttgatgaaagacacaaaaaggagaatgggacctctgatgagtcctccagtgaacaagcagctttcaactgcttcgcccaggcttcttctccagccgcctccactgtagggacatcgaacctcaaagatttatgtcccagcgagggtgagagcgacgccgaggccgagagcaaagaggagcatggccccgaggcctgcgacgcggccaagatctccaccaccacgtcggaggagccctgccgtgacaagggcagccccgcggtcaaggctcaccttttcgctgctgagcggccccgggacagcgggcggctggacaaagcgtcgcccgactcacgccatagccccgccaccatctcgtccagcactcgcggcctgggcgcggaggagcgcaggagcccggttcgcgagggcacagcgccggccaaggtggaagaggcgcgcgcgctcccgggcaaggaggccttcgcgccgctcacggtgcagacggacgcggccgccgcgcacctggcccagggccccctgcctggcctcggcttcgccccgggcctggcgggccaacagttcttcaacgggcacccgctcttcctgcaccccagccagtttgccatggggggcgccttctccagcatggcggccgctggcatgggtcccctcctggccacggtttctggggcctccaccggtgtctcgggcctggattccacggccatggcctctgccgctgcggcgcagggactgtccggggcgtccgcggccaccctgcccttccacctccagcagcacgtcctggcctctcagggcctggccatgtcccctttcggaagcctgttcccttacccctacacgtacatggccgcagcggcggccgcctcctctgcggcagcctccagctcggtgcaccgccaccccttcctcaatctgaacaccatgcgcccgcggctgcgctacagcccctactccatcccggtgccggtcccggacggcagcagtctgctcaccaccgccctgccctccatggcggcggccgcggggcccctggacggcaaagtcgccgccctggccgccagcccggcctcggtggcagtggactcgggctctgaactcaacagccgctcctccacgctctcctccagctccatgtccttgtcgcccaaactctgcgcggagaaagaggcggccaccagcgaactgcagagcatccagcggttggttagcggcttggaagccaagccggacaggtcccgcagcgcgtccccgtagacccgtcccagacacgtcttttcattccagtccagttcaggctgccgtgcactttgtcggatataaaataaaccacgggcccgccatggcgttagcccttccttttgcagttgcgtctgggaaggggccccggactccctcgagagaatgtgctagagacagcccctgtcttcttggcgtggtttatatgtccgggatctggatcagattctgggggctcagaaacgtcggttgcattgagctactgggggtaggagttccaacatttatgtccagagcaacttccagcaaggctggtctgggtctctgcccaccaggcggggaggtgttcaaagacatctccctcagtgcggatttatatatatatttttccttcactgtgtcaagtggaaacaaaaacaaaatctttcaaaaaaaaaatcgggacaagtgaacacattaacatgattctgtttgtgcagattaaaaactttatagggacttgcattatcggttctcaataaattactgagcagctttgtttggggagggaagtccctaccatccttgtttagtctatattaagaaaatctgtgtctttttaatattcttgtgatgttttcagagccgctgtaggtctcttcttgcatgtccacagtaatgtatttgtggtttttattttgaacgcttgcttttagagagaaaacaatatagccccctacccttttcccaatcctttgccctcaaatcagtgacccaagggagggggggatttaaagggaaggagtgggcaaaacacataaaatgaatttattatatctaagctctgtagcaggattcatgtcgttctttgacagttctttctctttcctgtatatgcaataacaaggttttaaaaaaataataaagaagtgagactattagacaaagtatttatgtaattatttgataactcttgtaaataggtggaatatgaatgcttggaaaattaaactttaatttattgacattgtacatagctctgtgtaaatagaattgcaactgtcaggttttgtgttcttgttttcctttagttgggtttatttccaggtcacagaattgctgttaacactagaaaacacacttcctgcaccaacaccaataccctttcaaaagagttgtctgcaacatttttgttttcttttttaatgtccaaaagtgggggaaagtgctatttcctattttcaccaaaattggggaaggagtgccactttccagctccacttcaaattccttaaaatataactgagattgctgtggggagggaggagggcagaggctgcggtttgactttttaatttttcttttgttatttgtatttgctagtctctgatttcctcaaaacgaagtggaatttactactgttgtcagtatcggtgttttgaattggtgcctgcctatagagatatattcacagttcaaaagtcaggtgctgagagatggtttaaagacaaattcatgaaggtatattttgtgttatagttgttgatgagttctttggttttctgtatttttccccctctctttaaaacatcactgaaatttcaataaatttttattgaaatgtc

SEQ ID NO: 299575 - DNA, 4600 bp, Homo sapiens
  misc_feature (4516)..(4516): n is a, c, g, or t
  misc_feature (4519)..(4519): n is a, c, g, or t
ggaagcgaattcgctcacgttttaggacaaggaagagagagaggcacgggagaagagcccagcaagatttggattgaaaccgagacaccctccggaggctcggagcagaggaaggaggaggagggcggcgaacggaagccagtttgcaattcaagttttgatagcgctggtagaagggggtttaaatcagatttttttttttttaaaggagagagactttttccgctctctcgctccctgttaaagccgggtctagcacagctgcagacgccaccagcgagaaagagggagaggaagacagatagggggcgggggaagaagaaaaagaaaggtaaaaagtcttctaggagaacctttcacatttgcaacaaaagacctaggggctggagagagattcctgggacgcagggctggagtgtctatttcgagctcagcggcagggctcgggcgcgagtcgagaccctgctcgctcctctcgcttctgaaaccgacgttcaggagcggctttttaaaaacgcaaggcacaaggacggtcacccgcgcgactatgtttgctgatttttcgccttgccctctttaaaagcggcctcccattctccaaaagacacttcccctcctccctttgaagtgcattagttgtgatttctgcctccttttcttttttctttcttttttgttttgctttttccccccttttgaattatgtgctgctgttaaaacaacaacaaaaaaacaacaaaacacagcagctgcggacttgtccccggctggagcccagcgccccgcctggagtggatgagcctctccatgagagatccggtcattcctgggacaagcatggcctaccatccgttcctacctcaccgggcgccggacttcgccatgagcgcggtgctgggtcaccagccgccgttcttccccgcgctgacgctgcctcccaacggcgcggcggcgctctcgctgccgggcgccctggccaagccgatcatggatcaattggtgggggcggccgagaccggcatcccgttctcctccctggggccccaggcgcatctgaggcctttgaagaccatggagcccgaagaagaggtggaggacgaccccaaggtgcacctggaggctaaagaactttgggatcagtttcacaagcggggcaccgagatggtcattaccaagtcgggaaggcgaatgtttcctccatttaaagtgagatgttctgggctggataaaaaagccaaatacattttattgatggacattatagctgctgatgactgtcgttataaatttcacaattctcggtggatggtggctggtaaggccgaccccgaaatgccaaagaggatgtacattcacccggacagccccgctactggggaacagtggatgtccaaagtcgtcactttccacaaactgaaactcaccaacaacatttcagacaaacatggatttactatattgaactccatgcacaaataccagccccggttccacattgtaagagccaatgacatcttgaaactcccttatagtacatttcggacatacttgttccccgaaactgaattcatcgctgtgactgcataccagaatgataagataacccagttaaaaatagacaacaacccttttgcaaaaggtttccgggacactggaaatggccgaagagaaaaaagaaaacagctcaccctgcagtccatgagggtgtttgatgaaagacacaaaaaggagaatgggacctctgatgagtcctccagtgaacaagcagctttcaactgcttcgcccaggcttcttctccagccgcctccactgtagggacatcgaacctcaaagatttatgtcccagcgagggtgagagcgacgccgaggccgagagcaaagaggagcatggccccgaggcctgcgacgcggccaagatctccaccaccacgtcggaggagccctgccgtgacaagggcagccccgcggtcaaggctcaccttttcgctgctgagcggccccgggacagcgggcggctggacaaagcgtcgcccgactcacgccatagccccgccaccatctcgtccagcactcgcggcctgggcgcggaggagcgcaggagcccggttcgcgagggcacagcgccggccaaggtggaagaggcgcgcgcgctcccgggcaaggaggccttcgcgccgctcacggtgcagacggacgcggccgccgcgcacctggcccagggccccctgcctggcctcggcttcgccccgggcctggcgggccaacagttcttcaacgggcacccgctcttcctgcaccccagccagtttgccatggggggcgccttctccagcatggcggccgctggcatgggtcccctcctggccacggtttctggggcctccaccggtgtctcgggcctggattccacggccatggcctctgccgctgcggcgcagggactgtccggggcgtccgcggccaccctgcccttccacctccagcagcacgtcctggcctctcagggcctggccatgtcccctttcggaagcctgttcccttacccctacacgtacatggccgcagcggcggccgcctcctctgcggcagcctccagctcggtgcaccgccaccccttcctcaatctgaacaccatgcgcccgcggctgcgctacagcccctactccatcccggtgccggtcccggacggcagcagtctgctcaccaccgccctggccgccagcccggcctcggtggcagtggactcgggctctgaactcaacagccgctcctccacgctctcctccagctccatgtccttgtcgcccaaactctgcgcggagaaagaggcggccaccagcgaactgcagagcatccagcggttggttagcggcttggaagccaagccggacaggtcccgcagcgcgtccccgtagacccgtcccagacacgtcttttcattccagtccagttcaggctgccgtgcactttgtcggatataaaataaaccacgggcccgccatggcgttagcccttccttttgcagttgcgtctgggaaggggccccggactccctcgagagaatgtgctagagacagcccctgtcttcttggcgtggtttatatgtccgggatctggatcagattctgggggctcagaaacgtcggttgcattgagctactgggggtaggagttccaacatttatgtccagagcaacttccagcaaggctggtctgggtctctgcccaccaggcggggaggtgttcaaagacatctccctcagtgcggatttatatatatatttttccttcactgtgtcaagtggaaacaaaaacaaaatctttcaaaaaaaaaatcgggacaagtgaacacattaacatgattctgtttgtgcagattaaaaactttatagggacttgcattatcggttctcaataaattactgagcagctttgtttggggagggaagtccctaccatccttgtttagtctatattaagaaaatctgtgtctttttaatattcttgtgatgttttcagagccgctgtaggtctcttcttgcatgtccacagtaatgtatttgtggtttttattttgaacgcttgcttttagagagaaaacaatatagccccctacccttttcccaatcctttgccctcaaatcagtgacccaagggagggggggatttaaagggaaggagtgggcaaaacacataaaatgaatttattatatctaagctctgtagcaggattcatgtcgttctttgacagttctttctctttcctgtatatgcaataacaaggttttaaaaaaataataaagaagtgagactattagacaaagtatttatgtaattatttgataactcttgtaaataggtggaatatgaatgcttggaaaattaaactttaatttattgacattgtacatagctctgtgtaaatagaattgcaactgtcaggttttgtgttcttgttttcctttagttgggtttatttccaggtcacagaattgctgttaacactagaaaacacacttcctgcaccaacaccaataccctttcaaaagagttgtctgcaacatttttgttttcttttttaatgtccaaaagtgggggaaagtgctatttcctattttcaccaaaattggggaaggagtgccactttccagctccacttcaaattccttaaaatataactgagattgctgtggggagggaggagggcagaggctgcggtttgactttttaatttttcttttgttatttgtatttgctagtctctgatttcctcaaaacgaagtggaatttactactgttgtcagtatcggtgttttgaattggtgcctgcctatagagatatattcacagttcaaaagtcaggtgctgagagatggtttaaagacaaattcatgaaggtatattttgtgttatagttgttgatgagttctttggttttctgtatttttccccctctctttaaaacatcactgaaatttcaataaatttttattgaaatgtcaaaaaaaaaaaaanaanaaaaactttgggggggcccgttcccattatcctttggtgggcggttccaattactggtcggctttaccaccctggacctgg

SEQ ID NO: 299576 - DNA, 2920 bp, Homo sapiens
attttccagcaatgttgttgggcacgattatccccattttgcagatgacaacactgaggtgcagagaggctaaggggctttccccgggattacacagccactaagccacgagctgggattccaacttgggaactggagttccgttggctcatactggagataacgcccttctgccttggttttttccttcgcctgtggtagatttatgtcccagcgagggtgagagcgacgccgaggccgagagcaaagaggagcatggccccgaggcctgcgacgcggccaagatctccaccaccacgtcggaggagccctgccgtgacaagggcagccccgcggtcaaggctcaccttttcgctgctgagcggccccgggacagcgggcggctggacaaagcgtcgcccgactcacgccatagccccgccaccatctcgtccagcactcgcggcctgggcgcggaggagcgcaggagcccggttcgcgagggcacagcgccggccaaggtggaagaggcgcgcgcgctcccgggcaaggaggccttcgcgccgctcacggtgcagacggacgcggccgccgcgcacctggcccagggccccctgcctggcctcggcttcgccccgggcctggcgggccaacagttcttcaacgggcacccgctcttcctgcaccccagccagtttgccatggggggcgccttctccagcatggcggccgctggcatgggtcccctcctggccacggtttctggggcctccaccggtgtctcgggcctggattccacggccatggcctctgccgctgcggcgcagggactgtccggggcgtccgcggccaccctgcccttccacctccagcagcacgtcctggcctctcagggcctggccatgtcccctttcggaagcctgttcccttacccctacacgtacatggccgcagcggcggccgcctcctctgcggcagcctccagctcggtgcaccgccaccccttcctcaatctgaacaccatgcgcccgcggctgcgctacagcccctactccatcccggtgccggtcccggacggcagcagtctgctcaccaccgccctgccctccatggcggcggccgcggggcccctggacggcaaagtcgccgccctggccgccagcccggcctcggtggcagtggactcgggctctgaactcaacagccgctcctccacgctctcctccagctccatgtccttgtcgcccaaactctgcgcggagaaagaggcggccaccagcgaactgcagagcatccagcggttggttagcggcttggaagccaagccggacaggtcccgcagcgcgtccccgtagacccgtcccagacacgtcttttcattccagtccagttcaggctgccgtgcactttgtcggatataaaataaaccacgggcccgccatggcgttagcccttccttttgcagttgcgtctgggaaggggccccggactccctcgagagaatgtgctagagacagcccctgtcttcttggcgtggtttatatgtccgggatctggatcagattctgggggctcagaaacgtcggttgcattgagctactgggggtaggagttccaacatttatgtccagagcaacttccagcaaggctggtctgggtctctgcccaccaggcggggaggtgttcaaagacatctccctcagtgcggatttatatatatatttttccttcactgtgtcaagtggaaacaaaaacaaaatctttcaaaaaaaaaatcgggacaagtgaacacattaacatgattctgtttgtgcagattaaaaactttatagggacttgcattatcggttctcaataaattactgagcagctttgtttggggagggaagtccctaccatccttgtttagtctatattaagaaaatctgtgtctttttaatattcttgtgatgttttcagagccgctgtaggtctcttcttgcatgtccacagtaatgtatttgtggtttttattttgaacgcttgcttttagagagaaaacaatatagccccctacccttttcccaatcctttgccctcaaatcagtgacccaagggagggggggatttaaagggaaggagtgggcaaaacacataaaatgaatttattatatctaagctctgtagcaggattcatgtcgttctttgacagttctttctctttcctgtatatgcaataacaaggttttaaaaaaataataaagaagtgagactattagacaaagtatttatgtaattatttgataactcttgtaaataggtggaatatgaatgcttggaaaattaaactttaatttattgacattgtacatagctctgtgtaaatagaattgcaactgtcaggttttgtgttcttgttttcctttagttgggtttatttccaggtcacagaattgctgttaacactagaaaacacacttcctgcaccaacaccaataccctttcaaaagagttgtctgcaacatttttgttttcttttttaatgtccaaaagtgggggaaagtgctatttcctattttcaccaaaattggggaaggagtgccactttccagctccacttcaaattccttaaaatataactgagattgctgtggggagggaggagggcagaggctgcggtttgactttttaatttttcttttgttatttgtatttgctagtctctgatttcctcaaaacgaagtggaatttactactgttgtcagtatcggtgttttgaattggtgcctgcctatagagatatattcacagttcaaaagtcaggtgctgagagatggtttaaagacaaattcatgaaggtatattttgtgttatagttgttgatgagttctttggttttctgtatttttccccctctctttaaaacatcactgaaatttcaataaatttttattgaaatgtc

SEQ ID NO: 299577 - DNA, 2479 bp, Homo sapiens
ctctgtggggtaaactgaatctgtatccccatttaacaggtgcaaggagatttcctgggggctgcacacactgtgtgcagcatattgcaggctttcactcatttaatatctacaaagtcctcaataagtatatgaattacttatgatttccctgttttttcttcctataaggaagctgaggcacaagttaatcaaagtctcttggcctagggtgacacagctaagatttgtacctagagatttctgagtgttgacttctctcctgcccccacctatctccccccccaaaaaaaaaaacacaacaacaacaacaacagaacataccagggattcatggcttgcccaatgttggagggggagaagagaggagagggatgagataagctcctcccacccggctgactcgctgtgtgtctcttttctcaccccagggcctggccatgtcccctttcggaagcctgttcccttacccctacacgtacatggccgcagcggcggccgcctcctctgcggcagcctccagctcggtgcaccgccaccccttcctcaatctgaacaccatgcgcccgcggctgcgctacagcccctactccatcccggtgccggtcccggacggcagcagtctgctcaccaccgccctgccctccatggcggcggccgcggggcccctggacggcaaagtcgccgccctggccgccagcccggcctcggtggcagtggactcgggctctgaactcaacagccgctcctccacgctctcctccagctccatgtccttgtcgcccaaactctgcgcggagaaagaggcggccaccagcgaactgcagagcatccagcggttggttagcggcttggaagccaagccggacaggtcccgcagcgcgtccccgtagacccgtcccagacacgtcttttcattccagtccagttcaggctgccgtgcactttgtcggatataaaataaaccacgggcccgccatggcgttagcccttccttttgcagttgcgtctgggaaggggccccggactccctcgagagaatgtgctagagacagcccctgtcttcttggcgtggtttatatgtccgggatctggatcagattctgggggctcagaaacgtcggttgcattgagctactgggggtaggagttccaacatttatgtccagagcaacttccagcaaggctggtctgggtctctgcccaccaggcggggaggtgttcaaagacatctccctcagtgcggatttatatatatatttttccttcactgtgtcaagtggaaacaaaaacaaaatctttcaaaaaaaaaatcgggacaagtgaacacattaacatgattctgtttgtgcagattaaaaactttatagggacttgcattatcggttctcaataaattactgagcagctttgtttggggagggaagtccctaccatccttgtttagtctatattaagaaaatctgtgtctttttaatattcttgtgatgttttcagagccgctgtaggtctcttcttgcatgtccacagtaatgtatttgtggtttttattttgaacgcttgcttttagagagaaaacaatatagccccctacccttttcccaatcctttgccctcaaatcagtgacccaagggagggggggatttaaagggaaggagtgggcaaaacacataaaatgaatttattatatctaagctctgtagcaggattcatgtcgttctttgacagttctttctctttcctgtatatgcaataacaaggttttaaaaaaataataaagaagtgagactattagacaaagtatttatgtaattatttgataactcttgtaaataggtggaatatgaatgcttggaaaattaaactttaatttattgacattgtacatagctctgtgtaaatagaattgcaactgtcaggttttgtgttcttgttttcctttagttgggtttatttccaggtcacagaattgctgttaacactagaaaacacacttcctgcaccaacaccaataccctttcaaaagagttgtctgcaacatttttgttttcttttttaatgtccaaaagtgggggaaagtgctatttcctattttcaccaaaattggggaaggagtgccactttccagctccacttcaaattccttaaaatataactgagattgctgtggggagggaggagggcagaggctgcggtttgactttttaatttttcttttgttatttgtatttgctagtctctgatttcctcaaaacgaagtggaatttactactgttgtcagtatcggtgttttgaattggtgcctgcctatagagatatattcacagttcaaaagtcaggtgctgagagatggtttaaagacaaattcatgaaggtatattttgtgttatagttgttgatgagttctttggttttctgtatttttccccctctctttaaaacatcactgaaatttcaataaatttttattgaaatgtc

SEQ ID NO: 299578 - DNA, 2657 bp, Homo sapiens
atatcggtcgacccacgcgtccgctcaccccccacgtcggaggagccctgccgtgacaagggcagccccgcggtcaaggctcaccttttcgctgctgagcggccccgggacagcgggcggctggacaaagcgtcgcccgactcacgccatagccccgccaccatctcgtccagcactcgcggcctgggcgcggaggagcgcaggagcccggttcgcgagggcacagcgccggccaaggtggaagaggcgcgcgcgctcccgggcaaggaggccttcgcgccgctcacggtgcagacggacgcggccgccgcgcacctggcccagggccccctgcctggcctcggcttcgccccgggcctggcgggccaacagttcttcaacgggcacccgctcttcctgcaccccagccagtttgccatggggggcgccttctccagcatggcggccgctggcatgggtcccctcctggccacggtttctggggcctccaccggtgtctcgggcctggattccacggccatggcctctgccgctgcggcgcagggactgtccggggcgtccgcggccaccctgcccttccacctccagcagcacgtcctggcctctcagggcctggccatgtcccctttcggaagcctgttcccttacccctacacgtacatggccgcagcggcggccgcctcctctgcggcagcctccagctcggtgcaccgccaccccttcctcaatctgaacaccatgcgcccgcggctgcgctacagcccctactccatcccggtgccggtcccggacggcagcagtctgctcaccaccgccctgccctccatggcggcggccgcggggcccctggacggcaaagtcgccgccctggccgccagcccggcctcggtggcagtggactcgggctctgaactcaacagccgctcctccacgctctcctccagctccatgtccttgtcgcccaaactctgcgcggagaaagaggcggccaccagcgaactgcagagcatccagcggttggttagcggcttggaagccaagccggacaggtcccgcagcgcgtccccgtagacccgtcccagacacgtcttttcattccagtccagttcaggctgccgtgcactttgtcggatataaaataaaccacgggcccgccatggcgttagcccttccttttgcagttgcgtctgggaaggggccccggactccctcgagagaatgtgctagagacagcccctgtcttcttggcgtggtttatatgtccgggatctggatcagattctgggggctcagaaacgtcggttgcattgagctactgggggtaggagttccaacatttatgtccagagcaacttccagcaaggctggtctgggtctctgcccaccaggcggggaggtgttcaaagacatctccctcagtgcggatttatatatatatttttccttcactgtgtcaagtggaaacaaaaacaaaatctttcaaaaaaaaaatcgggacaagtgaacacattaacatgattctgtttgtgcagattaaaaactttatagggacttgcattatcggttctcaataaattactgagcagctttgtttggggagggaagtccctaccatccttgtttagtctatattaagaaaatctgtgtctttttaatattcttgtgatgttttcagagccgctgtaggtctcttcttgcatgtccacagtaatgtatttgtggtttttattttgaacgcttgcttttagagagaaaacaatatagccccctacccttttcccaatcctttgccctcaaatcagtgacccaagggagggggggatttaaagggaaggagtgggcaaaacacataaaatgaatttattatatctaagctctgtagcaggattcatgtcgttctttgacagttctttctctttcctgtatatgcaataacaaggttttaaaaaaataataaagaagtgagactattagacaaagtatttatgtaattatttgataactcttgtaaataggtggaatatgaatgcttggaaaattaaactttaatttattgacattgtacatagctctgtgtaaatagaattgcaactgtcaggttttgtgttcttgttttcctttagttgggtttatttccaggtcacagaattgctgttaacactagaaaacacacttcctgcaccaacaccaataccctttcaaaagagttgtctgcaacatttttgttttcttttttaatgtccaaaagtgggggaaagtgctatttcctattttcaccaaaattggggaaggagtgccactttccagctccacttcaaattccttaaaatataactgagattgctgtggggagggaggagggcagaggctgcggtttgactttttaatttttcttttgttatttgtatttgctagtctctgatttcctcaaaacgaagtggaatttactactgttgtcagtatcggtgttttgaattggtgcctgcctatagagatatattcacagttcaaaagtcaggtgctgagagatggtttaaagacaaattcatgaaggtatattttgtgttatagttgttgatgagttctttggttttctgtatttttccccctctctttaaaacatcactgaaatttcaataaatttttattgaaatgtc

SEQ ID NO: 299579 - DNA, 4167 bp, Homo sapiens
  misc_feature (4083)..(4083): n is a, c, g, or t
  misc_feature (4086)..(4086): n is a, c, g, or t
ggaagcgaattcgctcacgttttaggacaaggaagagagagaggcacgggagaagagcccagcaagatttggattgaaaccgagacaccctccggaggctcggagcagaggaaggaggaggagggcggcgaacggaagccagtttgcaattcaagttttgatagcgctggtagaagggggtttaaatcagatttttttttttttaaaggagagagactttttccgctctctcgctccctgttaaagccgggtctagcacagctgcagacgccaccagcgagaaagagggagaggaagacagatagggggcgggggaagaagaaaaagaaaggtaaaaagtcttctaggagaacctttcacatttgcaacaaaagacctaggggctggagagagattcctgggacgcagggctggagtgtctatttcgagctcagcggcagggctcgggcgcgagtcgagaccctgctcgctcctctcgcttctgaaaccgacgttcaggagcggctttttaaaaacgcaaggcacaaggacggtcacccgcgcgactatgtttgctgatttttcgccttgccctctttaaaagcggcctcccattctccaaaagacacttcccctcctccctttgaagtgcattagttgtgatttctgcctccttttcttttttctttcttttttgttttgctttttccccccttttgaattatgtgctgctgttaaaacaacaacaaaaaaacaacaaaacacagcagctgcggacttgtccccggctggagcccagcgccccgcctggagtggatgagcctctccatgagagatccggtcattcctgggacaagcatggcctaccatccgttcctacctcaccgggcgccggacttcgccatgagcgcggtgctgggtcaccagccgccgttcttccccgcgctgacgctgcctcccaacggcgcggcggcgctctcgctgccgggcgccctggccaagccgatcatggatcaattggtgggggcggccgagaccggcatcccgttctcctccctggggccccaggcgcatctgaggcctttgaagaccatggagcccgaagaagaggtggaggacgaccccaaggtgcacctggaggctaaagaactttgggatcagtttcacaagcggggcaccgagatggtcattaccaagtcgggaaggcgaatgtttcctccatttaaagtgagatgttctgggctggataaaaaagccaaatacattttattgatggacattatagctgctgatgactgtcgttataaatttcacaattctcggtggatggtggctggtaaggccgaccccgaaatgccaaagaggatgtacattcacccggacagccccgctactggggaacagtggatgtccaaagtcgtcactttccacaaactgaaactcaccaacaacatttcagacaaacatggatttgtaagtttcattgctctcttcagtaaaattttctcctccttcactcagtcaaaggcagtgcttcccatttcatgagtttcagcccagacttctcctttgcttctccctaagcatagcaaacttgtcctcgtctggaaaaaggattcggggtgtttctctccaaataatggaaggcctggcgttctaaaagaaatggggcaagaaaacttaccggcttgtgttctatagcaattccagctctttggtagattcctgacctgagagtgaagttaaaaaccattttttaagagctaaaatcaatttcaaggctatgtattcctaaaggatttgttttgttttaaaatatcatacttctgttttgaaaccagtgatattattttctcaggagagtttacgtttcggagccttgactctgttggttaaatggtgtgaatacatttttaaaaactcgttcttttactaaaaaaagaattgggcttaggtgggagtccggcttaccctaaatgaggcttagatcttcagaaaaaaatggtttgtgtgttgggagtgtatatatggattcagtgacagtgcttagaaacttagaaaactttcattgcttgtagatatcaggcaaaggaccttttgcgccttttcctacccctccccaacatttcaataaaataaacagcgtgataagcaaggagtaagcagaaagattaggcccgcggctgcgctacagcccctactccatcccggtgccggtcccggacggcagcagtctgctcaccaccgccctgccctccatggcggcggccgcggggcccctggacggcaaagtcgccgccctggccgccagcccggcctcggtggcagtggactcgggctctgaactcaacagccgctcctccacgctctcctccagctccatgtccttgtcgcccaaactctgcgcggagaaagaggcggccaccagcgaactgcagagcatccagcggttggttagcggcttggaagccaagccggacaggtcccgcagcgcgtccccgtagacccgtcccagacacgtcttttcattccagtccagttcaggctgccgtgcactttgtcggatataaaataaaccacgggcccgccatggcgttagcccttccttttgcagttgcgtctgggaaggggccccggactccctcgagagaatgtgctagagacagcccctgtcttcttggcgtggtttatatgtccgggatctggatcagattctgggggctcagaaacgtcggttgcattgagctactgggggtaggagttccaacatttatgtccagagcaacttccagcaaggctggtctgggtctctgcccaccaggcggggaggtgttcaaagacatctccctcagtgcggatttatatatatatttttccttcactgtgtcaagtggaaacaaaaacaaaatctttcaaaaaaaaaatcgggacaagtgaacacattaacatgattctgtttgtgcagattaaaaactttatagggacttgcattatcggttctcaataaattactgagcagctttgtttggggagggaagtccctaccatccttgtttagtctatattaagaaaatctgtgtctttttaatattcttgtgatgttttcagagccgctgtaggtctcttcttgcatgtccacagtaatgtatttgtggtttttattttgaacgcttgcttttagagagaaaacaatatagccccctacccttttcccaatcctttgccctcaaatcagtgacccaagggagggggggatttaaagggaaggagtgggcaaaacacataaaatgaatttattatatctaagctctgtagcaggattcatgtcgttctttgacagttctttctctttcctgtatatgcaataacaaggttttaaaaaaataataaagaagtgagactattagacaaagtatttatgtaattatttgataactcttgtaaataggtggaatatgaatgcttggaaaattaaactttaatttattgacattgtacatagctctgtgtaaatagaattgcaactgtcaggttttgtgttcttgttttcctttagttgggtttatttccaggtcacagaattgctgttaacactagaaaacacacttcctgcaccaacaccaataccctttcaaaagagttgtctgcaacatttttgttttcttttttaatgtccaaaagtgggggaaagtgctatttcctattttcaccaaaattggggaaggagtgccactttccagctccacttcaaattccttaaaatataactgagattgctgtggggagggaggagggcagaggctgcggtttgactttttaatttttcttttgttatttgtatttgctagtctctgatttcctcaaaacgaagtggaatttactactgttgtcagtatcggtgttttgaattggtgcctgcctatagagatatattcacagttcaaaagtcaggtgctgagagatggtttaaagacaaattcatgaaggtatattttgtgttatagttgttgatgagttctttggttttctgtatttttccccctctctttaaaacatcactgaaatttcaataaatttttattgaaatgtcaaaaaaaaaaaaanaanaaaaactttgggggggcccgttcccattatcctttggtgggcggttccaattactggtcggctttaccaccctggacctgg

SEQ ID NO: 299580 - DNA, 4336 bp, Homo sapiens
  misc_feature (4252)..(4252): n is a, c, g, or t
  misc_feature (4255)..(4255): n is a, c, g, or t
ggaagcgaattcgctcacgttttaggacaaggaagagagagaggcacgggagaagagcccagcaagatttggattgaaaccgagacaccctccggaggctcggagcagaggaaggaggaggagggcggcgaacggaagccagtttgcaattcaagttttgatagcgctggtagaagggggtttaaatcagatttttttttttttaaaggagagagactttttccgctctctcgctccctgttaaagccgggtctagcacagctgcagacgccaccagcgagaaagagggagaggaagacagatagggggcgggggaagaagaaaaagaaaggtaaaaagtcttctaggagaacctttcacatttgcaacaaaagacctaggggctggagagagattcctgggacgcagggctggagtgtctatttcgagctcagcggcagggctcgggcgcgagtcgagaccctgctcgctcctctcgcttctgaaaccgacgttcaggagcggctttttaaaaacgcaaggcacaaggacggtcacccgcgcgactatgtttgctgatttttcgccttgccctctttaaaagcggcctcccattctccaaaagacacttcccctcctccctttgaagtgcattagttgtgatttctgcctccttttcttttttctttcttttttgttttgctttttccccccttttgaattatgtgctgctgttaaaacaacaacaaaaaaacaacaaaacacagcagctgcggacttgtccccggctggagcccagcgccccgcctggagtggatgagcctctccatgagagatccggtcattcctgggacaagcatggcctaccatccgttcctacctcaccgggcgccggacttcgccatgagcgcggtgctgggtcaccagccgccgttcttccccgcgctgacgctgcctcccaacggcgcggcggcgctctcgctgccgggcgccctggccaagccgatcatggatcaattggtgggggcggccgagaccggcatcccgttctcctccctggggccccaggcgcatctgaggcctttgaagaccatggagcccgaagaagaggtggaggacgaccccaaggtgcacctggaggctaaagaactttgggatcagtttcacaagcggggcaccgagatggtcattaccaagtcgggaaggcgaatgtttcctccatttaaagtgagatgttctgggctggataaaaaagccaaatacattttattgatggacattatagctgctgatgactgtcgttataaatttcacaattctcggtggatggtggctggtaaggccgaccccgaaatgccaaagaggatgtacattcacccggacagccccgctactggggaacagtggatgtccaaagtcgtcactttccacaaactgaaactcaccaacaacatttcagacaaacatggatttactatattgaactccatgcacaaataccagccccggttccacattgtaagagccaatgacatcttgaaactcccttatagtacatttcggacatacttgttccccgaaactgaattcatcgctgtgactgcataccagaatgataagataacccagttaaaaatagacaacaacccttttgcaaaaggtttccgggacactggaaatggccgaagagaaaaaagaaaacagctcaccctgcagtccatgagggtgtttgatgaaagacacaaaaaggagaatgggacctctgatgagtcctccagtgaacaagcagctttcaactgcttcgcccaggcttcttctccagccgcctccactgtagggacatcgaacctcaaagatttatgtcccagcgagggtgagagcgacgccgaggccgagagcaaagaggagcatggccccgaggcctgcgacgcggccaagatctccaccaccacgtcggaggagccctgccgtgacaagggcagccccgcggtcaaggctcaccttttcgctgctgagcggccccgggacagcgggcggctggacaaagcgtcgcccgactcacgccatagccccgccaccatctcgtccagcactcgcggcctgggcgcggaggagcgcaggagcccggttcgcgagggcacagcgccggccaaggtggaagaggcgcgcgcgctcccgggcaaggaggccttcgcgccgctcacggtgcagacggacgcggccgccgcgcacctggcccagggccccctgcctggcctcggcttcgccccgggcctggcgggccaacagttcttcaacgggcacccgctcttcctgcaccccagccagtttgccatggggggcgccttctccagcatggcggccgctggcatgggtcccctcctggccacggtttctggggcctccaccggtgtctcgggcctggattccacggccatggcctctgccgctgcggcgcagggactgtccggggcgtccgcggccaccctgcccttccacctccagcagcacgtcctggcctctcagggcctggccatgtcccctttcggaagcctgttcccttacccctacacgtacatggccgcagcggcggccgcctcctctgcggcagcctccagctcggtgcaccgccaccccttcctcaatctgaacaccatgcgcccgcggctgcgctacagcccctaacacgtcttttcattccagtccagttcaggctgccgtgcactttgtcggatataaaataaaccacgggcccgccatggcgttagcccttccttttgcagttgcgtctgggaaggggccccggactccctcgagagaatgtgctagagacagcccctgtcttcttggcgtggtttatatgtccgggatctggatcagattctgggggctcagaaacgtcggttgcattgagctactgggggtaggagttccaacatttatgtccagagcaacttccagcaaggctggtctgggtctctgcccaccaggcggggaggtgttcaaagacatctccctcagtgcggatttatatatatatttttccttcactgtgtcaagtggaaacaaaaacaaaatctttcaaaaaaaaaatcgggacaagtgaacacattaacatgattctgtttgtgcagattaaaaactttatagggacttgcattatcggttctcaataaattactgagcagctttgtttggggagggaagtccctaccatccttgtttagtctatattaagaaaatctgtgtctttttaatattcttgtgatgttttcagagccgctgtaggtctcttcttgcatgtccacagtaatgtatttgtggtttttattttgaacgcttgcttttagagagaaaacaatatagccccctacccttttcccaatcctttgccctcaaatcagtgacccaagggagggggggatttaaagggaaggagtgggcaaaacacataaaatgaatttattatatctaagctctgtagcaggattcatgtcgttctttgacagttctttctctttcctgtatatgcaataacaaggttttaaaaaaataataaagaagtgagactattagacaaagtatttatgtaattatttgataactcttgtaaataggtggaatatgaatgcttggaaaattaaactttaatttattgacattgtacatagctctgtgtaaatagaattgcaactgtcaggttttgtgttcttgttttcctttagttgggtttatttccaggtcacagaattgctgttaacactagaaaacacacttcctgcaccaacaccaataccctttcaaaagagttgtctgcaacatttttgttttcttttttaatgtccaaaagtgggggaaagtgctatttcctattttcaccaaaattggggaaggagtgccactttccagctccacttcaaattccttaaaatataactgagattgctgtggggagggaggagggcagaggctgcggtttgactttttaatttttcttttgttatttgtatttgctagtctctgatttcctcaaaacgaagtggaatttactactgttgtcagtatcggtgttttgaattggtgcctgcctatagagatatattcacagttcaaaagtcaggtgctgagagatggtttaaagacaaattcatgaaggtatattttgtgttatagttgttgatgagttctttggttttctgtatttttccccctctctttaaaacatcactgaaatttcaataaatttttattgaaatgtcaaaaaaaaaaaaanaanaaaaactttgggggggcccgttcccattatcctttggtgggcggttccaattactggtcggctttaccaccctggacctgg

SEQ ID NO: 299581 - DNA, 4059 bp, Homo sapiens
  misc_feature (3975)..(3975): n is a, c, g, or t
  misc_feature (3978)..(3978): n is a, c, g, or t
ggaagcgaattcgctcacgttttaggacaaggaagagagagaggcacgggagaagagcccagcaagatttggattgaaaccgagacaccctccggaggctcggagcagaggaaggaggaggagggcggcgaacggaagccagtttgcaattcaagttttgatagcgctggtagaagggggtttaaatcagatttttttttttttaaaggagagagactttttccgctctctcgctccctgttaaagccgggtctagcacagctgcagacgccaccagcgagaaagagggagaggaagacagatagggggcgggggaagaagaaaaagaaaggtaaaaagtcttctaggagaacctttcacatttgcaacaaaagacctaggggctggagagagattcctgggacgcagggctggagtgtctatttcgagctcagcggcagggctcgggcgcgagtcgagaccctgctcgctcctctcgcttctgaaaccgacgttcaggagcggctttttaaaaacgcaaggcacaaggacggtcacccgcgcgactatgtttgctgatttttcgccttgccctctttaaaagcggcctcccattctccaaaagacacttcccctcctccctttgaagtgcattagttgtgatttctgcctccttttcttttttctttcttttttgttttgctttttccccccttttgaattatgtgctgctgttaaaacaacaacaaaaaaacaacaaaacacagcagctgcggacttgtccccggctggagcccagcgccccgcctggagtggatgagcctctccatgagagatccggtcattcctgggacaagcatggcctaccatccgttcctacctcaccgggcgccggacttcgccatgagcgcggtgctgggtcaccagccgccgttcttccccgcgctgacgctgcctcccaacggcgcggcggcgctctcgctgccgggcgccctggccaagccgatcatggatcaattggtgggggcggccgagaccggcatcccgttctcctccctggggccccaggcgcatctgaggcctttgaagaccatggagcccgaagaagaggtggaggacgaccccaaggtgcacctggaggctaaagaactttgggatcagtttcacaagcggggcaccgagatggtcattaccaagtcgggaaggcgaatgtttcctccatttaaagtgagatgttctgggctggataaaaaagccaaatacattttattgatggacattatagctgctgatgactgtcgttataaatttcacaattctcggtggatggtggctggtaaggccgaccccgaaatgccaaagaggatgtacattcacccggacagccccgctactggggaacagtggatgtccaaagtcgtcactttccacaaactgaaactcaccaacaacatttcagacaaacatggatttactatattgaactccatgcacaaataccagccccggttccacattgtaagagccaatgacatcttgaaactcccttatagtacatttcggacatacttgttccccgaaactgaattcatcgctgtgactgcataccagaatgataagataacccagttaaaaatagacaacaacccttttgcaaaaggtttccgggacactggaaatggccgaagagaaaaaagaaaacagctcaccctgcagtccatgagggtgtttgatgaaagacacaaaaaggagaatgggacctctgatgagtcctccagtgaacaagcagctttcaactgcttcgcccaggcttcttctccagccgcctccactgtagggacatcgaacctcaaagatttatgtcccagcgagggtgagagcgacgccgaggccgagagcaaagaggagcatggccccgaggcctgcgacgcggccaagatctccaccaccacgtcggaggagccctgccgtgacaagggcagccccgcggtcaaggctcaccttttcgctgctgagcggccccgggacagcgggcggctggacaaagcgtcgcccgactcacgccatagccccgccaccatctcgtccagcactcgcggcctgggcgcggaggagcgcaggagcccggttcgcgagggcacagcgccggccaaggtggaagaggcgcgcgcgctcccgggcaaggaggccttcgcgccgctcacggtgcagacggacgcggccgccgcgcacctggcccagggccccctgcctggcctcggcttcgccccgggcctggcgggccaacagttcttcaacgggcacccgctcttcctgcaccccagccagtttgccatggggggcgccttctccagcatggcggccgctggcatgggtcccctcctggccacggtttctggggcctccaccggtgtctcgggcctggattccacggccatggcctctgccgctgcggcgcagggactgtccggggcgtccgcggccaccctgccccttccttttgcagttgcgtctgggaaggggccccggactccctcgagagaatgtgctagagacagcccctgtcttcttggcgtggtttatatgtccgggatctggatcagattctgggggctcagaaacgtcggttgcattgagctactgggggtaggagttccaacatttatgtccagagcaacttccagcaaggctggtctgggtctctgcccaccaggcggggaggtgttcaaagacatctccctcagtgcggatttatatatatatttttccttcactgtgtcaagtggaaacaaaaacaaaatctttcaaaaaaaaaatcgggacaagtgaacacattaacatgattctgtttgtgcagattaaaaactttatagggacttgcattatcggttctcaataaattactgagcagctttgtttggggagggaagtccctaccatccttgtttagtctatattaagaaaatctgtgtctttttaatattcttgtgatgttttcagagccgctgtaggtctcttcttgcatgtccacagtaatgtatttgtggtttttattttgaacgcttgcttttagagagaaaacaatatagccccctacccttttcccaatcctttgccctcaaatcagtgacccaagggagggggggatttaaagggaaggagtgggcaaaacacataaaatgaatttattatatctaagctctgtagcaggattcatgtcgttctttgacagttctttctctttcctgtatatgcaataacaaggttttaaaaaaataataaagaagtgagactattagacaaagtatttatgtaattatttgataactcttgtaaataggtggaatatgaatgcttggaaaattaaactttaatttattgacattgtacatagctctgtgtaaatagaattgcaactgtcaggttttgtgttcttgttttcctttagttgggtttatttccaggtcacagaattgctgttaacactagaaaacacacttcctgcaccaacaccaataccctttcaaaagagttgtctgcaacatttttgttttcttttttaatgtccaaaagtgggggaaagtgctatttcctattttcaccaaaattggggaaggagtgccactttccagctccacttcaaattccttaaaatataactgagattgctgtggggagggaggagggcagaggctgcggtttgactttttaatttttcttttgttatttgtatttgctagtctctgatttcctcaaaacgaagtggaatttactactgttgtcagtatcggtgttttgaattggtgcctgcctatagagatatattcacagttcaaaagtcaggtgctgagagatggtttaaagacaaattcatgaaggtatattttgtgttatagttgttgatgagttctttggttttctgtatttttccccctctctttaaaacatcactgaaatttcaataaatttttattgaaatgtcaaaaaaaaaaaaanaanaaaaactttgggggggcccgttcccattatcctttggtgggcggttccaattactggtcggctttaccaccctggacctgg

SEQ ID NO: 299582 - DNA, 615 bp, Homo sapiens
cccaagtgatcacgctacgtggcaggggaattatagttttggtactcaggtaggctagggttcaaggtatgaatgatccttagatggtgagggtggggggggccctttggcaactgaggagcaatttggattctccagaagataacatctgtggagcgaaacgtacccagggggtactccaaggaggtgggctcggtacaagcgtggtaccctgcggtggggaagatttcagcctggcaggggtcctaagatcccgtttgttctgctaaatccttgttttatgtatgtctcctcttccctgcccctgcagactatattgaactccatgcacaaataccagccccggttccacattgtaagagccaatgacatcttgaaactcccttatagtacatttcggacatacttgttccccgaaactgaattcatcgctgtgactgcataccagaatgataaggtaaactcaaggggctttcctttttaatggtgatattttgccttccccttaaaagctgctttaagtcaggatgagaaagttacaagagagtggagacgagagtcttgagttgtcttttgtgatttgtggagcatttggggggaaaggacaatgacacc

SEQ ID NO: 299583 - DNA, 477 bp, Homo sapiens
atggtgatgcatgcctgtagtcccagctattcaggaggctaaggtgggagaatcacctgagcccaggaataaataaataaataaatggctataactgtgaaacacaaaataaaaatgttattaaaaataaaacacaaaaaataatttcattagtaatttaaaacacaatcataccattgacaaaaatgttcccattgcaatggtaaacacaaagatcagaaataaccttatcatctattaataatacccttcagtgatttgtaggaaagtctagggtctctttgggttacatctacattatattagatgttaaaggctgctgcataaaaacacttacataccataggtggccactatataatcttgagatcatggtaccttagaccataaaaagctgaataaacacttatgatgtggatttgattcactaataaattctcactctgatgttcccactcccagcatcaccatatatca

SEQ ID NO: 299584 - DNA, 532 bp, Homo sapiens
agcttccgcagagatcctgcagatgtgattcgagtcttccagcaacaccacctcactctgctttgcacaatcactccacctccccacatgttgcggagattctcctggggattcacactcttcctacttgcagctgtgacacgggaaacatcctccaccaggtcttctctcacagtgtggcctctgcgcacaggttatccacctgtagacctggacgggaccctcgaggctccctactctgaccatctggttttatagttgaggaaccagaagccgaggcagggtctcgacggtgaagaagcaggctgtttccatcttcaggatacaagccatctgcgcataggaagagggtccagaggctcatctggaatccctcctcactcactggacggaggacctgaccccgttcccatcattggttctgaatccatcagcccagcaagacaggtgtctccagcaagttctgtaaaatacaaccatagccgggcctggagtcagcccccaataaagggttcaccatgaagtcaaagct

SEQ ID NO: 299585 - DNA, 942 bp, Homo sapiens
cctatggaaggggccccagtccctcccctgtgcatacagctccccagccgggggttcccttggattcataatcctccagctctacccccacccccagtgacccacatcttagccccatgacctctgacctcctgaccccttcctcatccttgcttccccttgtgaactctgacccttccgtggtgacctgagagccctacagactctgtggcccagagactccgtgacctccgaccccatcccagacccaggccccccccatgtcacagcccgcaggaggcctaggcctaagccccaggccccatgaccaccccgtgtccaccccggtgccctttccctggctgcccgggtgtgactgccatgtggccgcagacccgctgttcgtgctggagcacagcctgcccattgacacgcagtactacctggagcagcagctggccaagcccctcctgcgcatcttcgagcccatcctgggcgagggccgtgccgaggctgtgctactgcggggggaccacacgcgctgcaagacggtgctcacgggcaaggtgggcggcctcctggccttcgccaaacgccgcaactgctgcattggctgccgcacagtgctcagccaccagggagccgtgtgtgagttctgccagccccgggagtctgagctgtatcagaaggaggtatcccatctgaatgccctggaggagcgcttctcgcgcctctggacgcagtgccagcgctgccagggcagcctgcacgaggacgtcatctgcaccagccgggactgccccatcttctacatgcgcaagaaggtgcggaaggacctggaagaccaggagcagctcctgcggcgcttcggaccccctggacctgaggcctggtgaccttgcaagcatcccatggggcgggggcgggaccagggagaattaataaagttctggacttttgcta

SEQ ID NO: 299586 - DNA, 1006 bp, Homo sapiens
cctatggaaggggccccagtccctcccctgtgcatacagctccccagccgggggttcccttggattcataatcctccagctctacccccacccccagtgacccacatcttagccccatgacctctgacctcctgaccccttcctcatccttgcttccccttgtgaactctgacccttccgtggtgacctgagagccctacagactctgtggcccagagactccgtgacctccgaccccatcccagacccaggccccccccatgtcacagcccgcaggaggcctaggcctaagccccaggccccatgaccaccccgtgtccaccccggtgccctttccctggctgcccgggtgtgactgccatgtggccgcagacccgctgttcgtgctggagcacagcctgcccattgacacgcagtactacctggagcagcagctggccaagcccctcctgcgcatcttcgagcccatcctgggcgagggccgtgccgaggctgtgctactgcggggggaccacacgcgctgcaagacggtgctcacgggcaaggtgggcggcctcctggccttcgccaaacgccgcaactgctgcattggctgccgcacagtgctcagccaccagggagccgtgtgtgagttctgccagccccgggagtctgagctgtatcagaaggaggtatcccatctgaatgccctggaggagcgcttctcgcgcctctggacgcagtgccagcgctgccagggcagcctgcacgaggacgtcatctgcaccagccgggactgccccatcttctacatgcgcaagaaggtgcggaaggacctggaagaccaggagcagctcctgcggcgcttcggaccccctggacctgaggcctggtgaccttgcaagcatcccatggggcgggggcgggaccagggagaattaataaagttctggacttttgctaaaaaaaaacacacctccaacacaaacaacaacaccaaaaataaccacacaccacactacaacgg

SEQ ID NO: 299587 - DNA, 3431 bp, Homo sapiens
ggcggcgtaggctgtggcgggaaacgctgtttgaagcgggatggatggcaagcggcggccaggcccagggcccggggtgcccccaaagcgggcccgtgggggcctctgggatgatgatgatgcacctcggccatcccaattcgaggaggacctggcactgatggaggagatggaggcagaacacaggctgcaggagcaggaggaggaggagctgcagtcagtcctggagggggttgcagacgggcaggtcccaccatcagccatagatcctcgctggcttcggcccacaccaccagcgctggacccccagacagagcccctcatcttccaacagttggagattgaccattatgtgggcccagcgcagcctgtgcctggggggcccccaccatcccgcggctccgtgcctgtgctccgcgccttcggggtcaccgatgaggggttctctgtctgctgccacatccacggcttcgctccctacttctacaccccagcgccccctggtttcgggcccgagcacatgggtgacctgcaacgggagctgaacttggccatcagccgggacagtcgcggggggagggagctgactgggccggccgtgctggctgtggaactgtgctcccgagagagcatgtttgggtaccacgggcacggcccctccccgttcctgcgcatcaccgtggcgctgccgcgcctcgtggccccggcccgccgtctcctggaacagggcatccgtgtggcaggcctgggcacgcccagcttcgcgccctacgaggccaacgtcgactttgagatccggttcatggtggacacggacatcgtcggctgcaactggctggagctcccagctgggaaatacgccctgaggctgaaggagaaggctacgcagtgccagctggaggcggacgtgctgtggtctgacgtggtcagtcacccaccggaagggccatggcagcgcattgcgcccttgcgcgtgctcagcttcgatatcgagtgcgccggccgcaaaggcatcttccctgagcctgagcgggaccctgtcatccagatctgctcgctgggcctgcgctggggggagccggagcccttcctacgcctggcgctcaccctgcggccctgtgcccccatcctgggtgccaaggtgcagagctacgagaaggaggaggacctgctgcaggcctggtccaccttcatccgtatcatggaccccgacgtgatcaccggttacaacatccagaacttcgaccttccgtacctcatctctcgggcccagaccctcaaggtacaaacattccctttcctgggccgtgtggccggcctttgctccaacatccgggactcttcattccagtccaagcagacgggccggcgggacaccaaggttgtcagcatggtgggccgcgtgcagatggacatgctgcaggtgctgctgcgggagtacaagctccgctcctacacgctcaatgccgtgagcttccacttcctgggcgagcagaaggaggacgtgcagcacagcatcatcaccgacctgcagaatgggaacgaccagacccgccgccgcctggctgtgtactgcctgaaggatgcctacctgccactgcggctgctggagcggctcatggtgctggtgaacgccgtggagatggcgagggtcactggcgtgcccctcagctacctgctcagtcgtggccagcaggtcaaggtcgtatcccagctgttgcggcaggccatgcacgaggggctgctgatgcccgtggtgaagtcagagggcggcgaggactacacgggagccactgtcatcgagcccctcaaagggtactacgacgtccccatcgccaccctggacttctcctcgctgtacccgtccatcatgatggcccacaacctgtgttacaccacgctccttcggcccgggactgcacagaaactgggcctgactgaggatcagttcatcaggacccccaccggggacgagtttgtgaagacctcagtgcggaaggggctgctgccccagatcctggagaacctgctcagtgcccggaagagggccaaggccgagctggccaaggagacagaccccctccggcgccaggtcctggatggacggcagctggcgctgaaggtgagcgccaactccgtatacggcttcactggcgcccaggtgggcaagttgccgtgcctggagatctcacagagcgtcacggggttcggacgtcagatgatcgagaaaaccaagcagctggtggagtctaagtacacagtggagaatggctacagcaccagtgccaaggtggtgtatggtgacactgactccgtcatgtgccgattcggcgtgtcctcggtggctgaggcgatggccctggggcgggaggccgcggactgggtgtcaggtcacttcccgtcgcccatccggctggagtttgagaaggtctacttcccatacctgcttatcagcaagaagcgctacgcgggcctgctcttctcctcccggcccgacgcccacgaccgcatggactgcaagggcctggaggccgtgcgcagggacaactgccccctcgtggccaacctggtcactgcctcactgcgccgcctgctcatcgaccgagaccctgagggcgcggtggctcacgcacaggacgtcatctcggacctgctgtgcaaccgcatcgatatctcccagctggtcatcaccaaggagctgacccgcgcggcctccgactatgccggcaagcaggcccacgtggagctggccgagaggatgaggaagcgggaccccgggagtgcgcccagcctgggcgaccgcgtcccctacgtgatcatcagtgccgccaagggtgtggccgcctacatgaagtcggaggacccgctgttcgtgctggagcacagcctgcccattgacacgcagtactacctggagcagcagctggccaagcccctcctgcgcatcttcgagcccatcctgggcgagggccgtgccgaggctgtgctactgcggggggaccacacgcgctgcaagacggtgctcacgggcaaggtgggcggcctcctggccttcgccaaacgccgcaactgctgcattggctgccgcacagtgctcagccaccagggagccgtgtgtgagttctgccagccccgggagtctgagctgtatcagaaggaggtatcccatctgaatgccctggaggagcgcttctcgcgcctctggacgcagtgccagcgctgccagggcagcctgcacgaggacgtcatctgcaccagccgggactgccccatcttctacatgcgcaagaaggtgcggaaggacctggaagaccaggagcagctcctgcggcgcttcggaccccctggacctgaggcctggtgaccttgcaagcatcccatggggcgggggcgggaccagggagaattaataaagttctggacttttgcta

SEQ ID NO: 299588 - DNA, 1008 bp, Homo sapiens
ggcggcgtaggctgtggcgggaaacgctgtttgaagcggcttcagcactgactctgggctcccacaagcccctgcgcttcctctgtcccacccgggtctctcctcgcagatcatcactccctgtccctctctggctacttgcacaacccgaagccagagccgctaacgacgcttgcttcttcctgtctaagctgttgtaccaaggagcccccaaaacacagtggcccaagaaagatacaaattgatttctccacataacgctttggaagatagtagagacagggtttcaccatgttgataaggctggtctcaaacaactgacctcaagtgatccacccgcctcggcctctcaaagtgctgggattataggtgcgagccacggtgcccagctgggtacaggatggatggcaagcggcggccaggcccagggcccggggtgcccccaaagcgggcccgtgggggcctctgggatgatgatgatgcacctcggccatcccaattcgaggaggacctggcactgatggaggagatggaggcagaacacaggctgcaggagcaggaggaggaggagctgcagtcagtcctggagggggttgcagacgggcaggtcccaccatcagccatagatcctcgctggcttcggcccacaccaccagcgctggacccccagacagagcccctcatcttccaacagttggagattgaccattatgtgggccagacaggctgtgctggggggcccacattccaggggtcgggctgggtccgggctcggggtacggaaacggttccggtgcggccatcaccggtcgttcctattttaaaccaggccctggttttggccaccacttgtggcgcacgggctaatggccaccgggaactggcggcggaggagttgggccgctgtttaaataccccaaagtttgaagaaggccccctgaaaggggggtttacacccctacataaatgggatggagccacccataataggatgcacacacacaacac

SEQ ID NO: 299589 - DNA, 638 bp, Homo sapiens
  misc_feature (37)..(37): n is a, c, g, or t
  misc_feature (85)..(85): n is a, c, g, or t
gtgctccctggacgagaattccacatccggagaatcntcatcctgaatctcgatcggattctcgctctccccattctctgcagcnccattatcctcccccatcaccgtaacgtccggccagatctgcttccaaaaccacaacacctgtgcaaacacctccacggagttattgagctctttggccccgttgccagtcgtctgagcgttggcgatctcatcgacaatggctttgcacgcgtcgacaaattggctgaagccagctgatgtccagtttggaatgaatgcctcgtggatggcggctgtgtgcagccagggagccgtgtgtgagttctgccagccccgggagtctgagctgtatcagaaggaggtatcccatctgaatgccctggaggagcgcttctcgcgcctctggacgcagtgccagcgctgccagggcagcctgcacgaggacgtcatctgcaccagccgggactgccccatcttctacatgcgcaagaaggtgcggaaggacctggaagaccaggagcagctcctgcggcgcttcggaccccctggacctgaggcctggtgaccttgcaagcatcccatggggcgggggcgggaccagggagaattaataaagttctggacttttgcta

SEQ ID NO: 299590 - DNA, 416 bp, Homo sapiens
actttcagaagctgggattggcagtgggcagggatggggtggcccagttcctggctgggccccagcacttgggctgacccgcctccccacaggagccgtgtgtgagttctgccagccccgggagtctgagctgtatcagaaggaggtatcccatctgaatgccctggaggagcgcttctcgcgcctctggacgcagtgccagcgctgccagggcagcctgcacgaggacgtcatctgcaccagccgggactgccccatcttctacatgcgcaagaaggtgcggaaggacctggaagaccaggagcagctcctgcggcgcttcggaccccctggacctgaggcctggtgaccttgcaagcatcccatggggcgggggcgggaccagggagaattaataaagttctggacttttgcta

SEQ ID NO: 299591 - DNA, 324 bp, Homo sapiens
  misc_feature (31)..(32): n is a, c, g, or t
aagattacggctaggtacgaggctgggtggnnagttgagctgtatagaaggaggtatcccatctgaatgccctggaggagcgcttctcgcgcctctggacgcagtgccagcgctgccagggcagcctgcacgaggacgtcatctgcaccagccgggactgccccatcttctacatgcgcaagaaggtgcggaaggacctggaagaccaggagcagctcctgcggcgcttcggaccccctggacctgaggcctggtgaccttgcaagcatcccatggggcgggggcgggaccagggagaattaataaagttctggacttttgcta

SEQ ID NO: 299592 - DNA, 3791 bp, Homo sapiens
ggcggcgtaggctgtggcgggaaacgctgtttgaagcggcttcagcactgactctgggctcccacaagcccctgcgcttcctctgtcccacccgggtctctcctcgcagatcatcactccctgtccctctctggctacttgcacaacccgaagccagagccgctaacgacgcttgcttcttcctgtctaagctgttgtaccaaggagcccccaaaacacagtggcccaagaaagatacaaattgatttctccacataacgctttggaagatagtagagacagggtttcaccatgttgataaggctggtctcaaacaactgacctcaagtgatccacccgcctcggcctctcaaagtgctgggattataggtgcgagccacggtgcccagctgggtacaggatggatggcaagcggcggccaggcccagggcccggggtgcccccaaagcgggcccgtgggggcctctgggatgatgatgatgcacctcggccatcccaattcgaggaggacctggcactgatggaggagatggaggcagaacacaggctgcaggagcaggaggaggaggagctgcagtcagtcctggagggggttgcagacgggcaggtcccaccatcagccatagatcctcgctggcttcggcccacaccaccagcgctggacccccagacagagcccctcatcttccaacagttggagattgaccattatgtgggcccagcgcagcctgtgcctggggggcccccaccatcccgcggctccgtgcctgtgctccgcgccttcggggtcaccgatgaggggttctctgtctgctgccacatccacggcttcgctccctacttctacaccccagcgccccctggtttcgggcccgagcacatgggtgacctgcaacgggagctgaacttggccatcagccgggacagtcgcggggggagggagctgactgggccggccgtgctggctgtggaactgtgctcccgagagagcatgtttgggtaccacgggcacggcccctccccgttcctgcgcatcaccgtggcgctgccgcgcctcgtggccccggcccgccgtctcctggaacagggcatccgtgtggcaggcctgggcacgcccagcttcgcgccctacgaggccaacgtcgactttgagatccggttcatggtggacacggacatcgtcggctgcaactggctggagctcccagctgggaaatacgccctgaggctgaaggagaaggctacgcagtgccagctggaggcggacgtgctgtggtctgacgtggtcagtcacccaccggaagggccatggcagcgcattgcgcccttgcgcgtgctcagcttcgatatcgagtgcgccggccgcaaaggcatcttccctgagcctgagcgggaccctgtcatccagatctgctcgctgggcctgcgctggggggagccggagcccttcctacgcctggcgctcaccctgcggccctgtgcccccatcctgggtgccaaggtgcagagctacgagaaggaggaggacctgctgcaggcctggtccaccttcatccgtatcatggaccccgacgtgatcaccggttacaacatccagaacttcgaccttccgtacctcatctctcgggcccagaccctcaaggtacaaacattccctttcctgggccgtgtggccggcctttgctccaacatccgggactcttcattccagtccaagcagacgggccggcgggacaccaaggttgtcagcatggtgggccgcgtgcagatggacatgctgcaggtgctgctgcgggagtacaagctccgctcctacacgctcaatgccgtgagcttccacttcctgggcgagcagaaggaggacgtgcagcacagcatcatcaccgacctgcagaatgggaacgaccagacccgccgccgcctggctgtgtactgcctgaaggatgcctacctgccactgcggctgctggagcggctcatggtgctggtgaacgccgtggagatggcgagggtcactggcgtgcccctcagctacctgctcagtcgtggccagcaggtcaaggtcgtatcccagctgttgcggcaggccatgcacgaggggctgctgatgcccgtggtgaagtcagagggcggcgaggactacacgggagccactgtcatcgagcccctcaaagggtactacgacgtccccatcgccaccctggacttctcctcgctgtacccgtccatcatgatggcccacaacctgtgttacaccacgctccttcggcccgggactgcacagaaactgggcctgactgaggatcagttcatcaggacccccaccggggacgagtttgtgaagacctcagtgcggaaggggctgctgccccagatcctggagaacctgctcagtgcccggaagagggccaaggccgagctggccaaggagacagaccccctccggcgccaggtcctggatggacggcagctggcgctgaaggtgagcgccaactccgtatacggcttcactggcgcccaggtgggcaagttgccgtgcctggagatctcacagagcgtcacggggttcggacgtcagatgatcgagaaaaccaagcagctggtggagtctaagtacacagtggagaatggctacagcaccagtgccaaggtggtgtatggtgacactgactccgtcatgtgccgattcggcgtgtcctcggtggctgaggcgatggccctggggcgggaggccgcggactgggtgtcaggtcacttcccgtcgcccatccggctggagtttgagaaggtctacttcccatacctgcttatcagcaagaagcgctacgcgggcctgctcttctcctcccggcccgacgcccacgaccgcatggactgcaagggcctggaggccgtgcgcagggacaactgccccctcgtggccaacctggtcactgcctcactgcgccgcctgctcatcgaccgagaccctgagggcgcggtggctcacgcacaggacgtcatctcggacctgctgtgcaaccgcatcgatatctcccagctggtcatcaccaaggagctgacccgcgcggcctccgactatgccggcaagcaggcccacgtggagctggccgagaggatgaggaagcgggaccccgggagtgcgcccagcctgggcgaccgcgtcccctacgtgatcatcagtgccgccaagggtgtggccgcctacatgaagtcggaggacccgctgttcgtgctggagcacagcctgcccattgacacgcagtactacctggagcagcagctggccaagcccctcctgcgcatcttcgagcccatcctgggcgagggccgtgccgaggctgtgctactgcggggggaccacacgcgctgcaagacggtgctcacgggcaaggtgggcggcctcctggccttcgccaaacgccgcaactgctgcattggctgccgcacagtgctcagccaccagggagccgtgtgtgagttctgccagccccgggagtctgagctgtatcagaaggaggtatcccatctgaatgccctggaggagcgcttctcgcgcctctggacgcagtgccagcgctgccagggcagcctgcacgaggacgtcatctgcaccagccgggactgccccatcttctacatgcgcaagaaggtgcggaaggacctggaagaccaggagcagctcctgcggcgcttcggaccccctggacctgaggcctggtgaccttgcaagcatcccatggggcgggggcgggaccagggagaattaataaagttctggacttttgcta

SEQ ID NO: 299593 - DNA, 3359 bp, Homo sapiens
ggcggcgtaggctgtggcgggaaacgctgtttgaagcgggatggatggcaagcggcggccaggcccagggcccggggtgcccccaaagcgggcccgtgggggcctctgggatgatgatgatgcacctcggccatcccaattcgaggaggacctggcactgatggaggagatggaggcagaacacaggctgcaggagcaggaggaggaggagctgcagtcagtcctggagggggttgcagacgggcaggtcccaccatcagccatagatcctcgctggcttcggcccacaccaccagcgctggacccccagacagagcccctcatcttccaacagttggagattgaccattatgtgggcccagcgcagcctgtgcctggggggcccccaccatcccgcggctccgtgcctgtgctccgcgccttcggggtcaccgatgaggggttctctgtctgctgccacatccacggcttcgctccctacttctacaccccagcgccccctggtttcgggcccgagcacatgggtgacctgcaacgggagctgaacttggccatcagccgggacagtcgcggggggagggagctgactgggccggccgtgctggctgtggaactgtgctcccgagagagcatgtttgggtaccacgggcacggcccctccccgttcctgcgcatcaccgtggcgctgccgcgcctcgtggccccggcccgccgtctcctggaacagggcatccgtgtggcaggcctgggcacgcccagcttcgcgccctacgaggccaacgtcgactttgagatccggttcatggtggacacggacatcgtcggctgcaactggctggagctcccagctgggaaatacgccctgaggctgaaggagaaggctacgcagtgccagctggaggcggacgtgctgtggtctgacgtggtcagtcacccaccggaagggccatggcagcgcattgcgcccttgcgcgtgctcagcttcgatatcgagtgcgccggccgcaaaggcatcttccctgagcctgagcgggaccctgtcatccagatctgctcgctgggcctgcgctggggggagccggagcccttcctacgcctggcgctcaccctgcggccctgtgcccccatcctgggtgccaaggtgcagagctacgagaaggaggaggacctgctgcaggcctggtccaccttcatccgtatcatggaccccgacgtgatcaccggttacaacatccagaacttcgaccttccgtacctcatctctcgggcccagaccctcaaggtacaaacattccctttcctgggccgtgtggccggcctttgctccaacatccgggactcttcattccagtccaagcagacgggccggcgggacaccaaggttgtcagcatggtgggccgcgtgcagatggacatgctgcaggtgctgctgcgggagtacaagctccgctcctacacgctcaatgccgtgagcttccacttcctgggcgagcagaaggaggacgtgcagcacagcatcatcaccgacctgcagaatgggaacgaccagacccgccgccgcctggctgtgtactgcctgaaggatgcctacctgccactgcggctgctggagcggctcatggtgctggtgaacgccgtggagatggcgagggtcactggcgtgcccctcagctacctgctcagtcgtggccagcaggtcaaggtcgtatcccagctgttgcggcaggccatgcacgaggggctgctgatgcccgtggtgaagtcagagggcggcgaggactacacgggagccactgtcatcgagcccctcaaagggtactacgacgtccccatcgccaccctggacttctcctcgctgtacccgtccatcatgatggcccacaacctgtgttacaccacgctccttcggcccgggactgcacagaaactgggcctgactgaggatcagttcatcaggacccccaccggggacgagtttgtgaagacctcagtgcggaaggggctgctgccccagatcctggagaacctgctcagtgcccggaagagggccaaggccgagctggccaaggagacagaccccctccggcgccaggtcctggatggacggcagctggcgctgaagagcgtcacggggttcggacgtcagatgatcgagaaaaccaagcagctggtggagtctaagtacacagtggagaatggctacagcaccagtgccaaggtggtgtatggtgacactgactccgtcatgtgccgattcggcgtgtcctcggtggctgaggcgatggccctggggcgggaggccgcggactgggtgtcaggtcacttcccgtcgcccatccggctggagtttgagaaggtctacttcccatacctgcttatcagcaagaagcgctacgcgggcctgctcttctcctcccggcccgacgcccacgaccgcatggactgcaagggcctggaggccgtgcgcagggacaactgccccctcgtggccaacctggtcactgcctcactgcgccgcctgctcatcgaccgagaccctgagggcgcggtggctcacgcacaggacgtcatctcggacctgctgtgcaaccgcatcgatatctcccagctggtcatcaccaaggagctgacccgcgcggcctccgactatgccggcaagcaggcccacgtggagctggccgagaggatgaggaagcgggaccccgggagtgcgcccagcctgggcgaccgcgtcccctacgtgatcatcagtgccgccaagggtgtggccgcctacatgaagtcggaggacccgctgttcgtgctggagcacagcctgcccattgacacgcagtactacctggagcagcagctggccaagcccctcctgcgcatcttcgagcccatcctgggcgagggccgtgccgaggctgtgctactgcggggggaccacacgcgctgcaagacggtgctcacgggcaaggtgggcggcctcctggccttcgccaaacgccgcaactgctgcattggctgccgcacagtgctcagccaccagggagccgtgtgtgagttctgccagccccgggagtctgagctgtatcagaaggaggtatcccatctgaatgccctggaggagcgcttctcgcgcctctggacgcagtgccagcgctgccagggcagcctgcacgaggacgtcatctgcaccagccgggactgccccatcttctacatgcgcaagaaggtgcggaaggacctggaagaccaggagcagctcctgcggcgcttcggaccccctggacctgaggcctggtgaccttgcaagcatcccatggggcgggggcgggaccagggagaattaataaagttctggacttttgcta

SEQ ID NO: 299594 - DNA, 3495 bp, Homo sapiens
ggcggcgtaggctgtggcgggaaacgctgtttgaagcgggatggatggcaagcggcggccaggcccagggcccggggtgcccccaaagcgggcccgtgggggcctctgggatgatgatgatgcacctcggccatcccaattcgaggaggacctggcactgatggaggagatggaggcagaacacaggctgcaggagcaggaggaggaggagctgcagtcagtcctggagggggttgcagacgggcaggtcccaccatcagccatagatcctcgctggcttcggcccacaccaccagcgctggacccccagacagagcccctcatcttccaacagttggagattgaccattatgtgggcccagcgcagcctgtgcctggggggcccccaccatcccgcggctccgtgcctgtgctccgcgccttcggggtcaccgatgaggggttctctgtctgctgccacatccacggcttcgctccctacttctacaccccagcgccccctggtttcgggcccgagcacatgggtgacctgcaacgggagctgaacttggccatcagccgggacagtcgcggggggagggagctgactgggccggccgtgctggctgtggaactgtgctcccgagagagcatgtttgggtaccacgggcacggcccctccccgttcctgcgcatcaccgtggcgctgccgcgcctcgtggccccggcccgccgtctcctggaacagggcatccgtgtggcaggcctgggcacgcccagcttcgcgccctacgaggccaacgtcgactttgagatccggttcatggtggacacggacatcgtcggctgcaactggctggagctcccagctgggaaatacgccctgaggctgaaggagaaggctacgcagtgccagctggaggcggacgtgctgtggtctgacgtggtcagtcacccaccggaagggccatggcagcgcattgcgcccttgcgcgtgctcagcttcgatatcgagtgcgccggccgcaaaggcatcttccctgagcctgagcgggaccctgtcatccagatctgctcgctgggcctgcgctggggggagccggagcccttcctacgcctggcgctcaccctgcggccctgtgcccccatcctgggtgccaaggtgcagagctacgagaaggaggaggacctgctgcaggcctggtccaccttcatccgtatcatggaccccgacgtgatcaccggttacaacatccagaacttcgaccttccgtacctcatctctcgggcccagaccctcaaggtacaaacattccctttcctgggccgtgtggccggcctttgctccaacatccgggactcttcattccagtccaagcagacgggccggcgggacaccaaggttgtcagcatggtgggccgcgtgcagatggacatgctgcaggtgctgctgcgggagtacaagctccgctcctacacgctcaatgccgtgagcttccacttcctgggcgagcagaaggaggacgtgcagcacagcatcatcaccgacctgcagaatgggaacgaccagacccgccgccgcctggctgtgtactgcctgaaggatgcctacctgccactgcggctgctggagcggctcatggtgctggtgaacgccgtggagatggcgagggtcactggcgtgcccctcagctacctgctcagtcgtggccagcaggtcaaggtcgtatcccagctgttgcggcaggccatgcacgaggggctgctgatgcccgtggtgaagtcagagggcggcgaggactacacgggagccactgtcatcgagcccctcaaagggtactacgacgtccccatcgccaccctggacttctcctcgctgtacccgtccatcatgatggcccacaacctgtgttacaccacgctccttcggcccgggactgcacagaaactgggcctgactgaggatcagttcatcaggacccccaccggggacgagtttgtgaagacctcagtgcggaaggggctgctgccccagatcctggagaacctgctcagtgcccggaagagggccaaggccgagctggccaaggagacagaccccctccggcgccaggtcctggatggacggcagctggcgctgaaggtgagcgccaactccgtatacggcttcactggcgcccaggtgggcaagttgccgtgcctggagatctcacagagcgtcacggggttcggacgtcagatgatcgagaaaaccaagcagctggtggagtctaagtacacagtggagaatggctacagcaccagtgccaaggtggtgtatggtgacactgactccgtcatgtgccgattcggcgtgtcctcggtggctgaggcgatggccctggggcgggaggccgcggactgggtgtcaggtcacttcccgtcgcccatccggctggagtttgagaaggtctacttcccatacctgcttatcagcaagaagcgctacgcgggcctgctcttctcctcccggcccgacgcccacgaccgcatggactgcaagggcctggaggccgtgcgcagggacaactgccccctcgtggccaacctggtcactgcctcactgcgccgcctgctcatcgaccgagaccctgagggcgcggtggctcacgcacaggacgtcatctcggacctgctgtgcaaccgcatcgatatctcccagctggtcatcaccaaggagctgacccgcgcggcctccgactatgccggcaagcaggcccacgtggagctggccgagaggatgaggaagcgggaccccgggagtgcgcccagcctgggcgaccgcgtcccctacgtgatcatcagtgccgccaagggtgtggccgcctacatgaagtcggaggacccgctgttcgtgctggagcacagcctgcccattgacacgcagtactacctggagcagcagctggccaagcccctcctgcgcatcttcgagcccatcctgggcgagggccgtgccgaggctgtgctactgcggggggaccacacgcgctgcaagacggtgctcacgggcaaggtgggcggcctcctggccttcgccaaacgccgcaactgctgcattggctgccgcacagtgctcagccaccagggagccgtgtgtgagttctgccagccccgggagtctgagctgtatcagaaggaggtatcccatctgaatgccctggaggagcgcttctcgcgcctctggacgcagtgccagcgctgccagggcagcctgcacgaggacgtcatctgcaccagccgggactgccccatcttctacatgcgcaagaaggtgcggaaggacctggaagaccaggagcagctcctgcggcgcttcggaccccctggacctgaggcctggtgaccttgcaagcatcccatggggcgggggcgggaccagggagaattaataaagttctggacttttgctaaaaaaaaacacacctccaacacaaacaacaacaccaaaaataaccacacaccacactacaacgg

SEQ ID NO: 299595 - DNA, 3509 bp, Homo sapiens
ggcggcgtaggctgtggcgggaaacgctgtttgaagcgggatggatggcaagcggcggccaggcccagggcccggggtgcccccaaagcgggcccgtgggggcctctgggatgatgatgatgcacctcggccatcccaattcgaggaggacctggcactgatggaggagatggaggcagaacacaggctgcaggagcaggaggaggaggagctgcagtcagtcctggagggggttgcagacgggcaggtcccaccatcagccatagatcctcgctggcttcggcccacaccaccagcgctggacccccagacagagcccctcatcttccaacagttggagattgaccattatgtgggcccagcgcagcctgtgcctggggggcccccaccatcccgcggctccgtgcctgtgctccgcgccttcggggtcaccgatgaggggttctctgtctgctgccacatccacggcttcgctccctacttctacaccccagcgccccctggtttcgggcccgagcacatgggtgacctgcaacgggagctgaacttggccatcagccgggacagtcgcggggggagggagctgactgggccggccgtgctggctgtggaactgtgctcccgagagagcatgtttgggtaccacgggcacggcccctccccgttcctgcgcatcaccgtggcgctgccgcgcctcgtggccccggcccgccgtctcctggaacagggcatccgtgtggcaggcctgggcacgcccagcttcgcgccctacgaggccaacgtcgactttgagatccggttcatggtggacacggacatcgtcggctgcaactggctggagctcccagctgggaaatacgccctgaggctgaaggagaaggctacgcagtgccagctggaggcggacgtgctgtggtctgacgtggtcagtcacccaccggaagggccatggcagcgcattgcgcccttgcgcgtgctcagcttcgatatcgagtgcgccggccgcaaaggcatcttccctgagcctgagcgggaccctgtcatccagatctgctcgctgggcctgcgctggggggagccggagcccttcctacgcctggcgctcaccctgcggccctgtgcccccatcctgggtgccaaggtgcagagctacgagaaggaggaggacctgctgcaggcctggtccaccttcatccgtatcatggaccccgacgtgatcaccggttacaacatccagaacttcgaccttccgtacctcatctctcgggcccagaccctcaaggtacaaacattccctttcctgggccgtgtggccggcctttgctccaacatccgggactcttcattccagtccaagcagacgggccggcgggacaccaaggttgtcagcatggtgggccgcgtgcagatggacatgctgcaggtgctgctgcgggagtacaagctccgctcctacacgctcaatgccgtgagcttccacttcctgggcgagcagaaggaggacgtgcagcacagcatcatcaccgacctgcagaatgggaacgaccagacccgccgccgcctggctgtgtactgcctgaaggatgcctacctgccactgcggctgctggagcggctcatggtgctggtgaacgccgtggagatggcgagggtcactggcgtgcccctcagctacctgctcagtcgtggccagcaggtcaaggtcgtatcccagctgttgcggcaggccatgcacgaggggctgctgatgcccgtggtgaagtcagagggcggcgaggactacacgggagccactgtcatcgagcccctcaaaggggtgaggccacaagacagggcgggggcggcatgggaactcctagccctgactcccggccgcggctgctcccctcccaggtactacgacgtccccatcgccaccctggacttctcctcgctgtacccgtccatcatgatggcccacaacctgtgttacaccacgctccttcggcccgggactgcacagaaactgggcctgactgaggatcagttcatcaggacccccaccggggacgagtttgtgaagacctcagtgcggaaggggctgctgccccagatcctggagaacctgctcagtgcccggaagagggccaaggccgagctggccaaggagacagaccccctccggcgccaggtcctggatggacggcagctggcgctgaaggtgagcgccaactccgtatacggcttcactggcgcccaggtgggcaagttgccgtgcctggagatctcacagagcgtcacggggttcggacgtcagatgatcgagaaaaccaagcagctggtggagtctaagtacacagtggagaatggctacagcaccagtgccaaggtggtgtatggtgacactgactccgtcatgtgccgattcggcgtgtcctcggtggctgaggcgatggccctggggcgggaggccgcggactgggtgtcaggtcacttcccgtcgcccatccggctggagtttgagaaggtctacttcccatacctgcttatcagcaagaagcgctacgcgggcctgctcttctcctcccggcccgacgcccacgaccgcatggactgcaagggcctggaggccgtgcgcagggacaactgccccctcgtggccaacctggtcactgcctcactgcgccgcctgctcatcgaccgagaccctgagggcgcggtggctcacgcacaggacgtcatctcggacctgctgtgcaaccgcatcgatatctcccagctggtcatcaccaaggagctgacccgcgcggcctccgactatgccggcaagcaggcccacgtggagctggccgagaggatgaggaagcgggaccccgggagtgcgcccagcctgggcgaccgcgtcccctacgtgatcatcagtgccgccaagggtgtggccgcctacatgaagtcggaggacccgctgttcgtgctggagcacagcctgcccattgacacgcagtactacctggagcagcagctggccaagcccctcctgcgcatcttcgagcccatcctgggcgagggccgtgccgaggctgtgctactgcggggggaccacacgcgctgcaagacggtgctcacgggcaaggtgggcggcctcctggccttcgccaaacgccgcaactgctgcattggctgccgcacagtgctcagccaccagggagccgtgtgtgagttctgccagccccgggagtctgagctgtatcagaaggaggtatcccatctgaatgccctggaggagcgcttctcgcgcctctggacgcagtgccagcgctgccagggcagcctgcacgaggacgtcatctgcaccagccgggactgccccatcttctacatgcgcaagaaggtgcggaaggacctggaagaccaggagcagctcctgcggcgcttcggaccccctggacctgaggcctggtgaccttgcaagcatcccatggggcgggggcgggaccagggagaattaataaagttctggacttttgcta

SEQ ID NO: 299596 - DNA, 3604 bp, Homo sapiens
  misc_feature (3433)..(3433): n is a, c, g, or t
ggcggcgtaggctgtggcgggaaacgctgtttgaagcgggatggatggcaagcggcggccaggcccagggcccggggtgcccccaaagcgggcccgtgggggcctctgggatgatgatgatgcacctcggccatcccaattcgaggaggacctggcactgatggaggagatggaggcagaacacaggctgcaggagcaggaggaggaggagctgcagtcagtcctggagggggttgcagacgggcaggtcccaccatcagccatagatcctcgctggcttcggcccacaccaccagcgctggacccccagacagagcccctcatcttccaacagttggagattgaccattatgtgggcccagcgcagcctgtgcctggggggcccccaccatcccgcggctccgtgcctgtgctccgcgccttcggggtcaccgatgaggggttctctgtctgctgccacatccacggcttcgctccctacttctacaccccagcgccccctggtttcgggcccgagcacatgggtgacctgcaacgggagctgaacttggccatcagccgggacagtcgcggggggagggagctgactgggccggccgtgctggctgtggaactgtgctcccgagagagcatgtttgggtaccacgggcacggcccctccccgttcctgcgcatcaccgtggcgctgccgcgcctcgtggccccggcccgccgtctcctggaacagggcatccgtgtggcaggcctgggcacgcccagcttcgcgccctacgaggccaacgtcgactttgagatccggttcatggtggacacggacatcgtcggctgcaactggctggagctcccagctgggaaatacgccctgaggctgaaggagaaggctacgcagtgccagctggaggcggacgtgctgtggtctgacgtggtcagtcacccaccggaagggccatggcagcgcattgcgcccttgcgcgtgctcagcttcgatatcgagtgcgccggccgcaaaggcatcttccctgagcctgagcgggaccctgtcatccagatctgctcgctgggcctgcgctggggggagccggagcccttcctacgcctggcgctcaccctgcggccctgtgcccccatcctgggtgccaaggtgcagagctacgagaaggaggaggacctgctgcaggcctggtccaccttcatccgtatcatggaccccgacgtgatcaccggttacaacatccagaacttcgaccttccgtacctcatctctcgggcccagaccctcaaggtacaaacattccctttcctgggccgtgtggccggcctttgctccaacatccgggactcttcattccagtccaagcagacgggccggcgggacaccaaggttgtcagcatggtgggccgcgtgcagatggacatgctgcaggtgctgctgcgggagtacaagctccgctcctacacgctcaatgccgtgagcttccacttcctgggcgagcagaaggaggacgtgcagcacagcatcatcaccgacctgcagaatgggaacgaccagacccgccgccgcctggctgtgtactgcctgaaggatgcctacctgccactgcggctgctggagcggctcatggtgctggtgaacgccgtggagatggcgagggtcactggcgtgcccctcagctacctgctcagtcgtggccagcaggtcaaggtcgtatcccagctgttgcggcaggccatgcacgaggggctgctgatgcccgtggtgaagtcagagggcggcgaggactacacgggagccactgtcatcgagcccctcaaagggtactacgacgtccccatcgccaccctggacttctcctcgctgtacccgtccatcatgatggcccacaacctgtgttacaccacgctccttcggcccgggactgcacagaaactgggcctgactgaggatcagttcatcaggacccccaccggggacgagtttgtgaagacctcagtgcggaaggggctgctgccccagatcctggagaacctgctcagtgcccggaagagggccaaggccgagctggccaaggagacagaccccctccggcgccaggtcctggatggacggcagctggcgctgaaggtgagcgccaactccgtatacggcttcactggcgcccaggtgggcaagttgccgtgcctggagatctcacagagcgtcacggggttcggacgtcagatgatcgagaaaaccaagcagctggtggagtctaagtacacagtggagaatggctacagcaccagtgccaaggtggtgtatggtgacactgactccgtcatgtgccgattcggcgtgtcctcggtggctgaggcgatggccctggggcgggaggccgcggactgggtgtcaggtcacttcccgtcgcccatccggctggagtttgagaaggtctacttcccatacctgcttatcagcaagaagcgctacgcgggcctgctcttctcctcccggcccgacgcccacgaccgcatggactgcaagggcctggaggccgtgcgcagggacaactgccccctcgtggccaacctggtcactgcctcactgcgccgcctgctcatcgaccgagaccctgagggcgcggtggctcacgcacaggacgtcatctcggacctgctgtgcaaccgcatcgatatctcccagctggtcatcaccaaggagctgacccgcgcggcctccgactatgccggcaagcaggcccacgtggagctggccgagaggatgaggaagcgggaccccgggagtgcgcccagcctgggcgaccgcgtcccctacgtgatcatcagtgccgccaagggtgtggccgcctacatgaagtcggaggacccgctgttcgtgctggagcacagcctgcccattgacacgcagtactacctggagcagcagctggccaagcccctcctgcgcatcttcgagcccatcctgggcgagggccgtgccgaggctgtgctactgcggggggaccacacgcgctgcaagacggtgctcacgggcaaggtgggcggcctcctggccttcgccaaacgccgcaactgctgcattggctgccgcacagtgctcagccaccagggagccgtgtgtgagttctgccagccccgggagtctgagctgtatcagaaggaggtatcccatctgaatgccctggaggagcgcttctcgcgcctctggacgcagtgccagcgctgccagggcagcctgcacgaggacgtcatctgcaccagccgggactgccccatcttctacatgcgcaagaaggtgcggaaggacctggaagaccaggagcagctcctgcggcgcttcggaccccctggacctgaggcctggtgaccttgcaagcatcccatggggcgggggcgggaccagggagaattaataaagttctggacttttgctatnacacacacaacccaaaacccgaggggccccaatgccggcacgcggcgcaaagcccgctacggactgcgcccaggggccaaacctggtttccggacccaagttactgtggccacggtgggcacaattggccggccccctaatgggggcccaatacatccgaaaccaggtacg

SEQ ID NO: 299597 - DNA, 4003 bp, Homo sapiens
ggcggcgtaggctgtggcgggaaacgctgtttgaagcgggatggatggcaagcggcggccaggcccagggcccggggtgcccccaaagcgggcccgtgggggcctctgggatgatgatgatgcacctcggccatcccaattcgaggaggacctggcactgatggaggagatggaggcagaacacaggctgcaggagcaggaggaggaggagctgcagtcagtcctggagggggttgcagacgggcaggtcccaccatcagccatagatcctcgctggcttcggcccacaccaccagcgctggacccccagacagagcccctcatcttccaacagttggagattgaccattatgtgggcccagcgcagcctgtgcctggggggcccccaccatcccgcggctccgtgcctgtgctccgcgccttcggggtcaccgatgaggggttctctgtctgctgccacatccacggcttcgctccctacttctacaccccagcgccccctggtttcgggcccgagcacatgggtgacctgcaacgggagctgaacttggccatcagccgggacagtcgcggggggagggagctgactgggccggccgtgctggctgtggaactgtgctcccgagagagcatgtttgggtaccacgggcacggcccctccccgttcctgcgcatcaccgtggcgctgccgcgcctcgtggccccggcccgccgtctcctggaacagggcatccgtgtggcaggcctgggcacgcccagcttcgcgccctacgaggccaacgtcgactttgagatccggttcatggtggacacggacatcgtcggctgcaactggctggagctcccagctgggaaatacgccctgaggctgaaggagaaggctacgcagtgccagctggaggcggacgtgctgtggtctgacgtggtcagtcacccaccggaagggccatggcagcgcattgcgcccttgcgcgtgctcagcttcgatatcgagtgcgccggccgcaaaggcatcttccctgagcctgagcgggaccctgtcatccagatctgctcgctgggcctgcgctggggggagccggagcccttcctacgcctggcgctcaccctgcggccctgtgcccccatcctgggtgccaaggtgcagagctacgagaaggaggaggacctgctgcaggcctggtccaccttcatccgtatcatggaccccgacgtgatcaccggttacaacatccagaacttcgaccttccgtacctcatctctcgggcccagaccctcaaggtacaaacattccctttcctgggccgtgtggccggcctttgctccaacatccgggactcttcattccagtccaagcagacgggccggcgggacaccaaggttgtcagcatggtgggccgcgtgcagatggacatgctgcaggtgctgctgcgggagtacaagctccgctcctacacgctcaatgccgtgagcttccacttcctgggcgagcagaaggaggacgtgcagcacagcatcatcaccgacctgcagaatgggaacgaccagacccgccgccgcctggctgtgtactgcctgaaggatgcctacctgccactgcggctgctggagcggctcatggtgctggtgaacgccgtggagatggcgagggtcactggcgtgcccctcagctacctgctcagtcgtggccagcaggtcaaggtcgtatcccagctgttgcggcaggccatgcacgaggggctgctgatgcccgtggtgaagtcagagggcggcgaggactacacgggagccactgtcatcgagcccctcaaagggtactacgacgtccccatcgccaccctggacttctcctcgctgtacccgtccatcatgatggcccacaacctgtgttacaccacgctccttcggcccgggactgcacagaaactgggcctgactgaggatcagttcatcaggacccccaccggggacgagtttgtgaagacctcagtgcggaaggggctgctgccccagatcctggagaacctgctcagtgcccggaagagggccaaggccgagctggccaaggagacagaccccctccggcgccaggtcctggatggacggcagctggcgctgaaggtgagcgccaactccgtatacggcttcactggcgcccaggtgggcaagttgccgtgcctggagatctcacagagcgtcacggggttcggacgtcagatgatcgagaaaaccaagcagctggtggagtctaagtacacagtggagaatggctacagcaccagtgccaaggtggtgtatggtgacactgactccgtcatgtgccgattcggcgtgtcctcggtggctgaggcgatggccctggggcgggaggccgcggactgggtgtcaggtcacttcccgtcgcccatccggctggagtttgagaaggtctacttcccatacctgcttatcagcaagaagcgctacgcgggcctgctcttctcctcccggcccgacgcccacgaccgcatggactgcaagggcctggaggccgtgcgcagggacaactgccccctcgtggccaacctggtcactgcctcactgcgccgcctgctcatcgaccgagaccctgagggcgcggtggctcacgcacaggacgtcatctcggacctgctgtgcaaccgcatcgatatctcccagctggtcatcaccaaggagctgacccgcgcggcctccgactatgccggcaagcaggcccacgtggagctggccgagaggatgaggaagcgggaccccgggagtgcgcccagcctgggcgaccgcgtcccctacgtgatcatcagtgccgccaagggtgtggccgcctacatgaagtcggaggacccgctgttcgtgctggagcacagcctgcccattgacacgcagtactacctggagcagcagctggccaagcccctcctgcgcatcttcgagcccatcctgggcgagggccgtgccgaggctgtgctactgcggggggaccacacgcgctgcaagacggtgctcacgggcaaggtgggcggcctcctggccttcgccaaacgccgcaactgctgcattggctgccgcacagtgctcagccaccagggagccgtgtgtgagttctgccagccccgggagtctgagctgtatcagaaggaggtatcccatctgaatgccctggaggagcgcttctcgcgcctctggacgcagtgccagcgctgccagggcagcctgcacgaggacgtcatctgcaccagccgggactgccccatcttctacatgcgcaagaaggtgcggaaggacctggaagaccaggagcagctcctgcggcgcttcggaccccctggacctgaggcctggtgaccttgcaagcatcccatggggcgggggcgggaccagggagaattaataaagttctggacttttgctaaaagataaaactcaaagaaccaaaagagcaagaagacagaagacagccaagaaaaagcaaacgaggaacgggacatccgcggggggggcgagaaccaagagggaacagacacaagcgcggccccggggcccagctttcctcgcaagacccccctttgatgcaccaagggggcgggccctgcggggcgagcccccaaataggacgggcagcctcatatccttgcccacagaatacacaccgcggggggtggccccccggggaatttcaaggaaaagcgggaggaaacggttgcgcaccacgagatcagcgcactgacgcgtaggtagacgatgaacagcaggtacaggggaggccacagcaactcacctgttctcacagacaacaacgcagcgtgggcagccgatgaacacgcgcacatcacagagtaatccaggtcagcctcattaccgaacatcagtcccgcgcggtccccgagcaggcaggagccctatcgtacccttagaaccagaaccacgatttattgacctagcttgccccagtacgctaccgccaatgttgcaacctgcagtacc

SEQ ID NO: 299598 - DNA, 2188 bp, Homo sapiens
ggcggcgtaggctgtggcgggaaacgctgtttgaagcgggtacaaacattccctttcctgggccgtgtggccggcctttgctccaacatccgggactcttcattccagtccaagcagacgggccggcgggacaccaaggttgtcagcatggtgggccgcgtgcagatggacatgctgcaggtgctgctgcgggagtacaagctccgctcctacacgctcaatgccgtgagcttccacttcctgggcgagcagaaggaggacgtgcagcacagcatcatcaccgacctgcagaatgggaacgaccagacccgccgccgcctggctgtgtactgcctgaaggatgcctacctgccactgcggctgctggagcggctcatggtgctggtgaacgccgtggagatggcgagggtcactggcgtgcccctcagctacctgctcagtcgtggccagcaggtcaaggtcgtatcccagctgttgcggcaggccatgcacgaggggctgctgatgcccgtggtgaagtcagagggcggcgaggactacacgggagccactgtcatcgagcccctcaaagggtactacgacgtccccatcgccaccctggacttctcctcgctgtacccgtccatcatgatggcccacaacctgtgttacaccacgctccttcggcccgggactgcacagaaactgggcctgactgaggatcagttcatcaggacccccaccggggacgagtttgtgaagacctcagtgcggaaggggctgctgccccagatcctggagaacctgctcagtgcccggaagagggccaaggccgagctggccaaggagacagaccccctccggcgccaggtcctggatggacggcagctggcgctgaaggtgagcgccaactccgtatacggcttcactggcgcccaggtgggcaagttgccgtgcctggagatctcacagagcgtcacggggttcggacgtcagatgatcgagaaaaccaagcagctggtggagtctaagtacacagtggagaatggctacagcaccagtgccaaggtggtgtatggtgacactgactccgtcatgtgccgattcggcgtgtcctcggtggctgaggcgatggccctggggcgggaggccgcggactgggtgtcaggtcacttcccgtcgcccatccggctggagtttgagaaggtctacttcccatacctgcttatcagcaagaagcgctacgcgggcctgctcttctcctcccggcccgacgcccacgaccgcatggactgcaagggcctggaggccgtgcgcagggacaactgccccctcgtggccaacctggtcactgcctcactgcgccgcctgctcatcgaccgagaccctgagggcgcggtggctcacgcacaggacgtcatctcggacctgctgtgcaaccgcatcgatatctcccagctggtcatcaccaaggagctgacccgcgcggcctccgactatgccggcaagcaggcccacgtggagctggccgagaggatgaggaagcgggaccccgggagtgcgcccagcctgggcgaccgcgtcccctacgtgatcatcagtgccgccaagggtgtggccgcctacatgaagtcggaggacccgctgttcgtgctggagcacagcctgcccattgacacgcagtactacctggagcagcagctggccaagcccctcctgcgcatcttcgagcccatcctgggcgagggccgtgccgaggctgtgctactgcggggggaccacacgcgctgcaagacggtgctcacgggcaaggtgggcggcctcctggccttcgccaaacgccgcaactgctgcattggctgccgcacagtgctcagccaccagggagccgtgtgtgagttctgccagccccgggagtctgagctgtatcagaaggaggtatcccatctgaatgccctggaggagcgcttctcgcgcctctggacgcagtgccagcgctgccagggcagcctgcacgaggacgtcatctgcaccagccgggactgccccatcttctacatgcgcaagaaggtgcggaaggacctggaagaccaggagcagctcctgcggcgcttcggaccccctggacctgaggcctggtgaccttgcaagcatcccatggggcgggggcgggaccagggagaattaataaagttctggacttttgcta

SEQ ID NO: 299599 - DNA, 412 bp, Homo sapiens
cacgccaggtgacaggtgatatacggccagccatggccctgcacctcgccaggcacccgctgttatcggctccccccccccaccccccccgtgcctgctgagcaaacagcccgctgcgggagggggcgggtgggctgggcagcaggcggggaccaaagtcctgggaacagcccccacccctctcccaggctgggcactgggccttggctggtcctgaccctgcccctgcccccacccgcagccgggactgccccatcttctacatgcgcaagaaggtgcggaaggacctggaagaccaggagcagctcctgcggcgcttcggaccccctggacctgaggcctggtgaccttgcaagcatcccatggggcgggggcgggaccagggagaattaataaagttctggacttttgc

SEQ ID NO: 299600 - DNA, 7829 bp, Homo sapiens
  misc_feature (2440)..(2440): n is a, c, g, or t
gccaggggcacagtcctttcttactgtgaaactttactagaacccgaatgttcttcaagggttgctggcaggcctcagtgtaaacaaatagaccagtcatcatcagaccagaccaggaatgagggtgaagcaccgggatttcatgtggcatctctatctgctgaagcagggcagatagatctgttacctgatgagaggaaagtccaggccacatctctgtctgcagacagctttgaatctctgcccaatacggaaactgacagagagccatgggatcctgtgcaggctttctcccatgctgctcctgctcaagacaggaaacgtcgtactggagaactgaggcagttcgcgggagcaagtgaaccatttatatgtcactctagttcttctgaaatcatagagaaaaagaaagatgcaaccagaacaccttcctcagctgatcctttggccccagacagtcctcgttcttcagcacctgtggaggaggtcaggagggtagtatcaaagaaggtagtggctgccttaccttctcaggccccttatgatgatcctagagtgactctgcatgagctaagtcagtcagttccgcaggagactgcagagggcataccccctggcagtcaggacagcagcccagagcatcaggaacccagaactctagacaccacatatggagaagtttcagataatttgttagtgactgcacagggagaaaaaacagcccattttgaaagtcagtctgtgacctgtgatgttcagaattctacaagtgcctcagggcctaagcaagaccatgtccaatgccctgaggcttctactggctttgaagaaggtagggcaagtcccaaacaagataccattctgcctggagctctgacaagggttgcactggaagctcccacacagcagtgtgtgcagtgtaaggagagtgttgggtctgggttgacagaagtctgcagggctggcagcaaacattccaggccaattccactgccagatcaaagaccaagcgcaaatcctgggggaattggggaggaagccccatgtagacacccaagggaagctttagatggccctgtcttctcaaggaaccctgaaggcagcaggactctcagcccgtctagagggaaagagagcagaactcttccttgccgacagccatgcagttctcaacctgttgctactcatgcttattcctcccattcctctactttactgtgttttagagatggtgacctagggaaggagcctttcaaggctgccccacatactatccacccaccctgtgtagtaccttccagggcctatgaaatggatgagacaggagagatctctaggggacctgatgtgcacttgacacatggccttgagcccaaagatgttaacagggaatttaggctaacagagagcagcacttgtgagccttctactgtggctgctgtcctatctcgagctcaaggctgcagatccccttctgctcctgacgtgaggacaggttccttcagccactcagctactgatggaagcgtggggttaataggggttcctgagaaaaaggttgctgagaagcaagcaagcacagaacttgaggctgcctctttccctgcaggcatgtactctgagcccctgaggcagtttagggacagctctgtaggtgaccagaatgcacaggtgtgtcaaaccaatccagaaccacctgcaacaactcagggaccacacaccctggatttaagtgaagggtctgctgagagcaagttggtggtagagccacagcatgaatgtttagaaaataccactagatgttttttggaaaagccacaattttccactgagttgagggatcacaatcgcttggattcccaagccaagtttgtagcaaggttaaaacatacctgcagcccccaggaagacagtccctggcaggaagaagagcagcacagagaccaggcttcaggtggtggagaaggcttcgcccagggtgtgaatccccttcctgatgaagatggcttagatggctgtcagattttagatgctgggagagaggaggtggctgtggccaagcctcctgtgtccaagattttatcacagggcttcaaagacccagccactgtgtccttgaggcaaaatgaaacaccgcagcctgctgctcagaggagtggccacctctacactggcagagagcagccagcacccaaccacaggggctcacttcctgtgactacaatcttctctggccccaaacactccaggtcctcccccacaccacagttctcagttgtcggctcttctcgttctcttcaggagctgaacttgagtgtggagcctccttcccctacagacgaagatacacaggggcctaacagattgtggaacccacatctcaggggctattcctcaggaaagtcagtggcaagaacatctctgcaggctgaggacagcnatcagaaagcctcatctcgcttggatgatgggactaccgatcacaggcacctgaagcctgccacccctccttatccaatgccttccactctctcacacatgccaacccctgatttcacgaccagctggatgtctggtactttggaacaagcccaacagggaaagcgagagaaactgggtgtccaggttaggccagaaaattggtgctctcagatggacaaaggaatgctgcactttggctccagtgacatcagtccctatgcgctgccgtggcgtccggaggagcctgcacgtatcagctggaagcagtatatgtctggcagtgcagtcgatgtttcctgcagccagaagccccaggggctgacactatcaaatgtggcccggtgctccagcatggacaatggcctagaagaccagaactcccctttccactcccacctcagcacttacgccaatatttgtgatctgtcaaccacacacagcagcactgagaatgcccagggttcaaatgaggcctgggaagtattccgagggagttcttcaattgccttaggagacccccacatcccgacgagccctgaaggagtagcccccacttcgggtcatgacagaaggcctcagttcaggggcccttctggtgaagcagactgtctgaggagtaagccccccttggccaaaggaagtgctgcaggtccagtggatgagattatgctgctgtatccatcagaggcaggctgccctgtgggacagaccaggacgaacacattcgaacagggcacacagaccctcggcagcaggcgccactggagcagcactgacatctcctttgctcagcctgaagccagtgcagtatcagcctttgatctggcctcatggaccagcatgcacaatctgtctctccacctctcacagctcctgcacagtacctcagagctgcttgggagtctctcccagccagatgtggccagaagggagcagaacaccaagagggacatcccagataaagccccacaggccctgatgatggatggctctactcagaccactgtggatgagggcagccagactgacctcaccttacccaccctgtgcctccagacttcagaggctgaacctcagggagccaatgtgatccttgaagggctaggctcagatacctcgactgtgtctcaagaagagggagatgtgccaggggtacctcagaagagagaggcagaggaaacagcacagaaaatggctcagctcctctatcttcaggaagaaagcactccctacaagccccagagcccttcaataccctcatcccacttgaggtttcagaaagcccccgttgggcagcatcttccttctgtgagcccctcagtttctgatgctttcctgcctcccagctcccagccagaggagtcatattgcttagttgtcagcagtcccagtcccagctcccctcattccccagggctctttcccagtacttccgagtatcctggggactccagggtccagaagaagctgggccccacaagtgctttgttcgtggacagggcctcctccccaatcctcactcttagtgccagcacccaagagccgggtctttccccaggctctttgaccctctcagccccttcaactcaccctgttgaaggccaccagaagcttgactccagcccagaccctgttgatgccccaaggactccaatggataattattcccaaaccactgacgagttaggtggctcccagagaggtagaagttccttacaaaggagtaatgggagatccttccttgagttgcactccccacacagcccacagcagagtccaaaactccaatttagtttcttagggcagcaccctcagcagcttcagcccaggacaactatcggggtccaaagcagactgctgccaccaccactgaggcacaggagccaaaggctgggcaacagctttgtgcctgagaaggtggcttccccggagcattgcccactgagcggtagggagccaagtcagtggcagagcaggacagaaaatggaggtgagagttcagcatctccaggggaaccacaacgcactctggaccgaccttcttcatggggaggcctccagcacctcagcccctgccctgtctctgagttgactgatactgcagggctccgaggttctgccttgggcctccctcaggcctgccaacctgaggagttactgtgcttcagttgccagatgtgcatggcccctgagcaccagcaccacagtctgagggacctcccggtgcataacaaatttagtaactggtgtggggttcagaagggctcacctggggggttggacatgactgaggaggagctgggggccagcggtgatctcagctctgaaaagcaggaacagagtcccccacaacctcctaatgaccacagccaggattctgagtggtccaagagggagcagatccccctgcaagttggggcccagaacctctcactcagcgtggaactcacagaagcgaaactgcaccatggctttggggaggccgatgccctgctccaggtgctgcagagtgggacaggggaggcgcttgctgctgatgaacctgtgacatccacctggaaggagctctatgcacggcaaaaaaaggccattgagaccctcaggagagagcgggctgagcgacttgggaacttctgccggacgcgaagccttagccctcagaaacaactgagcctcctgcccaacaaagatctcttcatctgggatcttgacttgcccagcagacgccgagaatacctgcagcaactgaggaaggatgttgtggagaccaccaggagcccagagtcagtgtcaaggtcagctcacacaccctctgacatagagttgatgctgcaagactaccagcaggcccatgaggaggccaaggtggagattgcccgggcccgagaccaactgcgggagcggactgaacaagagaagctgagaatccaccagaagatcatttcccagctattgaaggaagaggataaactacataccttggccaattccagctccctgtgcaccagctctaatggaagcctctcgtctggcatgacctctggctataatagcagcccagccttgtcaggccagctccagttcccagagaatatggggcatacaaacttgcctgattccagggatgtatggataggggatgagcgaggaggccattctgcagtgaggaagaactctgcctacagccacagagcctccctgggcagttgctgctgttcaccatccagtctgtccagcttggggacctgcttttcctcctcctaccaggatttggccaagcatgtcgtggacacttctatggctgatgtaatggctgcttgttcggataatttgcacaacctcttcagctgccaggcaactgctggctggaactatcagggtgaggagcaggcggtgcagctttactacaaggtgttttctcccactcggcatggcttcctgggggcaggtgtggtgtcccagccgctgtctcgtgtgtgggcggctgtcagtgaccccactgtgtggcccctgtattacaagcccatccagacagcaaggctgcatcagcgagtgaccaacagcatcagcctggtgtacttggtgtgcaacaccaccctgtgcgcactgaagcagccacgggatttctgttgtgtctgcgtggaagccaaagagggtcacctgtctgtcatggcagcccagtctgtgtatgatacatccatgccaagacccagcagaaaaatggttcgcggggagatcctgcccagtgcctggatcttgcagcccatcactgtggaagggaaggaagtcaccagagtcatctacttggcccaggtggaacttggtgctccaggcttcccacctcagctcctgagctctttcatcaaacggcagccactggttatagccagactggcttccttccttggtaggtagcatctcaccgtcaagatggtgctgctgagatgcaggcccaggctgctcaagagagacactgtggcagctccttgttactttccataccacagtgcaggaaaagctgatgctacctgctgtggccgattggggcagacagcactggcccagggatgctagcaaagcccagtcagtacttggtcacagctggcaccagtgcagagcaaacggcctgagctcctggcccagactatccagagtgaatgcagctccgctcaccttttggatttctcacctttctttcctgtttctgggactctgcggcagacaggacacttaaggaccaggactgggcacagccagcagagccggggactgcagtgctttggcaaggtgcttccgcaggctggtagggaagcaggcagccactggccaagactctgctctgaatctacctcctctagcattcagctctactgtgtgatgggacgttaaaaataccaaaacagaaagagggtttaaaaaacagctgcacaaaccagaacaccgattcagaatcttttctccctcttgagtttttgcaaaatactttattattgatttttgctttttttctccctttccctcccaggagaagacatttgggtcttggcctgaggcaggggtgttgagcgatgatgctctgatatggagctgtcactctagagctcggtcagatggaagacactatagaaccaggttggacagatttggggtcagggttggaggctgagttcttttgaggactggttggagtggcagccagatggtggctgctgacaaggcaagaggaatttcagagattaaacattgtcctttgaggaagggagaggaggtgaatgaactcccagaggaggtgagtggcttgttgggaggaagctcagttccagaacttacctcagtgcacttgggaggggtggagtcctgagcattccatgatttctgccctggccccacctatcctaggatggggtgggatggagagtgggttcagttttcttgtactttagcctggctgaacatgaactttgtgtttacctggaagtggtaggggtgggagagattctcatctttagttctggtgcccaaaatctttggtagatggagggaactggggattcagaagatgtggtaaaggtctatttctgtagtgtggcagagatgtgtttttctaaagtgtttgcagggcatttttccctcttacctcagattaagttatttatatattgttgattgaaggttttttaaaattgcttttaaacttctatttctcgggtaaattttttggtgacatgatatatttaacaccctatttatatactcctacctcttttcatataaatctcttactaagactactgaccaaaaaagaacattttaaaattaaaagtcctctgtgtactttatctagtgaa

SEQ ID NO: 299601 - DNA, 3042 bp, Homo sapiens
acttagaggatcgtgatgtcatcccccttcgtagagtcccccacaacctcctaatgaccacagccaggattctgagtggtccaagagggagcagatccccctgcaagttggggcccagaacctctcactcagcgtggaactcacagaagcgaaactgcaccatggctttggggaggccgatgccctgctccaggtgctgcagagtgggacaggggaggcgcttgctgctgatgaacctgtgacatccacctggaaggagctctatgcacggcaaaaaaaggccattgagaccctcaggagagagcgggctgagcgacttgggaacttctgccggacgcgaagccttagccctcagaaacaactgagcctcctgcccaacaaagatctcttcatctgggatcttgacttgcccagcagacgccgagaatacctgcagcaactgaggaaggatgttgtggagaccaccaggagcccagagtcagtgtcaaggtcagctcacacaccctctgacatagagttgatgctgcaagactaccagcaggcccatgaggaggccaaggtggagattgcccgggcccgagaccaactgcgggagcggactgaacaagagaagctgagaatccaccagaagatcatttcccagctattgaaggaagaggataaactacataccttggccaattccagctccctgtgcaccagctctaatggaagcctctcgtctggcatgacctctggctataatagcagcccagccttgtcaggccagctccagttcccagagaatatggggcatacaaacttgcctgattccagggatgtatggataggggatgagcgaggaggccattctgcagtgaggaagaactctgcctacagccacagagcctccctgggcagttgctgctgttcaccatccagtctgtccagcttggggacctgcttttcctcctcctaccaggatttggccaagcatgtcgtggacacttctatggctgatgtaatggctgcttgttcggataatttgcacaacctcttcagctgccaggcaactgctggctggaactatcagggtgaggagcaggcggtgcagctttactacaaggtgttttctcccactcggcatggcttcctgggggcaggtgtggtgtcccagccgctgtctcgtgtgtgggcggctgtcagtgaccccactgtgtggcccctgtattacaagcccatccagacagcaaggctgcatcagcgagtgaccaacagcatcagcctggtgtacttggtgtgcaacaccaccctgtgcgcactgaagcagccacgggatttctgttgtgtctgcgtggaagccaaagagggtcacctgtctgtcatggcagcccagtctgtgtatgatacatccatgccaagacccagcagaaaaatggttcgcggggagatcctgcccagtgcctggatcttgcagcccatcactgtggaagggaaggaagtcaccagagtcatctacttggcccaggtggaacttggtgctccaggcttcccacctcagctcctgagctctttcatcaaacggcagccactggttatagccagactggcttccttccttggtaggtagcatctcaccgtcaagatggtgctgctgagatgcaggcccaggctgctcaagagagacactgtggcagctccttgttactttccataccacagtgcaggaaaagctgatgctacctgctgtggccgattggggcagacagcactggcccagggatgctagcaaagcccagtcagtacttggtcacagctggcaccagtgcagagcaaacggcctgagctcctggcccagactatccagagtgaatgcagctccgctcaccttttggatttctcacctttctttcctgtttctgggactctgcggcagacaggacacttaaggaccaggactgggcacagccagcagagccggggactgcagtgctttggcaaggtgcttccgcaggctggtagggaagcaggcagccactggccaagactctgctctgaatctacctcctctagcattcagctctactgtgtgatgggacgttaaaaataccaaaacagaaagagggtttaaaaaacagctgcacaaaccagaacaccgattcagaatcttttctccctcttgagtttttgcaaaatactttattattgatttttgctttttttctccctttccctcccaggagaagacatttgggtcttggcctgaggcaggggtgttgagcgatgatgctctgatatggagctgtcactctagagctcggtcagatggaagacactatagaaccaggttggacagatttggggtcagggttggaggctgagttcttttgaggactggttggagtggcagccagatggtggctgctgacaaggcaagaggaatttcagagattaaacattgtcctttgaggaagggagaggaggtgaatgaactcccagaggaggtgagtggcttgttgggaggaagctcagttccagaacttacctcagtgcacttgggaggggtggagtcctgagcattccatgatttctgccctggccccacctatcctaggatggggtgggatggagagtgggttcagttttcttgtactttagcctggctgaacatgaactttgtgtttacctggaagtggtaggggtgggagagattctcatctttagttctggtgcccaaaatctttggtagatggagggaactggggattcagaagatgtggtaaaggtctatttctgtagtgtggcagagatgtgtttttctaaagtgtttgcagggcatttttccctcttacctcagattaagttatttatatattgttgattgaaggttttttaaaattgcttttaaacttctatttctcgggtaaattttttggtgacatgatatatttaacaccctatttatatactcctacctcttttcatataaatctcttactaagactactgaccaaaaaagaacattttaaaattaaaagtcctctgtgtactttatctagtgaa

SEQ ID NO: 299602 - DNA, 7900 bp, Homo sapiens
  misc_feature (2440)..(2440): n is a, c, g, or t
gccaggggcacagtcctttcttactgtgaaactttactagaacccgaatgttcttcaagggttgctggcaggcctcagtgtaaacaaatagaccagtcatcatcagaccagaccaggaatgagggtgaagcaccgggatttcatgtggcatctctatctgctgaagcagggcagatagatctgttacctgatgagaggaaagtccaggccacatctctgtctgcagacagctttgaatctctgcccaatacggaaactgacagagagccatgggatcctgtgcaggctttctcccatgctgctcctgctcaagacaggaaacgtcgtactggagaactgaggcagttcgcgggagcaagtgaaccatttatatgtcactctagttcttctgaaatcatagagaaaaagaaagatgcaaccagaacaccttcctcagctgatcctttggccccagacagtcctcgttcttcagcacctgtggaggaggtcaggagggtagtatcaaagaaggtagtggctgccttaccttctcaggccccttatgatgatcctagagtgactctgcatgagctaagtcagtcagttccgcaggagactgcagagggcataccccctggcagtcaggacagcagcccagagcatcaggaacccagaactctagacaccacatatggagaagtttcagataatttgttagtgactgcacagggagaaaaaacagcccattttgaaagtcagtctgtgacctgtgatgttcagaattctacaagtgcctcagggcctaagcaagaccatgtccaatgccctgaggcttctactggctttgaagaaggtagggcaagtcccaaacaagataccattctgcctggagctctgacaagggttgcactggaagctcccacacagcagtgtgtgcagtgtaaggagagtgttgggtctgggttgacagaagtctgcagggctggcagcaaacattccaggccaattccactgccagatcaaagaccaagcgcaaatcctgggggaattggggaggaagccccatgtagacacccaagggaagctttagatggccctgtcttctcaaggaaccctgaaggcagcaggactctcagcccgtctagagggaaagagagcagaactcttccttgccgacagccatgcagttctcaacctgttgctactcatgcttattcctcccattcctctactttactgtgttttagagatggtgacctagggaaggagcctttcaaggctgccccacatactatccacccaccctgtgtagtaccttccagggcctatgaaatggatgagacaggagagatctctaggggacctgatgtgcacttgacacatggccttgagcccaaagatgttaacagggaatttaggctaacagagagcagcacttgtgagccttctactgtggctgctgtcctatctcgagctcaaggctgcagatccccttctgctcctgacgtgaggacaggttccttcagccactcagctactgatggaagcgtggggttaataggggttcctgagaaaaaggttgctgagaagcaagcaagcacagaacttgaggctgcctctttccctgcaggcatgtactctgagcccctgaggcagtttagggacagctctgtaggtgaccagaatgcacaggtgtgtcaaaccaatccagaaccacctgcaacaactcagggaccacacaccctggatttaagtgaagggtctgctgagagcaagttggtggtagagccacagcatgaatgtttagaaaataccactagatgttttttggaaaagccacaattttccactgagttgagggatcacaatcgcttggattcccaagccaagtttgtagcaaggttaaaacatacctgcagcccccaggaagacagtccctggcaggaagaagagcagcacagagaccaggcttcaggtggtggagaaggcttcgcccagggtgtgaatccccttcctgatgaagatggcttagatggctgtcagattttagatgctgggagagaggaggtggctgtggccaagcctcctgtgtccaagattttatcacagggcttcaaagacccagccactgtgtccttgaggcaaaatgaaacaccgcagcctgctgctcagaggagtggccacctctacactggcagagagcagccagcacccaaccacaggggctcacttcctgtgactacaatcttctctggccccaaacactccaggtcctcccccacaccacagttctcagttgtcggctcttctcgttctcttcaggagctgaacttgagtgtggagcctccttcccctacagacgaagatacacaggggcctaacagattgtggaacccacatctcaggggctattcctcaggaaagtcagtggcaagaacatctctgcaggctgaggacagcnatcagaaagcctcatctcgcttggatgatgggactaccgatcacaggcacctgaagcctgccacccctccttatccaatgccttccactctctcacacatgccaacccctgatttcacgaccagctggatgtctggtactttggaacaagcccaacagggaaagcgagagaaactgggtgtccaggttaggccagaaaattggtgctctcagatggacaaaggaatgctgcactttggctccagtgacatcagtccctatgcgctgccgtggcgtccggaggagcctgcacgtatcagctggaagcagtatatgtctggcagtgcagtcgatgtttcctgcagccagaagccccaggggctgacactatcaaatgtggcccggtgctccagcatggacaatggcctagaagaccagaactcccctttccactcccacctcagcacttacgccaatatttgtgatctgtcaaccacacacagcagcactgagaatgcccagggttcaaatgaggcctgggaagtattccgagggagttcttcaattgccttaggagacccccacatcccgacgagccctgaaggagtagcccccacttcgggtcatgacagaaggcctcagttcaggggcccttctggtgaagcagactgtctgaggagtaagccccccttggccaaaggaagtgctgcaggtccagtggatgagattatgctgctgtatccatcagaggcaggctgccctgtgggacagaccaggacgaacacattcgaacagggcacacagaccctcggcagcaggcgccactggagcagcactgacatctcctttgctcagcctgaagccagtgcagtatcagcctttgatctggcctcatggaccagcatgcacaatctgtctctccacctctcacagctcctgcacagtacctcagagctgcttgggagtctctcccagccagatgtggccagaagggagcagaacaccaagagggacatcccagataaagccccacaggccctgatgatggatggctctactcagaccactgtggatgagggcagccagactgacctcaccttacccaccctgtgcctccagacttcagaggctgaacctcagggagccaatgtgatccttgaagggctaggctcagatacctcgactgtgtctcaagaagagggagatgtgccaggggtacctcagaagagagaggcagaggaaacagcacagaaaatggctcagctcctctatcttcaggaagaaagcactccctacaagccccagagcccttcaataccctcatcccacttgaggtttcagaaagcccccgttgggcagcatcttccttctgtgagcccctcagtttctgatgctttcctgcctcccagctcccagccagaggagtcatattgcttagttgtcagcagtcccagtcccagctcccctcattccccagggctctttcccagtacttccgagtatcctggggactccagggtccagaagaagctgggccccacaagtgctttgttcgtggacagggcctcctccccaatcctcactcttagtgccagcacccaagagccgggtctttccccaggctctttgaccctctcagccccttcaactcaccctgttgaaggccaccagaagcttgactccagcccagaccctgttgatgccccaaggactccaatggataattattcccaaaccactgacgagttaggtggctcccagagaggtagaagttccttacaaaggagtaatgggagatccttccttgagttgcactccccacacagcccacagcagagtccaaaactccaatttagtttcttagggcagcaccctcagcagcttcagcccaggacaactatcggggtccaaagcagactgctgccaccaccactgaggcacaggagccaaaggctgggcaacagctttgtgcctgagaaggtggcttccccggagcattgcccactgagcggtagggagccaagtcagtggcagagcaggacagaaaatggaggtgagagttcagcatctccaggggaaccacaacgcactctggaccgaccttcttcatggggaggcctccagcacctcagcccctgccctgtctctgagttgactgatactgcagggctccgaggttctgccttgggcctccctcaggcctgccaacctgaggagttactgtgcttcagttgccagatgtgcatggcccctgagcaccagcaccacagtctgagggacctcccggtgcataacaaatttagtaactggtgtggggttcagaagggctcacctggggggttggacatgactgaggaggagctgggggccagcggtgatctcagctctgaaaagcaggaacagagtcccccacaacctcctaatgaccacagccaggattctgagtggtccaagagggagcagatccccctgcaagttggggcccagaacctctcactcagcgtggaactcacagaagcgaaactgcaccatggctttggggaggccgatgccctgctccaggtgctgcagagtgggacaggggaggcgcttgctgctgatgaacctgtgacatccacctggaaggagctctatgcacggcaaaaaaaggccattgagaccctcaggagagagcgggctgagcgacttgggaacttctgccggacgcgaagccttagccctcagaaacaactgagcctcctgcccaacaaagatctcttcatctgggatcttgacttgcccagcagacgccgagaatacctgcagcaactgaggaaggatgttgtggagaccaccaggagcccagagtcagtgtcaaggtcagctcacacaccctctgacatagagttgatgctgcaagactaccagcaggcccatgaggaggccaaggtggagattgcccgggcccgagaccaactgcgggagcggactgaacaagagaagctgagaatccaccagaagatcatttcccagctattgaaggaagaggataaactacataccttggccaattccagctccctgtgcaccagctctaatggaagcctctcgtctggcatgacctctggctataatagcagcccagccttgtcaggccagctccagttcccagagaatatggggcatacaaacttgcctgattccagggatgtatggataggggatgagcgaggaggccattctgcagtgaggaagaactctgcctacagccacagagcctccctgggcagttgctgctgttcaccatccagtctgtccagcttggggacctgcttttcctcctcctaccaggatttggccaagcatgtcgtggacacttctatggctgatgtaatggctgcttgttcggataatttgcacaacctcttcagctgccaggcaactgctggctggaactatcagggtgaggagcaggcggtgcagctttactacaaggtgttttctcccactcggcatggcttcctgggggcaggtgtggtgtcccagccgctgtctcgtgtgtgggcggctgtcagtgaccccactgtgtggcccctgtattacaagcccatccagacagcaaggctgcatcagcgagtgaccaacagcatcagcctggtgtacttggtgtgcaacaccaccctgtgcgcactgaagcagccacgggatttctgttgtgtctgcgtggaagccaaagagggtcacctgtctgtcatggcagcccagtctgtgtatgatacatccatgccaagacccagcagaaaaatggttcgcggggagatcctgcccagtgcctggatcttgcagcccatcactgtggaagggaaggaagtcaccagagtcatctacttggcccaggaggtgaacgccaatacttagatctggatggcagagcccaggggcctgtaaacaccaaaccacaatctgaggtggaacttggtgctccaggcttcccacctcagctcctgagctctttcatcaaacggcagccactggttatagccagactggcttccttccttggtaggtagcatctcaccgtcaagatggtgctgctgagatgcaggcccaggctgctcaagagagacactgtggcagctccttgttactttccataccacagtgcaggaaaagctgatgctacctgctgtggccgattggggcagacagcactggcccagggatgctagcaaagcccagtcagtacttggtcacagctggcaccagtgcagagcaaacggcctgagctcctggcccagactatccagagtgaatgcagctccgctcaccttttggatttctcacctttctttcctgtttctgggactctgcggcagacaggacacttaaggaccaggactgggcacagccagcagagccggggactgcagtgctttggcaaggtgcttccgcaggctggtagggaagcaggcagccactggccaagactctgctctgaatctacctcctctagcattcagctctactgtgtgatgggacgttaaaaataccaaaacagaaagagggtttaaaaaacagctgcacaaaccagaacaccgattcagaatcttttctccctcttgagtttttgcaaaatactttattattgatttttgctttttttctccctttccctcccaggagaagacatttgggtcttggcctgaggcaggggtgttgagcgatgatgctctgatatggagctgtcactctagagctcggtcagatggaagacactatagaaccaggttggacagatttggggtcagggttggaggctgagttcttttgaggactggttggagtggcagccagatggtggctgctgacaaggcaagaggaatttcagagattaaacattgtcctttgaggaagggagaggaggtgaatgaactcccagaggaggtgagtggcttgttgggaggaagctcagttccagaacttacctcagtgcacttgggaggggtggagtcctgagcattccatgatttctgccctggccccacctatcctaggatggggtgggatggagagtgggttcagttttcttgtactttagcctggctgaacatgaactttgtgtttacctggaagtggtaggggtgggagagattctcatctttagttctggtgcccaaaatctttggtagatggagggaactggggattcagaagatgtggtaaaggtctatttctgtagtgtggcagagatgtgtttttctaaagtgtttgcagggcatttttccctcttacctcagattaagttatttatatattgttgattgaaggttttttaaaattgcttttaaacttctatttctcgggtaaattttttggtgacatgatatatttaacaccctatttatatactcctacctcttttcatataaatctcttactaagactactgaccaaaaaagaacattttaaaattaaaagtcctctgtgtactttatctagtgaa

SEQ ID NO: 299603 - DNA, 2270 bp, Homo sapiens
  misc_feature (1)..(2): n is a, c, g, or t
  misc_feature (2072)..(2072): n is a, c, g, or t
  misc_feature (2239)..(2239): n is a, c, g, or t
  misc_feature (2270)..(2270): n is a, c, g, or t
nngggaagtggaggtgggagggagcgacaatggaaaaatcacctgaaaactgggacagaggaaggaagctacagttacgaaggagagctgcaaaagttgcagcagaaaggttgggagtcccgacaggttccgtagcccacagaaaagaagcaagggacggcaggactgtttcacacttttctgcttctggaaggtgctggacaaaaacatggaactaatttccccaacagtgattataatcctgggttgccttgctctgttcttactccttcagcggaagaatttgcgtagacccccgtgcatcaagggctggattccttggattggagttggatttgagtttgggaaagcccctctagaatttatagagaaagcaagaatcaaggtatgtggtcgtggcagacggggtctccagaggagacaatgctttcttttttaaactttctttcattgactcttaagtgcagggctagaacacggggaacatacctgcttgcctcaactaaaggatctagtcatttctgaattcctctactaacaattaacaacaatatcctgtgcaaaattttgcgaaagaaatgaaatacaattgcagcgtgcatcgacatttttggaagtagagattaacttttcgtatttttacttcatcgaagttaagttccaaatgtgtatgtgttaagtaaatgttttcagtaattgggaaagataaagtgtaatccaatttaagtttgtgaaaatgagtaattcgtatccaaattggagttaacaccaaagtattgtacaaattgcttgcacagttggtccgtacacaataaacaggctctgtatttttagctgacgttgttatttgatgatgatgtactccattttcactacggcctgaagagactagtaatcctccttgtagtagatgtttttgtcttgaaagtatcttttaaatgtctgagcactttaaggaacagacctttattaatgtcttttaagttttattcaatttccagtcacaaatattttatggtatttgattgtctaataaatttgtatgatattataattattcttatgaattataatactttctgtggtgacccattttccatctggttagcccaatttgtagaatgaatttatacgtagtagcattattttaccactgatcatttgccttcaaaatctctgagattccaatttagtaaaaaacatatagaaaattaaagagaactaagatgaaaataaaaataacccagaatatcacaccagctgtactgtaaaaatttagtgtatttatattattttggtcattttcctatgtatttacaactatttaatgaacaacaatggaataatagtataatactcttttatgtgcttttgattttaacatataatgtgaatgactttcctgtaccatgaaatactttgaatcttccttttatggctatattttgtcataggaggatacaatagtttacttaaatctcaatagttgggtttataggttgctgccaaacttttttctttcagccagtgcttcagtgaacattcttgcgtgtttgtgtgcatgtattgattgtgtggttgtacattttgcaattatctgattgtttactcagaataaattcctaggagtagaattgctgagtcaaaggacatgcacacttaaattgtttatatgaatgtgttacttttggaaaaagaagtatgaatatgcaatttttattttccattgactgtatgcaattgcctaacttctcaaatcctgggccatactgaataccataattctttgcaatttttgctagtctgatagatgaaacattatatctcctaaagaaatactcctttgtctcccacagccttccttatgcatatgatcttgataatttttaaggaactgtttttttacaagcttgtgtcagaaggctaaatatttgtgaggtctctattgctttcctgactaaacaaaacaagttattgctggactctgtgtctcacacctgtaatcccaacactttgggaggcaggggtgggaggattgcttgaggccaggaatttaagaccagcccgggagntatagcaagacctcatttctacaaaaactaaatagaaaaataaaaaatttaatctggtccagtggcacatgcctgtagtcccagctcctcgagaggctgaggcgggaggattgcttgagctcaggagttccagattccggtaagctatgattgagccactgcactcnagcctgggcaacagagcgagaccttgtctcn

SEQ ID NO: 299604 - DNA, 2178 bp, Homo sapiens
  misc_feature (1)..(2): n is a, c, g, or t
nngggaagtggaggtgggagggagcgacaatggaaaaatcacctgaaaactgggacagaggaaggaagctacagttacgaaggagagctgcaaaagttgcagcagaaaggttgggagtcccgacaggttccgtagcccacagaaaagaagcaagggacggcaggactgtttcacacttttctgcttctggaaggtgctggacaaaaacatggaactaatttccccaacagtgattataatcctgggttgccttgctctgttcttactccttcagcggaagaatttgcgtagacccccgtgcatcaagggctggattccttggattggagttggatttgagtttgggaaagcccctctagaatttatagagaaagcaagaatcaagtatggaccaatatttacagtctttgctatgggaaaccgaatgacctttgttactgaagaagaaggaattaatgtgtttctaaaatccaaaaaagtagattttgaactagcagtgcaaaatatcgtttatcgtacagcatcaattccaaagaatgtctttttagcactgcatgaaaaactctatattatgttgaaagggaaaatggggactgtcaatctccatcagtttactgggcaactgactgaagaattacatgaacaactggagaatttaggcactcatgggacaatggacctgaacaacttagtaagacatctcctttatccagtcacagtgaatatgctctttaataaaagtttgttttccacaaacaagaaaaaaatcaaggagttccatcagtattttcaagtttatgatgaagattttgagtatgggtcccagttgccagagtgtcttctaagaaactggtcaaaatccaaaaagtggttcctggaactgtttgagaaaaacattccagatataaaagcatgtaaatctgcaaaagataattccatgacattattgcaagctacgctggatattgtagagacggaaacaagtaaggaaaactcacccaattatgggctcttactgctttgggcttctctgtctaatgctgttcctgttgcattttggacacttgcatacgtcctttctcatcctgatatccacaaggccattatggaaggcatatcttctgtgtttggcaaagcaggcaaagataagattaaagtgtctgaggatgacctggagaatctccttctaattaaatggtgtgttttggaaaccattcgtttaaaagctcctggtgtcattactagaaaagtggtgaagcctgtggaaattttgaattacatcattccttctggtgacttgttgatgttgtctccattttggctgcatagaaatccaaagtattttcctgagcctgaattgttcaaacctgaacgttggaaaaaggcaaatttagagaagcactctttcttggactgcttcatggcatttggaagcgggaagttccagtgtcctgcaaggtggtttgctctgttagaggttcagatgtgtattattttaatactttataaatatgactgtagtcttctggacccattacccaaacagagttatctccatttggtgggtgtcccccagccggaagggcaatgccgaattgaatataaacaaagaatatgacatctgttgggcctcacaaggaccagggccttctggaggagtggcactaccccacctggcagcacctagacctgagctctacaaaaacacactgcttcactttgttttaggacttagttcaagaacacattcaaatggtgcatgtgtttggtatcttcaacagtagaccaagaatctaacatcactctcagtaatatagagaccggaatacatggtttataggaaatgatcaaatgatccaaaaaaactccacattttttaagaagttggaatttgatttcatgcataactgtattaaaacattaaatagaaataatgtcatttgaatgaaaatcttatcacattaaattcactgtgaagacagcatacttaaatttttattttgaaaagtctaaaaggcttagatttttaaaatttaataattatttctacaaattttctatttttcttgaggtgattctcaactagcaattggaactcctaggctctattaacataattctttattgtaaacgtatctaatgctaaaagtaataaaatggtagttttctgagacctgt

SEQ ID NO: 299605 - DNA, 2070 bp, Homo sapiens
  misc_feature (1)..(2): n is a, c, g, or t
nngggaagtggaggtgggagggagcgacaatggaaaaatcacctgaaaactgggacagaggaaggaagctacagttacgaaggagagctgcaaaagttgcagcagaaaggttgggagtcccgacaggttccgtagcccacagaaaagaagcaagggacggcaggactgtttcacacttttctgcttctggaaggtgctggacaaaaacatggaactaatttccccaacagtgattataatcctgggttgccttgctctgttcttactccttcagcggaagaatttgcgtagacccccgtgcatcaagggctggattccttggattggagttggatttgagtttgggaaagcccctctagaatttatagagaaagcaagaatcaagtatggaccaatatttacagtctttgctatgggaaaccgaatgacctttgttactgaagaagaaggaattaatgtgtttctaaaatccaaaaaagtagattttgaactagcagtgcaaaatatcgtttatcgtacagcatcaattccaaagaatgtctttttagcactgcatgaaaaactctatattatgttgaaagggaaaatggggactgtcaatctccatcagtttactgggcaactgactgaagaattacatgaacaactggagaatttaggcactcatgggacaatggacctgaacaacttagtaagacatctcctttatccagtcacagtgaatatgctctttaataaaagtttgttttccacaaacaagaaaaaaatcaaggagttccatcagtattttcaagtttatgatgaagattttgagtatgggtcccagttgccagagtgtcttctaagaaactggtcaaaatccaaaaagtggttcctggaactgtttgagaaaaacattccagatataaaagcatgtaaatctgcaaaagataattccatggttgcattttggacacttgcatacgtcctttctcatcctgatatccacaaggccattatggaaggcatatcttctgtgtttggcaaagcaggcaaagataagattaaagtgtctgaggatgacctggagaatctccttctaattaaatggtgtgttttggaaaccattcgtttaaaagctcctggtgtcattactagaaaagtggtgaagcctgtggaaattttgaattacatcattccttctggtgacttgttgatgttgtctccattttggctgcatagaaatccaaagtattttcctgagcctgaattgttcaaacctgaacgttggaaaaaggcaaatttagagaagcactctttcttggactgcttcatggcatttggaagcgggaagttccagtgtcctgcaaggtggtttgctctgttagaggttcagatgtgtattattttaatactttataaatatgactgtagtcttctggacccattacccaaacagagttatctccatttggtgggtgtcccccagccggaagggcaatgccgaattgaatataaacaaagaatatgacatctgttgggcctcacaaggaccagggccttctggaggagtggcactaccccacctggcagcacctagacctgagctctacaaaaacacactgcttcactttgttttaggacttagttcaagaacacattcaaatggtgcatgtgtttggtatcttcaacagtagaccaagaatctaacatcactctcagtaatatagagaccggaatacatggtttataggaaatgatcaaatgatccaaaaaaactccacattttttaagaagttggaatttgatttcatgcataactgtattaaaacattaaatagaaataatgtcatttgaatgaaaatcttatcacattaaattcactgtgaagacagcatacttaaatttttattttgaaaagtctaaaaggcttagatttttaaaatttaataattatttctacaaattttctatttttcttgaggtgattctcaactagcaattggaactcctaggctctattaacataattctttattgtaaacgtatctaatgctaaaagtaataaaatggtagttttctgagacctgt

SEQ ID NO: 299606 - DNA, 2168 bp, Homo sapiens
  misc_feature (1)..(2): n is a, c, g, or t
nngggaagtggaggtgggagggagcgacaatggaaaaatcacctgaaaactgggacagaggaaggaagctacagttacgaaggagagctgcaaaagttgcagcagaaaggttgggagtcccgacaggttccgtagcccacagaaaagaagcaagggacggcaggactgtttcacacttttctgcttctggaaggtgctggacaaaaacatggaactaatttccccaacagtgattataatcctgggttgccttgctctgttcttactccttcagcggaagaatttgcgtagacccccgtgcatcaagggctggattccttggattggagttggatttgagtttgggaaagcccctctagaatttatagagaaagcaagaatcaagtatggaccaatatttacagtctttgctatgggaaaccgaatgacctttgttactgaagaagaaggaattaatgtgtttctaaaatccaaaaaagtagattttgaactagcagtgcaaaatatcgtttatcgtacagcatcaattccaaagaatgtctttttagcactgcatgaaaaactctatattatgttgaaagggaaaatggggactgtcaatctccatcagtttactgggcaactgactgaagaattacatgaacaactggagaatttaggcactcatgggacaatggacctgaacaacttagtaagacatctcctttatccagtcacagtgaatatgctctttaataaaagtttgttttccacaaacaagaaaaaaatcaaggagttccatcagtattttcaagtttatgatgaagattttgagtatgggtcccagttgccagagtgtcttctaagaaactggtcaaaatccaaaaagtggttcctggaactgtttgagaaaaacattccagatataaaagcatgtaaatctgcaaaagataattccatggttgcattttggacacttgcatacgtcctttctcatcctgatatccacaaggccattatggaaggcatatcttctgtgtttggcaaagcaggcaaagataagattaaagtgtctgaggatgacctggagaatctccttctaattaaatggtgtgttttggaaaccattcgtttaaaagctcctggtgtcattactagaaaagtggtgaagcctgtggaaattttgaattacatcattccttctggtgacttgttgatgttgtctccattttggctgcatagaaatccaaagtattttcctgagcctgaattgttcaaacctgaacgttggaaaaaggcaaatttagagaagcactctttcttggactgcttcatggcatttggaagcgggaagttccagtgtcctgcaaggtggtttgctctgttagaggttcagatgtgtattattttaatactttataaatatgactgtagtcttctggacccattacccaaacagagttatctccatttggtgggtgtcccccagccggaagggcaatgccgaattgaatataaacaaagaatatgacatctgttgggcctcacaaggaccagggccttctggaggagtggcactaccccacctggcagcacctagacctgagctctacaaaaacacactgcttcactttgttttaggacttagttcaagaacacattcaaatggtgcatgtgtttggtatcttcaacagtagaccaagaatctaacatcactctcagtaatatagagaccggaatacatggtttataggaaatgatcaaatgatccaaaaaaactccacattttttaagaagttggaatttgatttcatgcataactgtattaaaacattaaatagaaataatgtcatttgaatgaaaatcttatcacattaaattcactgtgaagacagcatacttaaatttttattttgaaaagtctaaaaggcttagatttttaaaatttaataattatttctacaaattttctatttttcttgaggtgattctcaactagcaattggaactcctaggctctattaacataattctttattgtaaacgtatctaatgctaaaagtaataaaatggtagttttctgagacctgtgaggacaggaatggtgtcttacattcatttctacactttattatgctcaggattgcaccttctttacagagtatattcaataaatgtatgttgattga

SEQ ID NO: 299607 - DNA, 2300 bp, Homo sapiens
  misc_feature (1)..(2): n is a, c, g, or t
nngggaagtggaggtgggagggagcgacaatggaaaaatcacctgaaaactgggacagaggaaggaagctacagttacgaaggagagctgcaaaagttgcagcagaaaggttgggagtcccgacaggttccgtagcccacagaaaagaagcaagggacggcaggactgtttcacacttttctgcttctggaaggtgctggacaaaaacatggaactaatttccccaacagtgattataatcctgggttgccttgctctgttcttactccttcagcggaagaatttgcgtagacccccgtgcatcaagggctggattccttggattggagttggatttgagtttgggaaagcccctctagaatttatagagaaagcaagaatcaagtatggaccaatatttacagtctttgctatgggaaaccgaatgacctttgttactgaagaagaaggaattaatgtgtttctaaaatccaaaaaagtagattttgaactagcagtgcaaaatatcgtttatcgtacagcatcaattccaaagaatgtctttttagcactgcatgaaaaactctatattatgttgaaagggaaaatggggactgtcaatctccatcagtttactgggcaactgactgaagaattacatgaacaactggagaatttaggcactcatgggacaatggacctgaacaacttagtaagacatctcctttatccagtcacagtgaatatgctctttaataaaagtttgttttccacaaacaagaaaaaaatcaaggagttccatcagtattttcaagtttatgatgaagattttgagtatgggtcccagttgccagagtgtcttctaagaaactggtcaaaatccaaaaagtggttcctggaactgtttgagaaaaacattccagatataaaagcatgtaaatctgcaaaagataattccatggttgcattttggacacttgcatacgtcctttctcatcctgatatccacaaggccattatggaaggcatatcttctgtgtttggcaaagcaggcaaagataagattaaagtgtctgaggatgacctggagaatctccttctaattaaatggtgtgttttggaaaccattcgtttaaaagctcctggtgtcattactagaaaagtggtgaagcctgtggaaattttgaattacatcattccttctggtgacttgttgatgttgtctccattttggctgcatagaaatccaaagtattttcctgagcctgaattgttcaaacctgaacgttggaaaaaggcaaatttagagaagcactctttcttggactgcttcatggcatttggaagcgggaagttccagtgtcctgcaaggtggtttgctctgttagaggttcagatgtgtattattttaatactttataaatatgactgtagtcttctggacccattacccaaacagagttatctccatttggtgggtgtcccccagccggaagggcaatgccgaattgaatataaacaaagaatatgacatctgttgggcctcacaaggaccagggccttctggaggagtggcactaccccacctggcagcacctagacctgagctctacaaaaacacactgcttcactttgttttaggacttagttcaagaacacattcaaatggtgcatgtgtttggtatcttcaacagtagaccaagaatctaacatcactctcagtaatatagagaccggaatacatggtttataggaaatgatcaaatgatccaaaaaaactccacattttttaagaagttggaatttgatttcatgcataactgtattaaaacattaaatagaaataatgtcatttgaatgaaaatcttatcacattaaattcactgtgaagacagcatacttaaatttttattttgaaaagtctaaaaggcttagatttttaaaatttaataattatttctacaaattttctatttttcttgaggtgattctcaactagcaattggaactcctaggctctattaacataattctttattgtaaacgtatctaatgctaaaagtaataaaatggtagttttctgagacctgtgaggacaggaatggtgtcttacattcatttctacactttattatgctcaggattgcaccttctttacagagtatattcaataaatgtatgttgattgatgtattgatttatattttaattaacctggaagcattgttttgactcaaagtgtttgcaattatagtttggcagataccatatttttgctaatgcatagaaacacaaatataacggtatgccaagacaagtaa

SEQ ID NO: 299608 - DNA, 1806 bp, Homo sapiens
  misc_feature (1)..(2): n is a, c, g, or t
nngggaagtggaggtgggagggagcgacaatggaaaaatcacctgaaaactgggacagaggaaggaagctacagttacgaaggagagctgcaaaagttgcagcagaaaggttgggagtcccgacaggttccgtagcccacagaaaagaagcaagggacggcaggactgtttcacacttttctgcttctggaaggtgctggacaaaaacatggaactaatttccccaacagtgattataatcctgggttgccttgctctgttcttactccttcagcggaagaatttgcgtagacccccgtgcatcaagggctggattccttggattggagttggatttgagtttgggaaagcccctctagaatttatagagaaagcaagaatcaagtatggaccaatatttacagtctttgctatgggaaaccgaatgacctttgttactgaagaagaaggaattaatgtgtttctaaaatccaaaaaagtagattttgaactagcagtgcaaaatatcgtttatcgtacagcatcaattccaaagaatgtctttttagcactgcatgaaaaactctatattatgttgaaagggaaaatggggactgtcaatctccatcagtttactgggcaactgactgaagaattacatgaacaactggagaatttaggcactcatgggacaatggacctgaacaacttagtaagacatctcctttatccagtcacagtgaatatgctctttaataaaagtttgttttccacaaacaagaaaaaaatcaaggagttccatcagtattttcaagtttatgatgaagattttgagtatgggtcccagttgccagagtgtcttctaagaaactggtcaaaatccaaaaagtggttcctggaactgtttgagaaaaacattccagatataaaagcatgtaaatctgcaaaagataattccatggttgcattttggacacttgcatacgtcctttctcatcctgatatccacaaggccattatggaaggcatatcttctgtgtttggcaaagcaggcaaagataagattaaagtgtctgaggatgacctggagaatctccttctaattaaatggtgtgttttggaaaccattcgtttaaaagctcctggtgtcattactagaaaagtggtgaagcctgtggaaattttgaattacatcattccttctggtgacttgttgatgttgtctccattttggctgcatagaaatccaaagtattttcctgagcctgaattgttcaaacctgaacgttggaaaaaggcaaatttagagaagcactctttcttggactgcttcatggcatttggaagcgggaagttccagtgtcctgcaagaaaaacaaacaggaaagagcagcatgaacccccagacttcttcagaaattgtagcttgcaaagtgaagagtctcattatagcagacagtctcacattaaactatacgatttaaatggaggaataagacggagggttttcagtgtggaggaaaacttctttgagtgagcacctctgagagttgatgatcttagggatgtgcttgctatacctgtcccctggaacacacaccaaaaccaacaagcttgattttccttggttctaattcctgcaagaggatgcctgatttgctgtgtcattgtgcaaattgatatggcttaaactccagtgtaaaacaacagccctgatctttggcaagattaatctgcttataaaggcatgcttggataagaagagagtgtaataaaaggaaggctgcaatacttgagaagttaaaatgaagcatggattcctcagga

SEQ ID NO: 299609 - DNA, 1578 bp, Homo sapiens
  misc_feature (1)..(2): n is a, c, g, or t
nngggaagtggaggtgggagggagcgacaatggaaaaatcacctgaaaactgggacagaggaaggaagctacagttacgaaggagagctgcaaaagttgcagcagaaaggttgggagtcccgacaggttccgtagcccacagaaaagaagcaagggacggcaggactgtttcacacttttctgcttctggaaggtgctggacaaaaacatggaactaatttccccaacagtgattataatcctgggttgccttgctctgttcttactccttcagcggaagaatttgcgtagacccccgtgcatcaagggctggattccttggattggagttggatttgagtttgggaaagcccctctagaatttatagagaaagcaagaatcaagtatggaccaatatttacagtctttgctatgggaaaccgaatgacctttgttactgaagaagaaggaattaatgtgtttctaaaatccaaaaaagtagattttgaactagcagtgcaaaatatcgtttatcgtacagcatcaattccaaagaatgtctttttagcactgcatgaaaaactctatattatgttgaaagggaaaatggggactgtcaatctccatcagtttactgggcaactgactgaagaattacatgaacaactggagaatttaggcactcatgggacaatggacctgaacaacttagtaagacatctcctttatccagtcacagtgaatatgctctttaataaaagtttgttttccacaaacaagaaaaaaatcaaggagttccatcagtattttcaagtttatgatgaagattttgagtatgggtcccagttgccagagtgtcttctaagaaactggtcaaaatccaaaaagtggttcctggaactgtttgagaaaaacattccagatataaaagcatgtaaatctgcaaaagataattccatggttgcattttggacacttgcatacgtcctttctcatcctgatatccacaaggccattatggaaggcatatcttctgtgtttggcaaagcaggcaaagataagattaaagtgtctgaggatgacctggagaatctccttctaattaaatggtgtgttttggaaaccattcgtttaaaagctcctggtgtcattactagaaaagtggtgaagcctgtggaaattttgaattacatcattccttctggtgacttgttgatgttgtctccattttggctgcatagaaatccaaagtattttcctgagcctgaattgttcaaacctgaacgttggaaaaaggcaaatttagagaagcactctttcttggactgcttcatggcatttggaagcgggaagttccagtgtcctgcaagaaaaggtttttgaacatctcatctgtgccaggccctcttctaagcttcagagagcactgaggaagaccaacatggtccctgacttcatagaatttacaatctacattaaatatgtcacatttcttcattggggatgattctgtaggggaaatgtcagtacctgtttatgacaaaatctcactcaataaatgtagaaatccattaaatttttatatttaaaaaattgta

SEQ ID NO: 299610 - DNA, 209 bp, Homo sapiens
gtaagctttggtttggttttaaatgaatcaaccttctacaaaaaaagtacacattttgcccacatatatttttcaggttgacatatcttgatttatttttacttgacaaataaatattttatatatttgtcttgtacaacatgtggttttgaaatatgtatacattatggaatggctaaatcaaactaattaaaatatgcatcacttca

SEQ ID NO: 299611 - DNA, 4501 bp, Homo sapiens
cacgctcagagcagaccgctagcaggaggcaggatgtgatagtctaagaccctggaagctgacggccagagggagggaagggtggtcacagaggagaggcaaagcaacgggaggtggaggatcctggaggtgtctgcaaggagaatacacagcagcgaggggctgcagaagcggacccagcgacttctgcgctgacgcggggcgggcgggagagaggaagagaggggagcgcggtggcgctgcgagctggccccgccggggaaggggctgccatgtcccgtgagcggcccccgggcaccgacattccccgcaacctgagcttcatcgccgcgctaacggagcgcgcctactaccgtagccagcggcccagcctcgaggaggagccggaggaggagccaggcgagggcgggacgcggttcggggcccgatcccgcgctcacgcaccgagtcggggccgccgggcccgatctgcaccagccggaggcggcggggcccgggcgccccgcagccgtagcccagacacccgcaagagagtgcgtttcgccgacgcactggggttggagctggctgtcgtgcgccgcttccgtcccggtgagctgccccgggtgccccgccacgtgcagatccaattgcagagggacgccctccgccacttcgcgccctgccagccccgcgcccgcggcctccaggaggcgcgcgccgccctggagccggccagcgagcccggcttcgccgcccgcttgctgacgcagcgcatctgcctggaacgcgccgaggcgggcccgctgggcgtggccgggagcgcgcgcgtggtggacctggcctacgagaagcgcgtgagcgtgcgctggagcgccgacggctggcggagccaacgcgaggcgccagccgcctacgccggtccggccccgcccccgccgcgcgccgaccgcttcgccttccgcctgcccgcgccgccgattgggggcgccctgctcttcgccttgcgctaccgtgtgacaggtcacgagttctgggacaacaacggcggccgtgactatgctctacgtgggcccgagcacccgggcagtggcggagctccggagccgcagggctggatccactttatctgagacgaggcgcctgcggccgacggcggaaaacaccaaaggcacccgggggcggggcgacccgatgtggcggggaggagtaggagagaccaggattggcgggagcggtccaagggagtcaagccggggagggcgaaaagggaacctggccactgctccttggtccttggcattatgacgggattcccttgtcacctctgacagttcctggctgcggtgtccgcggactggctggggagtgatgacagaagggatggaaaccctattttcttttctccaagaccatggttggtctgcttccctcactcgggctccttgacagtcttctagaagagagaaggaggaaaagaagcagttcctgatgttacaaatgaacaaggatctcccagccttagtctttgagaaaagatggctgaaagagaggaactctccaagtcattccgcaaacaaatgcccatttaaacatcatccttgtcttgtgaagaaaacaggaagaatgtcatgtaccatgtggatcaccttcagttcaaagttgcagcaaagtgaagaaagaaactactggaagccacccagcaatgcactgtttagtcatcaattaggagcccatgggaggataatagggagactgggtggaggctcagtgtgtaataatctcttgtctaatgtatgtgtgtcactgccatgttgtatgaacaatagtgagggctcacatttacttaacacttgtgtgcgcaaatctgggtttttcttcctttccagaactatgactcgatcataaaatctgttttgtttgcatgcatgcccaaaacaaccctgtaagtagaacattgtcattatctctgttttagagatgaggaaacaggctcagagaagctcagaaatttgttcaagatcgcacagctagtaaatggcagaagtaggattgtgaacccagggaatctccagagcctctgtgtaaccatgatgttatattttttttcctctttaaaaacaaaatttaaaaccttgctataatctcttattaggaaatgatcatagtttctgactgtgctctgccttcccatcctgccaatctcctggactggcttggagaagacagggggcccccgagcttcatctgtgactcgaaggagtttgctgctgtctcctgtgtcagtgtcccatctatgcaggatcagcacaggacccccctcaccttcccacttacactctagcctttccatacattggaattctctcctggccctagccagcgctccacacctgttggtgtgccacctccctccctcttcccccactggccttgaacaggcaaaccccctaatgtcgccactaggttgggtccgtgactaggacacctgctagagggtctgtgcttgggccttttctaggaatcccgatgttactgggtaagtgccaactctgtgggcagaatgctaatgataatcctgttccctgacctctttctcagaagtaccctggctcactctccccaatctcagctttatagaacaacattttggtcttgattattcccatatcaagctgccccagggcttcggtaagctgttagttgccccactgcctcaaggctgggtctggctgagctacttcttaggcacacaaatagtgggtgtctccttggaacctgacacaaaactatcagtgctaccaagccttgtaaaatagggaggaaactaatatttcttgagtggcttctgagtgcctggtgctttcgcggctctctggagagattccttgccctgatggctttggtgtgtactcctctcccaggacttcagcactgagattttcccaaccccctggcttttcctcaccttgggttgagttgatccggcactaccacaaaccccaccatctgcaaaccaaccaagattaggcagtatgccctttccgtcttgcactgctcttccaaaacttccatctgtatttctcacaccctcagtaagcaaagctgagtgtgcatggacagagctgcatccactgctttctcccagcgggtgcagtctaatctgacacggggaacactaggagtttagcggaatcttcagccaccctattaatgtgttacgcattaggcattgtagtggaaactcctctgatggctcatgactatatgaacaggagcaatttggaatataacatgtcagctgtggactgggaagtgccgtgagagaaaacactacctgggtcataggcttgggtccctgaggcaacccagcagggacactgttgcccattcctctcatccagactgcaggtgtcttcctacacctccctgtcccatagcctccgtcctgttttttgtttgtttgtttttctttgtgaatgtagaaaaacatttcatcatgagccctagctcctcagttttccacctaacacccacattcccttgtttctaactgccgtgtttttctggagcctgctgggatctttgcagtttgcaggtcatagaatcagacatgaaaaggcttctcttccgacgtcattggttcctggctcctttacagatgagaacacaggtccagaggtgagaaatgactctagcagggtcatagaatttgttagtgcagctcaagatgggacttaaactcaggcctcctgatcacccattcccaggctaggaaacaggtctctgctcggtgtggtggttcatacctgtaatcgcaacactttgggaggctgaggcaggagcattgcttgagcccaggagttcgagaccagtctgagcaacatagtgggaccctgtctctacaaaaacttttaaaattagctgggcatggtggcacacatctgtattcccagctactcaggaagctgagacaggaggatcgcttgagcccaggagttggaggttactgagctatgatcgcaccactgcactccagcttggtgacagtgagaccctcaaaaaaaaaaagaaaagaaagaggtctctacacaagcccgtgattcttcatggcaagggataacatcagaaatgtttcattttctgctattagtttccattcctttccccatccaggcataaagagaaacaaaagacaatgatggtattctctgtgtcctcagctttggcacttttgttgatgttgctaaggagcagtgaccttgctaaaaagactgaataatccacccactgaatagctaacctggggaggaaatgaaaatttcctttgtggatctccccaaatccattgttgtcaccaggccctcccagaacctcctcagttccttcacagtgcaaccctgtgtacttggcccgcaacccaatagtattgtgcctcacttcaccttccatgggcaactgccctcccttctggacataaaacctcatattttaaataaagttgaaatatgaaaagaaagta

SEQ ID NO: 299612 - DNA, 921 bp, Homo sapiens
aacttgaatagtaaatggcaccagaagatggcagtctgctccataaccagagcaagtgcagtgggaaagctggactctcatacccactcacattcatgccttatataagcctctcctcctggttaaccttaacaggggagtgattcctctgctggttgctgtttttccttttctcttaccctattcctaacctctttgcttctctctttctttccttgtgtctcttccttctcttttctttttttttttaacatatagggtatttttttcttttaacatatagggtatttaccttcattttgtttatttccatttgtttccttcttcattcatgttcatctctgctattccttctccctccagaagggatggaaaccctattttcttttctccaagaccatggttggtctgcttccctcactcgggctccttgacagtcttctagaagagagaaggaggaaaagaagcagttcctgatgttacaaatgaacaaggatctcccaggtaaccagctccccacacccatttctgttactaatttctcaaacagaaatttctggttccccttcttccttatcactgagtgaaaggggacaggcatgcacatgtgcccatacatgcattcagaatagagtgtgggggcaggggcggtagttcattcctgtaatcccagcactttgggaggctgagttaggtggatcatttgaggtcaggagttcaagactagcctggccacatactgaaccctgtctctactaaaaatacaaaaattagccgggcatggtgattcatgcctgtagtcccagctactcatgaggctgaggcaggagaatcactttaacggggagacagaggttgcagtgagctgagattgcaccactgcactccagcctgggtgacagagtgagactccgtctcaaa

SEQ ID NO: 299613 - DNA, 751 bp, Homo sapiens
  misc_feature (704)..(704): n is a, c, g, or t
  misc_feature (709)..(709): n is a, c, g, or t
  misc_feature (731)..(731): n is a, c, g, or t
aacttgaatagtaaatggcaccagaagatggcagtctgctccataaccagagcaagtgcagtgggaaagctggactctcatacccactcacattcatgccttatataagcctctcctcctggttaaccttaacaggggagtgattcctctgctggttgctgtttttccttttctcttaccctattcctaacctttttttttttaacatatagggtatttttttcttttaacatatagggtatttaccttcattttgtttatttccatttgtttccttcttcattcatgttcatctctgctattccttctccctccagaagggatggaaaccctattttcttttctccaagaccatggttggtctgcttccctcactcgggctccttgacagtcttctagaagagagaaggaggaaaagaagcagttcctgatgttacaaatgaacaaggatctcccaggtaaccagctccccacacccatttctgttactaatttctcaaacagaaatttctggttccccttcttccttatcactgagtgaaaggggacaggcatgcacatgtgcccatacatgcattcagaatagagtgtgggggcaggggcggtagttcattcctgtaatcccagcactttgggaggctgagttaggtggatcatttgaggtcaggagttcaagactagcctggccacatactgaaccctgntttanttccacgggaataacttcgggngacacaggtgccatgaggtt

SEQ ID NO: 299614 - DNA, 752 bp, Homo sapiens
aacttgaatagtaaatggcaccagaagatggcagtctgctccataaccagagcaagtgcagtgggaaagctggactctcatacccactcacattcatgccttatataagcctctcctcctggttaaccttaacaggggagtgattcctctgctggttgctgtttttccttttctcttaccctattcctaacctttttttttttaacatatagggtatttttttcttttaacatatagggtatttaccttcattttgtttatttccatttgtttccttcttcattcatgttcatctctgctattccttctccctccagaagggatggaaaccctattttcttttctccaagaccatggttggtctgcttccctcactcgggctccttgacagtcttctagaagagagaaggaggaaaagaagcagttcctgatgttacaaatgaacaaggatctcccaggtaaccagctccccacacccatttctgttactaatttctcaaacagaaatttctggttccccttcttccttatcactgagtgaaaggggacaggcatgcacatgtgcccatacatgcattcagaatagagtgtgggggcaggggcggtagttcattcctgtaatcccagcactttgggaggctgagttaggtggatcatttgaggtcaggagttcaagactagcctggccacatactgaaccccctgttttactactggggagggaatcaacttcgggagaccgggtgcgtggg

SEQ ID NO: 299615 - DNA, 887 bp, Homo sapiens
aacttgaatagtaaatggcaccagaagatggcagtctgctccataaccagagcaagtgcagtgggaaagctggactctcatacccactcacattcatgccttatataagcctctcctcctggttaaccttaacaggggagtgattcctctgctggttgctgtttttccttttctcttaccctattcctaacctctttgcttctctctttctttccttgtgtctcttccttctcttttctttttttttttaacatatagggtatttttttcttttaacatatagggtatttaccttcattttgtttatttccatttgtttccttcttcattcatgttcatctctgctattccttctccctccagaagggatggaaaccctattttcttttctccaagaccatggttggtctgcttccctcactcgggctccttgacagtcttctagaagagagaaggaggaaaagaagcagttcctgatgttacaaatgaacaaggatctcccaggtaaccagctccccacacccatttctgttactaatttctcaaacagaaatttctggttccccttcttccttatcactgagtgaaaggggacaggcatgcacatgtgcccatacatgcattcagaatagagtgtgggggcaggggcggtagttcattcctgtaatcccagcactttgggaggcgggtcggtgatctagaagtccgagtcagactagcggccaactctgaaacggtgctctctagcggaagggatcagcgtagcccaccgagcggcggacccacggacaggtccgcaattccaacgccgggaggtcccaacacaaggcaccaggaatcagcccagactacggagcgagagcgcacagcaggacagccacgcgctc

SEQ ID NO: 299616 - DNA, 359 bp, Homo sapiens
atgcgggtgatctagaggatcccattaggcgtattctctgtgtcctcagctttggcacttttgttgatgttgctaaggagcagtgaccttgctaaaaagactgaataatccacccactgaatagctaacctggggaggaaatgaaaatttcctttgtggatctccccaaatccattgttgtcaccaggccctcccagaacctcctcagttccttcacagtgcaaccctgtgtacgcagaacgcgcctaatattaggcgcgttctgcgtggggcccatgggtgagacactccagtactgagacctagagtccagatgcttgtaggagccaagtcgtgttctaagtatttatttaaaacaa

SEQ ID NO: 299617 - DNA, 530 bp, Homo sapiens
aacttgaatagtaaatggcaccagaagatggcagtctgctccataaccagagcaagtgcagtgggaaagctggactctcatacccactcacattcatgccttatataagcctctcctcctggttaaccttaacaggggagtgattcctctgctggttgctgtttttccttttctcttaccctattcctaacctctttgcttctctctttctttccttgtgtctcttccttctcttttctttttttttttaacatatagggtatttttttcttttaacatatagggtatttaccttcattttgtttatttccatttgtttccttcttcattcatgttcatctctgctattccttctccctccagaagggatggaaaccctattttcttttctccaagaccatggttggtctgcttccctcactcgggctccttgacagtcttctagaagagagaaggagacaccattttgtactaattttcaacagttttggtccctttttcttatactgggggggacaggctgcccttgt

SEQ ID NO: 299618 - DNA, 5585 bp, Homo sapiens
cacgctcagagcagaccgctagcaggaggcaggatgtgatagtctaagaccctggaagctgacggccagagggagggaagggtggtcacagaggagaggcaaagcaacgggaggtggaggatcctggaggtgtctgcaaggagaatacacagcagcgaggggctgcagaagcggacccagcgacttctgcgctgacgcggggcgggcgggagagaggaagagaggggagcgcggtggcgctgcgagctggccccgccggggaaggggctgccatgtcccgtgagcggcccccgggcaccgacattccccgcaacctgagcttcatcgccgcgctaacggagcgcgcctactaccgtagccagcggcccagcctcgaggaggagccggaggaggagccaggcgagggcgggacgcggttcggggcccgatcccgcgctcacgcaccgagtcggggccgccgggcccgatctgcaccagccggaggcggcggggcccgggcgccccgcagccgtagcccagacacccgcaagagagtgcgtttcgccgacgcactggggttggagctggctgtcgtgcgccgcttccgtcccggtgagctgccccgggtgccccgccacgtgcagatccaattgcagagggacgccctccgccacttcgcgccctgccagccccgcgcccgcggcctccaggaggcgcgcgccgccctggagccggccagcgagcccggcttcgccgcccgcttgctgacgcagcgcatctgcctggaacgcgccgaggcgggcccgctgggcgtggccgggagcgcgcgcgtggtggacctggcctacgagaagcgcgtgagcgtgcgctggagcgccgacggctggcggagccaacgcgaggcgccagccgcctacgccggtccggccccgcccccgccgcgcgccgaccgcttcgccttccgcctgcccgcgccgccgattgggggcgccctgctcttcgccttgcgctaccgtgtgacaggtcacgagttctgggacaacaacggcggccgtgactatgctctacgtgggcccgagcacccgggcagtggcggagctccggagccgcagggctggatccactttatctgagacgaggcgcctgcggccgacggcggaaaacaccaaaggcacccgggggcggggcgacccgatgtggcggggaggagtaggagagaccaggattggcgggagcggtccaagggagtcaagccggggagggcgaaaagggtggggaaatcaggggcgtgggggcgtgggggcgtgggggcggggggagtgagcggaaccaaagaagctccgggagatccgggtgttaaaagctggttggatgtgagtggaaggaactcagaatataggaggaaggagacccgaaacggcaccggagggattataaaaaaaggaaaagaatggggatgatggtggccttcccttcagtgagtgggctctgggagaaagggaggaggtccatcaggcctaggcggttgaagaaggttaagaaccttttggagatggaggaggtatgatgtgaagtagcccacccagtcgaaggcatttacattgctggcgcattccctcttcttaccggccttttccacctcagatccccctgtcctacccatcctagctttaactcagccataattgccttgcttaatcccaggaacctggccactgctccttggtccttggcattatgacgggattcccttgtcacctctgacagttcctggctgcggtgtccgcggactggctggggagtgatgacaggtagctatcagagctccagcctccaggcagctttagggattaaaacggaggccaaagcaactccagacctgtttttatagccaaatactgagcctcaggggttgtacactcaggggcttccaggaaaatgccagccttacttttctggggtgccttttaataacctccaagcactttgtggactgtttgtcgagggacggtgaatcagaagaatcactattctgatttcctttgtctccgaagaggaagtccctgactagctatataactttgggcgagttacctctcacttctttgtgccccagtgttctccttgggaaactggatttaggttagatgaccttttaaggctccttgtatgatattttgtgatctgtacatggcagagtatagattaggagccaaattttccaacctagtgctatggttcagaatacatagcaccccaagcgtctggctggagccgaggatgggtcctccagtttttggcacagatgttccggagcccaggaagcatcccataaccaaccttcagccccaccgccacccccagcgtattccagagccgcttccaaaccacagcctatcctctgctccatttcactcttgccctcacagactttcagcctccatgctctgagacaactgtggaagggatggaaaccctattttcttttctccaagaccatggttggtctgcttccctcactcgggctccttgacagtcttctagaagagagaaggaggaaaagaagcagttcctgatgttacaaatgaacaaggatctcccagccttagtctttgagaaaagatggctgaaagagaggaactctccaagtcattccgcaaacaaatgcccatttaaacatcatccttgtcttgtgaagaaaacaggaagaatgtcatgtaccatgtggatcaccttcagttcaaagttgcagcaaagtgaagaaagaaactactggaagccacccagcaatgcactgtttagtcatcaattaggagcccatgggaggataatagggagactgggtggaggctcagtgtgtaataatctcttgtctaatgtatgtgtgtcactgccatgttgtatgaacaatagtgagggctcacatttacttaacacttgtgtgcgcaaatctgggtttttcttcctttccagaactatgactcgatcataaaatctgttttgtttgcatgcatgcccaaaacaaccctgtaagtagaacattgtcattatctctgttttagagatgaggaaacaggctcagagaagctcagaaatttgttcaagatcgcacagctagtaaatggcagaagtaggattgtgaacccagggaatctccagagcctctgtgtaaccatgatgttatattttttttcctctttaaaaacaaaatttaaaaccttgctataatctcttattaggaaatgatcatagtttctgactgtgctctgccttcccatcctgccaatctcctggactggcttggagaagacagggggcccccgagcttcatctgtgactcgaaggagtttgctgctgtctcctgtgtcagtgtcccatctatgcaggatcagcacaggacccccctcaccttcccacttacactctagcctttccatacattggaattctctcctggccctagccagcgctccacacctgttggtgtgccacctccctccctcttcccccactggccttgaacaggcaaaccccctaatgtcgccactaggttgggtccgtgactaggacacctgctagagggtctgtgcttgggccttttctaggaatcccgatgttactgggtaagtgccaactctgtgggcagaatgctaatgataatcctgttccctgacctctttctcagaagtaccctggctcactctccccaatctcagctttatagaacaacattttggtcttgattattcccatatcaagctgccccagggcttcggtaagctgttagttgccccactgcctcaaggctgggtctggctgagctacttcttaggcacacaaatagtgggtgtctccttggaacctgacacaaaactatcagtgctaccaagccttgtaaaatagggaggaaactaatatttcttgagtggcttctgagtgcctggtgctttcgcggctctctggagagattccttgccctgatggctttggtgtgtactcctctcccaggacttcagcactgagattttcccaaccccctggcttttcctcaccttgggttgagttgatccggcactaccacaaaccccaccatctgcaaaccaaccaagattaggcagtatgccctttccgtcttgcactgctcttccaaaacttccatctgtatttctcacaccctcagtaagcaaagctgagtgtgcatggacagagctgcatccactgctttctcccagcgggtgcagtctaatctgacacggggaacactaggagtttagcggaatcttcagccaccctattaatgtgttacgcattaggcattgtagtggaaactcctctgatggctcatgactatatgaacaggagcaatttggaatataacatgtcagctgtggactgggaagtgccgtgagagaaaacactacctgggtcataggcttgggtccctgaggcaacccagcagggacactgttgcccattcctctcatccagactgcaggtgtcttcctacacctccctgtcccatagcctccgtcctgttttttgtttgtttgtttttctttgtgaatgtagaaaaacatttcatcatgagccctagctcctcagttttccacctaacacccacattcccttgtttctaactgccgtgtttttctggagcctgctgggatctttgcagtttgcaggtcatagaatcagacatgaaaaggcttctcttccgacgtcattggttcctggctcctttacagatgagaacacaggtccagaggtgagaaatgactctagcagggtcatagaatttgttagtgcagctcaagatgggacttaaactcaggcctcctgatcacccattcccaggctaggaaacaggtctctgctcggtgtggtggttcatacctgtaatcgcaacactttgggaggctgaggcaggagcattgcttgagcccaggagttcgagaccagtctgagcaacatagtgggaccctgtctctacaaaaacttttaaaattagctgggcatggtggcacacatctgtattcccagctactcaggaagctgagacaggaggatcgcttgagcccaggagttggaggttactgagctatgatcgcaccactgcactccagcttggtgacagtgagaccctcaaaaaaaaaaagaaaagaaagaggtctctacacaagcccgtgattcttcatggcaagggataacatcagaaatgtttcattttctgctattagtttccattcctttccccatccaggcataaagagaaacaaaagacaatgatggtattctctgtgtcctcagctttggcacttttgttgatgttgctaaggagcagtgaccttgctaaaaagactgaataatccacccactgaatagctaacctggggaggaaatgaaaatttcctttgtggatctccccaaatccattgttgtcaccaggccctcccagaacctcctcagttccttcacagtgcaaccctgtgtacttggcccgcaacccaatagtattgtgcctcacttcaccttccatgggcaactgccctcccttctggacataaaacctcatattttaaataaagttgaaatatgaaaagaaagta

SEQ ID NO: 299619 - DNA, 5490 bp, Homo sapiens
cacgctcagagcagaccgctagcaggaggcaggatgtgatagtctaagaccctggaagctgacggccagagggagggaagggtggtcacagaggagaggcaaagcaacgggaggtggaggatcctggaggtgtctgcaaggagaatacacagcagcgaggggctgcagaagcggacccagcgacttctgcgctgacgcggggcgggcgggagagaggaagagaggggagcgcggtggcgctgcgagctggccccgccggggaaggggctgccatgtcccgtgagcggcccccgggcaccgacattccccgcaacctgagcttcatcgccgcgctaacggagcgcgcctactaccgtagccagcggcccagcctcgaggaggagccggaggaggagccaggcgagggcgggacgcggttcggggcccgatcccgcgctcacgcaccgagtcggggccgccgggcccgatctgcaccagccggaggcggcggggcccgggcgccccgcagccgtagcccagacacccgcaagagagtgcgtttcgccgacgcactggggttggagctggctgtcgtgcgccgcttccgtcccggtgagctgccccgggtgccccgccacgtgcagatccaattgcagagggacgccctccgccacttcgcgccctgccagccccgcgcccgcggcctccaggaggcgcgcgccgccctggagccggccagcgagcccggcttcgccgcccgcttgctgacgcagcgcatctgcctggaacgcgccgaggcgggcccgctgggcgtggccgggagcgcgcgcgtggtggacctggcctacgagaagcgcgtgagcgtgcgctggagcgccgacggctggcggagccaacgcgaggcgccagccgcctacgccggtccggccccgcccccgccgcgcgccgaccgcttcgccttccgcctgcccgcgccgccgattgggggcgccctgctcttcgccttgcgctaccgtgtgacaggtcacgagttctgggacaacaacggcggccgtgactatgctctacgtgggcccgagcacccgggcagtggcggagctccggagccgcagggctggatccactttatctgagacgaggcgcctgcggccgacggcggaaaacaccaaaggcacccgggggcggggcgacccgatgtggcggggaggagtaggagagaccaggattggcgggagcggtccaagggagtcaagccggggagggcgaaaagggtggggaaatcaggggcgtgggggcgtgggggcgtgggggcggggggagtgagcggaaccaaagaagctccgggagatccgggtgttaaaagctggttggatgtgagtggaaggaactcagaatataggaggaaggagacccgaaacggcaccggagggattataaaaaaaggaaaagaatggggatgatggtggccttcccttcagtgagtgggctctgggagaaagggaggaggtccatcaggcctaggcggttgaagaaggttaagaaccttttggagatggaggaggtatgatgtgaagtagcccacccagtcgaaggcatttacattgctggcgcattccctcttcttaccggccttttccacctcagatccccctgtcctacccatcctagctttaactcagccataattgccttgcttaatcccaggaacctggccactgctccttggtccttggcattatgacgggattcccttgtcacctctgacagttcctggctgcggtgtccgcggactggctggggagtgatgacaggtagctatcagagctccagcctccaggcagctttagggattaaaacggaggccaaagcaactccagacctgtttttatagccaaatactgagcctcaggggttgtacactcaggggcttccaggaaaatgccagccttacttttctggggtgccttttaataacctccaagcactttgtggactgtttgtcgagggacggtgaatcagaagaatcactattctgatttcctttgtctccgaagaggaagtccctgactagctatataactttgggcgagttacctctcacttctttgtgccccagtgttctccttgggaaactggatttaggttagatgaccttttaaggctccttgtatgatattttgtgatctgtacatggcagagtatagattaggagccaaattttccaacctagtgctatggttcagaatacatagcaccccaagcgtctggctggagccgaggatgggtcctccagtttttggcacagatgttccggagcccaggaagcatcccataaccaaccttcagccccaccgccacccccagcgtattccagagccgcttccaaaccacagcctatcctctgctccatttcactcttgccctcacagactttcagcctccatgctctgagacaactgtggaagggatggaaaccctattttcttttctccaagaccatggttggtctgcttccctcactcgggctccttgacagtcttctagaagagagaaggaggaaaagaagcagttcctgatgttacaaatgaacaaggatctcccagaaaacaggaagaatgtcatgtaccatgtggatcaccttcagttcaaagttgcagcaaagtgaagaaagaaactactggaagccacccagcaatgcactgtttagtcatcaattaggagcccatgggaggataatagggagactgggtggaggctcagtgtgtaataatctcttgtctaatgtatgtgtgtcactgccatgttgtatgaacaatagtgagggctcacatttacttaacacttgtgtgcgcaaatctgggtttttcttcctttccagaactatgactcgatcataaaatctgttttgtttgcatgcatgcccaaaacaaccctgtaagtagaacattgtcattatctctgttttagagatgaggaaacaggctcagagaagctcagaaatttgttcaagatcgcacagctagtaaatggcagaagtaggattgtgaacccagggaatctccagagcctctgtgtaaccatgatgttatattttttttcctctttaaaaacaaaatttaaaaccttgctataatctcttattaggaaatgatcatagtttctgactgtgctctgccttcccatcctgccaatctcctggactggcttggagaagacagggggcccccgagcttcatctgtgactcgaaggagtttgctgctgtctcctgtgtcagtgtcccatctatgcaggatcagcacaggacccccctcaccttcccacttacactctagcctttccatacattggaattctctcctggccctagccagcgctccacacctgttggtgtgccacctccctccctcttcccccactggccttgaacaggcaaaccccctaatgtcgccactaggttgggtccgtgactaggacacctgctagagggtctgtgcttgggccttttctaggaatcccgatgttactgggtaagtgccaactctgtgggcagaatgctaatgataatcctgttccctgacctctttctcagaagtaccctggctcactctccccaatctcagctttatagaacaacattttggtcttgattattcccatatcaagctgccccagggcttcggtaagctgttagttgccccactgcctcaaggctgggtctggctgagctacttcttaggcacacaaatagtgggtgtctccttggaacctgacacaaaactatcagtgctaccaagccttgtaaaatagggaggaaactaatatttcttgagtggcttctgagtgcctggtgctttcgcggctctctggagagattccttgccctgatggctttggtgtgtactcctctcccaggacttcagcactgagattttcccaaccccctggcttttcctcaccttgggttgagttgatccggcactaccacaaaccccaccatctgcaaaccaaccaagattaggcagtatgccctttccgtcttgcactgctcttccaaaacttccatctgtatttctcacaccctcagtaagcaaagctgagtgtgcatggacagagctgcatccactgctttctcccagcgggtgcagtctaatctgacacggggaacactaggagtttagcggaatcttcagccaccctattaatgtgttacgcattaggcattgtagtggaaactcctctgatggctcatgactatatgaacaggagcaatttggaatataacatgtcagctgtggactgggaagtgccgtgagagaaaacactacctgggtcataggcttgggtccctgaggcaacccagcagggacactgttgcccattcctctcatccagactgcaggtgtcttcctacacctccctgtcccatagcctccgtcctgttttttgtttgtttgtttttctttgtgaatgtagaaaaacatttcatcatgagccctagctcctcagttttccacctaacacccacattcccttgtttctaactgccgtgtttttctggagcctgctgggatctttgcagtttgcaggtcatagaatcagacatgaaaaggcttctcttccgacgtcattggttcctggctcctttacagatgagaacacaggtccagaggtgagaaatgactctagcagggtcatagaatttgttagtgcagctcaagatgggacttaaactcaggcctcctgatcacccattcccaggctaggaaacaggtctctgctcggtgtggtggttcatacctgtaatcgcaacactttgggaggctgaggcaggagcattgcttgagcccaggagttcgagaccagtctgagcaacatagtgggaccctgtctctacaaaaacttttaaaattagctgggcatggtggcacacatctgtattcccagctactcaggaagctgagacaggaggatcgcttgagcccaggagttggaggttactgagctatgatcgcaccactgcactccagcttggtgacagtgagaccctcaaaaaaaaaaagaaaagaaagaggtctctacacaagcccgtgattcttcatggcaagggataacatcagaaatgtttcattttctgctattagtttccattcctttccccatccaggcataaagagaaacaaaagacaatgatggtattctctgtgtcctcagctttggcacttttgttgatgttgctaaggagcagtgaccttgctaaaaagactgaataatccacccactgaatagctaacctggggaggaaatgaaaatttcctttgtggatctccccaaatccattgttgtcaccaggccctcccagaacctcctcagttccttcacagtgcaaccctgtgtacttggcccgcaacccaatagtattgtgcctcacttcaccttccatgggcaactgccctcccttctggacataaaacctcatattttaaataaagttgaaatatgaaaagaaagta

SEQ ID NO: 299620 - DNA, 5857 bp, Homo sapiens
cacgctcagagcagaccgctagcaggaggcaggatgtgatagtctaagaccctggaagctgacggccagagggagggaagggtggtcacagaggagaggcaaagcaacgggaggtggaggatcctggaggtgtctgcaaggagaatacacagcagcgaggggctgcagaagcggacccagcgacttctgcgctgacgcggggcgggcgggagagaggaagagaggggagcgcggtggcgctgcgagctggccccgccggggaaggggctgccatgtcccgtgagcggcccccgggcaccgacattccccgcaacctgagcttcatcgccgcgctaacggagcgcgcctactaccgtagccagcggcccagcctcgaggaggagccggaggaggagccaggcgagggcgggacgcggttcggggcccgatcccgcgctcacgcaccgagtcggggccgccgggcccgatctgcaccagccggaggcggcggggcccgggcgccccgcagccgtagcccagacacccgcaagagagtgcgtttcgccgacgcactggggttggagctggctgtcgtgcgccgcttccgtcccggtgagctgccccgggtgccccgccacgtgcagatccaattgcagagggacgccctccgccacttcgcgccctgccagccccgcgcccgcggcctccaggaggcgcgcgccgccctggagccggccagcgagcccggcttcgccgcccgcttgctgacgcagcgcatctgcctggaacgcgccgaggcgggcccgctgggcgtggccgggagcgcgcgcgtggtggacctggcctacgagaagcgcgtgagcgtgcgctggagcgccgacggctggcggagccaacgcgaggcgccagccgcctacgccggtccggccccgcccccgccgcgcgccgaccgcttcgccttccgcctgcccgcgccgccgattgggggcgccctgctcttcgccttgcgctaccgtgtgacaggtcacgagttctgggacaacaacggcggccgtgactatgctctacgtgggcccgagcacccgggcagtggcggagctccggagccgcagggctggatccactttatctgagacgaggcgcctgcggccgacggcggaaaacaccaaaggcacccgggggcggggcgacccgatgtggcggggaggagtaggagagaccaggattggcgggagcggtccaagggagtcaagccggggagggcgaaaagggtggggaaatcaggggcgtgggggcgtgggggcgtgggggcggggggagtgagcggaaccaaagaagctccgggagatccgggtgttaaaagctggttggatgtgagtggaaggaactcagaatataggaggaaggagacccgaaacggcaccggagggattataaaaaaaggaaaagaatggggatgatggtggccttcccttcagtgagtgggctctgggagaaagggaggaggtccatcaggcctaggcggttgaagaaggttaagaaccttttggagatggaggaggtatgatgtgaagtagcccacccagtcgaaggcatttacattgctggcgcattccctcttcttaccggccttttccacctcagatccccctgtcctacccatcctagctttaactcagccataattgccttgcttaatcccaggaacctggccactgctccttggtccttggcattatgacgggattcccttgtcacctctgacagttcctggctgcggtgtccgcggactggctggggagtgatgacaggtagctatcagagctccagcctccaggcagctttagggattaaaacggaggccaaagcaactccagacctgtttttatagccaaatactgagcctcaggggttgtacactcaggggcttccaggaaaatgccagccttacttttctggggtgccttttaataacctccaagcactttgtggactgtttgtcgagggacggtgaatcagaagaatcactattctgatttcctttgtctccgaagaggaagtccctgactagctatataactttgggcgagttacctctcacttctttgtgccccagtgttctccttgggaaactggatttaggttagatgaccttttaaggctccttgtatgatattttgtgatctgtacatggcagagtatagattaggagccaaattttccaacctagtgctatggttcagaatacatagcaccccaagcgtctggctggagccgaggatgggtcctccagtttttggcacagatgttccggagcccaggaagcatcccataaccaaccttcagccccaccgccacccccagcgtattccagagccgcttccaaaccacagcctatcctctgctccatttcactcttgccctcacagactttcagcctccatgctctgagacaactgtggaagggatggaaaccctattttcttttctccaagaccatggttggtctgcttccctcactcgggctccttgacagtcttctagaagagagaaggaggaaaagaagcagttcctgatgttacaaatgaacaaggatctcccagccttagtctttgagaaaagatggctgaaagagaggaactctccaagtcattccgcaaacaaatgcccatttaaacatcatccttgtcttgtgaagaaaacaggaagaatgtcatgtaccatgtggatcaccttcagttcaaagttgcagcaaagtgaagaaagaaactactggaagccacccagcaatgcactgtttagtcatcaattaggagcccatgggaggataatagggagactgggtggaggctcagtgtgtaataatctcttgtctaatgtatgtgtgtcactgccatgttgtatgaacaatagtgagggctcacatttacttaacacttgtgtgcgcaaatctgggtttttcttcctttccagaactatgactcgatcataaaatctgttttgtttgcatgcatgcccaaaacaaccctgtaagtagaacattgtcattatctctgttttagagatgaggaaacaggctcagagaagctcagaaatttgttcaagatcgcacagctagtaaatggcagaagtaggattgtgaacccagggaatctccagagcctctgtgtaaccatgatgttatattttttttcctctttaaaaacaaaatttaaaaccttgctataatctcttattaggaaatgatcatagtttctgactgtgctctgccttcccatcctgccaatctcctggactggcttggagaagacagggggcccccgagcttcatctgtgactcgaaggagtttgctgctgtctcctgtgtcagtgtcccatctatgcaggatcagcacaggacccccctcaccttcccacttacactctagcctttccatacattggaattctctcctggccctagccagcgctccacacctgttggtgtgccacctccctccctcttcccccactggccttgaacaggcaaaccccctaatgtcgccactaggttgggtccgtgactaggacacctgctagagggtctgtgcttgggccttttctaggaatcccgatgttactgggtaagtgccaactctgtgggcagaatgctaatgataatcctgttccctgacctctttctcagaagtaccctggctcactctccccaatctcagctttatagaacaacattttggtcttgattattcccatatcaagctgccccagggcttcggtaagctgttagttgccccactgcctcaaggctgggtctggctgagctacttcttaggcacacaaatagtgggtgtctccttggaacctgacacaaaactatcagtgctaccaagccttgtaaaatagggaggaaactaatatttcttgagtggcttctgagtgcctggtgctttcgcggctctctggagagattccttgccctgatggctttggtgtgtactcctctcccaggacttcagcactgagattttcccaaccccctggcttttcctcaccttgggttgagttgatccggcactaccacaaaccccaccatctgcaaaccaaccaagattaggcagtatgccctttccgtcttgcactgctcttccaaaacttccatctgtatttctcacaccctcagtaagcaaagctgagtgtgcatggacagagctgcatccactgctttctcccagcgggtgcagtctaatctgacacggggaacactaggagtttagcggaatcttcagccaccctattaatgtgttacgcattaggcattgtagtggaaactcctctgatggctcatgactatatgaacaggagcaatttggaatataacatgtcagctgtggactgggaagtgccgtgagagaaaacactacctgggtcataggcttgggtccctgaggcaacccagcagggacactgttgcccattcctctcatccagactgcaggtgtcttcctacacctccctgtcccatagcctccgtcctgttttttgtttgtttgtttttctttgtgaatgtagaaaaacatttcatcatgagccctagctcctcagttttccacctaacacccacattcccttgtttctaactgccgtgtttttctggagcctgctgggatctttgcagtttgcaggtcatagaatcagacatgaaaaggcttctcttccgacgtcattggttcctggctcctttacagatgagaacacaggtccagaggtgagaaatgactctagcagggtcatagaatttgttagtgcagctcaagatgggacttaaactcaggcctcctgatcacccattcccaggctaggaaacaggtctctgctcggtgtggtggttcatacctgtaatcgcaacactttgggaggctgaggcaggagcattgcttgagcccaggagttcgagaccagtctgagcaacatagtgggaccctgtctctacaaaaacttttaaaattagctgggcatggtggcacacatctgtattcccagctactcaggaagctgagacaggaggatcgcttgagcccaggagttggaggttactgagctatgatcgcaccactgcactccagcttggtgacagtgagaccctcaaaaaaaaaaagaaaagaaagaggtctctacacaagcccgtgattcttcatggcaagggataacatcagaaatgtttcattttctgctattagtttccattcctttccccatccaggcataaagagaaacaaaagacaatgatggtattctctgtgtcctcagctttggcacttttgttgatgttgctaaggagcagtgaccttgctaaaaagactgaataatccacccactgaatagctaacctggggaggaaatgaaaatttcctttgtggatctccccaaatccattgttgtcaccaggccctcccagaacctcctcagttccttcacagtgcaaccctgtgtacttggcccgcaacccaatagtattgtgcctcacttcaccttccatgggcaactgccctcccttctggacataaaacctcatattttaaataaagttgaaatatgaaaagaaagtatgtcataagatattcagaagtattgtgtgttttgggctaagggcagcaagagactcagaggcaagattccctccttgactcaatttcttggtcaccttgttttttgtgtgtgtgtgtccagaaaaatttaataagtttgcttaaattattataaagttgaaccactgaaatgttcactgaaacattttgacttgcattaatgctttacttccccacctacatttacattaaaaattcacacacaaatgaaaattgaaaactgacaacacctg

SEQ ID NO: 299621 - DNA, 5089 bp, Homo sapiens
cacgctcagagcagaccgctagcaggaggcaggatgtgatagtctaagaccctggaagctgacggccagagggagggaagggtggtcacagaggagaggcaaagcaacgggaggtggaggatcctggaggtgtctgcaaggagaatacacagcagcgaggggctgcagaagcggacccagcgacttctgcgctgacgcggggcgggcgggagagaggaagagaggggagcgcggtggcgctgcgagctggccccgccggggaaggggctgccatgtcccgtgagcggcccccgggcaccgacattccccgcaacctgagcttcatcgccgcgctaacggagcgcgcctactaccgtagccagcggcccagcctcgaggaggagccggaggaggagccaggcgagggcgggacgcggttcggggcccgatcccgcgctcacgcaccgagtcggggccgccgggcccgatctgcaccagccggaggcggcggggcccgggcgccccgcagccgtagcccagacacccgcaagagagtgcgtttcgccgacgcactggggttggagctggctgtcgtgcgccgcttccgtcccggtgagctgccccgggtgccccgccacgtgcagatccaattgcagagggacgccctccgccacttcgcgccctgccagccccgcgcccgcggcctccaggaggcgcgcgccgccctggagccggccagcgagcccggcttcgccgcccgcttgctgacgcagcgcatctgcctggaacgcgccgaggcgggcccgctgggcgtggccgggagcgcgcgcgtggtggacctggcctacgagaagcgcgtgagcgtgcgctggagcgccgacggctggcggagccaacgcgaggcgccagccgcctacgccggtccggccccgcccccgccgcgcgccgaccgcttcgccttccgcctgcccgcgccgccgattgggggcgccctgctcttcgccttgcgctaccgtgtgacaggtcacgagttctgggacaacaacggcggccgtgactatgctctacgtgggcccgagcacccgggcagtggcggagctccggagccgcagggctggatccactttatctgagacgaggcgcctgcggccgacggcggaaaacaccaaaggcacccgggggcggggcgacccgatgtggcggggaggagtaggagagaccaggattggcgggagcggtccaagggagtcaagccggggagggcgaaaagggtggggaaatcaggggcgtgggggcgtgggggcgtgggggcggggggagtgagcggaaccaaagaagctccgggagatccgggtgttaaaagctggttggatgtgagtggaaggaactcagaatataggaggaaggagacccgaaacggcaccggagggattataaaaaaaggaaaagaatggggatgatggtggccttcccttcagtgagtgggctctgggagaaagggaggaggtccatcaggcctaggcggttgaagaaggttaagaaccttttggagatggaggaggtatgatgtgaagtagcccacccagtcgaaggcatttacattgctggcgcattccctcttcttaccggccttttccacctcagatccccctgtcctacccatcctagctttaactcagccataattgccttgcttaatcccaggaacctggccactgctccttggtccttggcattatgacgggattcccttgtcacctctgacagttcctggctgcggtgtccgcggactggctggggagtgatgacaggtagctatcagagctccagcctccaggcagctttagggattaaaacggaggccaaagcaactccagacctgtttttatagccaaatactgagcctcaggggttgtacactcaggggcttccaggaaaatgccagccttacttttctggggtgccttttaataacctccaagcactttgtggactgtttgtcgagggacggtgaatcagaagaatcactattctgatttcctttgtctccgaagaggaagtccctgactagctatataactttgggcgagttacctctcacttctttgtgccccagtgttctccttgggaaactggatttaggttagatgaccttttaaggctccttgtatgatattttgtgatctgtacatggcagagtatagattaggagccaaattttccaacctagtgctatggttcagaatacatagcaccccaagcgtctggctggagccgaggatgggtcctccagtttttggcacagatgttccggagcccaggaagcatcccataaccaaccttcagccccaccgccacccccagcgtattccagagccgcttccaaaccacagcctatcctctgctccatttcactcttgccctcacagactttcagcctccatgctctgagacaactgtggaagggatggaaaccctattttcttttctccaagaccatggttggtctgcttccctcactcgggctccttgacagtcttctagaagagagaaggaggaaaagaagcagttcctgatgttacaaatgaacaaggatctcccagccttagtctttgagaaaagatggctgaaagagaggaactctccaagtcattccgcaaacaaatgcccatttaaacatcatccttgtcttgtgaagaaaacaggaagaatgtcatgtaccatgtggatcaccttcagttcaaagttgcagcaaagtgaagaaagaaactactggaagccacccagcaatgcactgtttagtcatcaattaggagcccatgggaggataatagggagactgggtggaggctcagtgtgtaataatctcttgtctaatgtatgtgtgtcactgccatgttgtatgaacaatagtgagggctcacatttacttaacacttgtgtgcgcaaatctgggtttttcttcctttccagaactatgactcgatcataaaatctgttttgtttgcatgcatgcccaaaacaaccctgtaagtagaacattgtcattatctctgttttagagatgaggaaacaggctcagagaagctcagaaatttgttcaagatcgcacagctagtaaatggcagaagtaggattgtgaacccagggaatctccagagcctctgtgtaaccatgatgttatattttttttcctctttaaaaacaaaatttaaaaccttgctataatctcttattaggaaatgatcatagtttctgactgtgctctgccttcccatcctgccaatctcctggactggcttggagaagacagggggcccccgagcttcatctgtgactcgaaggagtttgctgctgtctcctgtgtcagtgtcccatctatgcaggatcagcacaggacccccctcaccttcccacttacactctagcctttccatacattggaattctctcctggccctagccagcgctccacacctgttggtgtgccacctccctccctcttcccccactggccttgaacaggcaaaccccctaatgtcgccactaggttgggtccgtgactaggacacctgctagagggtctgtgcttgggccttttctaggaatcccgatgttactgggtaagtgccaactctgtgggcagaatgctaatgataatcctgttccctgacctctttctcagaagtaccctggctcactctccccaatctcagctttatagaacaacattttggtcttgattattcccatatcaagctgccccagggcttcggtaagctgttagttgccccactgcctcaaggctgggtctggctgagctacttcttaggcacacaaatagtgggtgtctccttggaacctgacacaaaactatcagtgctaccaagccttgtaaaatagggaggaaactaatatttcttgagtggcttctgagtgcctggtgctttcgcggctctctggagagattccttgccctgatggctttggtgtgtactcctctcccaggacttcagcactgagattttcccaaccccctggcttttcctcaccttgggttgagttgatccggcactaccacaaaccccaccatctgcaaaccaaccaagattaggcagtatgccctttccgtcttgcactgctcttccaaaacttccatctgtatttctcacaccctcagtaagcaaagctgagtgtgcatggacagagctgcatccactgctttctcccagcgggtgcagtctaatctgacacggggaacactaggagtttagcggaatcttcagccaccctattaatgtgttacgcattaggcattgtagtggaaactcctctgatggctcatgactatatgaacaggagcaatttggaatataacatgtcagctgtggactgggaagtgccgtgagagaaaacactacctgggtcataggcttgggtccctgaggcaacccagcagggacactgttgcccattcctctcatccagactgcaggtgtcttcctacacctccctgtcccatagcctccgtcctgttttttgtttgtttgtttttctttgtgaatgtagaaaaacatttcatcatgagccctagctcctcagttttccacctaacacccacattcccttgtttctaactgccgtgtttttctggagcctgctgggatctttgcagtttgcaggtcatagaatcagacatgaaaaggcttctcttccgacgtcattggttcctggctcctttacagatgagaacacaggtccagagcataaagagaaacaaaagacaatgatggtattctctgtgtcctcagctttggcacttttgttgatgttgctaaggagcagtgaccttgctaaaaagactgaataatccacccactgaatagctaacctggggaggaaatgaaaatttcctttgtggatctccccaaatccattgttgtcaccaggccctcccagaacctcctcagttccttcacagtgcaaccctgtgtacttggcccgcaacccaatagtattgtgcctcacttcaccttccatgggcaactgccctcccttctggacataaaacctcatattttaaataaagttgaaatatgaaaagaaagta

SEQ ID NO: 299622 - DNA, 5126 bp, Homo sapiens
cacgctcagagcagaccgctagcaggaggcaggatgtgatagtctaagaccctggaagctgacggccagagggagggaagggtggtcacagaggagaggcaaagcaacgggaggtggaggatcctggaggtgtctgcaaggagaatacacagcagcgaggggctgcagaagcggacccagcgacttctgcgctgacgcggggcgggcgggagagaggaagagaggggagcgcggtggcgctgcgagctggccccgccggggaaggggctgccatgtcccgtgagcggcccccgggcaccgacattccccgcaacctgagcttcatcgccgcgctaacggagcgcgcctactaccgtagccagcggcccagcctcgaggaggagccggaggaggagccaggcgagggcgggacgcggttcggggcccgatcccgcgctcacgcaccgagtcggggccgccgggcccgatctgcaccagccggaggcggcggggcccgggcgccccgcagccgtagcccagacacccgcaagagagtgcgtttcgccgacgcactggggttggagctggctgtcgtgcgccgcttccgtcccggtgagctgccccgggtgccccgccacgtgcagatccaattgcagagggacgccctccgccacttcgcgccctgccagccccgcgcccgcggcctccaggaggcgcgcgccgccctggagccggccagcgagcccggcttcgccgcccgcttgctgacgcagcgcatctgcctggaacgcgccgaggcgggcccgctgggcgtggccgggagcgcgcgcgtggtggacctggcctacgagaagcgcgtgagcgtgcgctggagcgccgacggctggcggagccaacgcgaggcgccagccgcctacgccggtccggccccgcccccgccgcgcgccgaccgcttcgccttccgcctgcccgcgccgccgattgggggcgccctgctcttcgccttgcgctaccgtgtgacaggtcacgagttctgggacaacaacggcggccgtgactatgctctacgtgggcccgagcacccgggcagtggcggagctccggagccgcagggctggatccactttatctgagacgaggcgcctgcggccgacggcggaaaacaccaaaggcacccgggggcggggcgacccgatgtggcggggaggagtaggagagaccaggattggcgggagcggtccaagggagtcaagccggggagggcgaaaagggtggggaaatcaggggcgtgggggcgtgggggcgtgggggcggggggagtgagcggaaccaaagaagctccgggagatccgggtgttaaaagctggttggatgtgagtggaaggaactcagaatataggaggaaggagacccgaaacggcaccggagggattataaaaaaaggaaaagaatggggatgatggtggccttcccttcagtgagtgggctctgggagaaagggaggaggtccatcaggcctaggcggttgaagaaggttaagaaccttttggagatggaggaggtatgatgtgaagtagcccacccagtcgaaggcatttacattgctggcgcattccctcttcttaccggccttttccacctcagatccccctgtcctacccatcctagctttaactcagccataattgccttgcttaatcccaggaacctggccactgctccttggtccttggcattatgacgggattcccttgtcacctctgacagttcctggctgcggtgtccgcggactggctggggagtgatgacaggtagctatcagagctccagcctccaggcagctttagggattaaaacggaggccaaagcaactccagacctgtttttatagccaaatactgagcctcaggggttgtacactcaggggcttccaggaaaatgccagccttacttttctggggtgccttttaataacctccaagcactttgtggactgtttgtcgagggacggtgaatcagaagaatcactattctgatttcctttgtctccgaagaggaagtccctgactagctatataactttgggcgagttacctctcacttctttgtgccccagtgttctccttgggaaactggatttaggttagatgaccttttaaggctccttgtatgatattttgtgatctgtacatggcagagtatagattaggagccaaattttccaacctagtgctatggttcagaatacatagcaccccaagcgtctggctggagccgaggatgggtcctccagtttttggcacagatgttccggagcccaggaagcatcccataaccaaccttcagccccaccgccacccccagcgtattccagagccgcttccaaaccacagcctatcctctgctccatttcactcttgccctcacagactttcagcctccatgctctgagacaactgtggaagggatggaaaccctattttcttttctccaagaccatggttggtctgcttccctcactcgggctccttgacagtcttctagaagagagaaggaggaaaagaagcagttcctgatgttacaaatgaacaaggatctcccagagatgaggaaacaggctcagagaagctcagaaatttgttcaagatcgcacagctagtaaatggcagaagtaggattgtgaacccagggaatctccagagcctctgtgtaaccatgatgttatattttttttcctctttaaaaacaaaatttaaaaccttgctataatctcttattaggaaatgatcatagtttctgactgtgctctgccttcccatcctgccaatctcctggactggcttggagaagacagggggcccccgagcttcatctgtgactcgaaggagtttgctgctgtctcctgtgtcagtgtcccatctatgcaggatcagcacaggacccccctcaccttcccacttacactctagcctttccatacattggaattctctcctggccctagccagcgctccacacctgttggtgtgccacctccctccctcttcccccactggccttgaacaggcaaaccccctaatgtcgccactaggttgggtccgtgactaggacacctgctagagggtctgtgcttgggccttttctaggaatcccgatgttactgggtaagtgccaactctgtgggcagaatgctaatgataatcctgttccctgacctctttctcagaagtaccctggctcactctccccaatctcagctttatagaacaacattttggtcttgattattcccatatcaagctgccccagggcttcggtaagctgttagttgccccactgcctcaaggctgggtctggctgagctacttcttaggcacacaaatagtgggtgtctccttggaacctgacacaaaactatcagtgctaccaagccttgtaaaatagggaggaaactaatatttcttgagtggcttctgagtgcctggtgctttcgcggctctctggagagattccttgccctgatggctttggtgtgtactcctctcccaggacttcagcactgagattttcccaaccccctggcttttcctcaccttgggttgagttgatccggcactaccacaaaccccaccatctgcaaaccaaccaagattaggcagtatgccctttccgtcttgcactgctcttccaaaacttccatctgtatttctcacaccctcagtaagcaaagctgagtgtgcatggacagagctgcatccactgctttctcccagcgggtgcagtctaatctgacacggggaacactaggagtttagcggaatcttcagccaccctattaatgtgttacgcattaggcattgtagtggaaactcctctgatggctcatgactatatgaacaggagcaatttggaatataacatgtcagctgtggactgggaagtgccgtgagagaaaacactacctgggtcataggcttgggtccctgaggcaacccagcagggacactgttgcccattcctctcatccagactgcaggtgtcttcctacacctccctgtcccatagcctccgtcctgttttttgtttgtttgtttttctttgtgaatgtagaaaaacatttcatcatgagccctagctcctcagttttccacctaacacccacattcccttgtttctaactgccgtgtttttctggagcctgctgggatctttgcagtttgcaggtcatagaatcagacatgaaaaggcttctcttccgacgtcattggttcctggctcctttacagatgagaacacaggtccagaggtgagaaatgactctagcagggtcatagaatttgttagtgcagctcaagatgggacttaaactcaggcctcctgatcacccattcccaggctaggaaacaggtctctgctcggtgtggtggttcatacctgtaatcgcaacactttgggaggctgaggcaggagcattgcttgagcccaggagttcgagaccagtctgagcaacatagtgggaccctgtctctacaaaaacttttaaaattagctgggcatggtggcacacatctgtattcccagctactcaggaagctgagacaggaggatcgcttgagcccaggagttggaggttactgagctatgatcgcaccactgcactccagcttggtgacagtgagaccctcaaaaaaaaaaagaaaagaaagaggtctctacacaagcccgtgattcttcatggcaagggataacatcagaaatgtttcattttctgctattagtttccattcctttccccatccaggcataaagagaaacaaaagacaatgatggtattctctgtgtcctcagctttggcacttttgttgatgttgctaaggagcagtgaccttgctaaaaagactgaataatccacccactgaatagctaacctggggaggaaatgaaaatttcctttgtggatctccccaaatccattgttgtcaccaggccctcccagaacctcctcagttccttcacagtgcaaccctgtgtacttggcccgcaacccaatagtattgtgcctcacttcaccttccatgggcaactgccctcccttctggacataaaacctcatattttaaataaagttgaaatatgaaaagaaagta

SEQ ID NO: 299623 - DNA, 5215 bp, Homo sapiens
cacgctcagagcagaccgctagcaggaggcaggatgtgatagtctaagaccctggaagctgacggccagagggagggaagggtggtcacagaggagaggcaaagcaacgggaggtggaggatcctggaggtgtctgcaaggagaatacacagcagcgaggggctgcagaagcggacccagcgacttctgcgctgacgcggggcgggcgggagagaggaagagaggggagcgcggtggcgctgcgagctggccccgccggggaaggggctgccatgtcccgtgagcggcccccgggcaccgacattccccgcaacctgagcttcatcgccgcgctaacggagcgcgcctactaccgtagccagcggcccagcctcgaggaggagccggaggaggagccaggcgagggcgggacgcggttcggggcccgatcccgcgctcacgcaccgagtcggggccgccgggcccgatctgcaccagccggaggcggcggggcccgggcgccccgcagccgtagcccagacacccgcaagagagtgcgtttcgccgacgcactggggttggagctggctgtcgtgcgccgcttccgtcccggtgagctgccccgggtgccccgccacgtgcagatccaattgcagagggacgccctccgccacttcgcgccctgccagccccgcgcccgcggcctccaggaggcgcgcgccgccctggagccggccagcgagcccggcttcgccgcccgcttgctgacgcagcgcatctgcctggaacgcgccgaggcgggcccgctgggcgtggccgggagcgcgcgcgtggtggacctggcctacgagaagcgcgtgagcgtgcgctggagcgccgacggctggcggagccaacgcgaggcgccagccgcctacgccggtccggccccgcccccgccgcgcgccgaccgcttcgccttccgcctgcccgcgccgccgattgggggcgccctgctcttcgccttgcgctaccgtgtgacaggtcacgagttctgggacaacaacggcggccgtgactatgctctacgtgggcccgagcacccgggcagtggcggagctccggagccgcagggctggatccactttatctgagacgaggcgcctgcggccgacggcggaaaacaccaaaggcacccgggggcggggcgacccgatgtggcggggaggagtaggagagaccaggattggcgggagcggtccaagggagtcaagccggggagggcgaaaagggtggggaaatcaggggcgtgggggcgtgggggcgtgggggcggggggagtgagcggaaccaaagaagctccgggagatccgggtgttaaaagctggttggatgtgagtggaaggaactcagaatataggaggaaggagacccgaaacggcaccggagggattataaaaaaaggaaaagaatggggatgatggtggccttcccttcagtgagtgggctctgggagaaagggaggaggtccatcaggcctaggcggttgaagaaggttaagaaccttttggagatggaggaggtatgatgtgaagtagcccacccagtcgaaggcatttacattgctggcgcattccctcttcttaccggccttttccacctcagatccccctgtcctacccatcctagctttaactcagccataattgccttgcttaatcccaggaacctggccactgctccttggtccttggcattatgacgggattcccttgtcacctctgacagttcctggctgcggtgtccgcggactggctggggagtgatgacaggtagctatcagagctccagcctccaggcagctttagggattaaaacggaggccaaagcaactccagacctgtttttatagccaaatactgagcctcaggggttgtacactcaggggcttccaggaaaatgccagccttacttttctggggtgccttttaataacctccaagcactttgtggactgtttgtcgagggacggtgaatcagaagaatcactattctgatttcctttgtctccgaagaggaagtccctgactagctatataactttgggcgagttacctctcacttctttgtgccccagtgttctccttgggaaactggatttaggttagatgaccttttaaggctccttgtatgatattttgtgatctgtacatggcagagtatagattaggagccaaattttccaacctagtgctatggttcagaatacatagcaccccaagcgtctggctggagccgaggatgggtcctccagtttttggcacagatgttccggagcccaggaagcatcccataaccaaccttcagccccaccgccacccccagcgtattccagagccgcttccaaaccacagcctatcctctgctccatttcactcttgccctcacagactttcagcctccatgctctgagacaactgtggaagggatggaaaccctattttcttttctccaagaccatggttggtctgcttccctcactcgggctccttgacagtcttctagaagagagaaggaggaaaagaagcagttcctgatgttacaaatgaacaaggatctcccagaactatgactcgatcataaaatctgttttgtttgcatgcatgcccaaaacaaccctgtaagtagaacattgtcattatctctgttttagagatgaggaaacaggctcagagaagctcagaaatttgttcaagatcgcacagctagtaaatggcagaagtaggattgtgaacccagggaatctccagagcctctgtgtaaccatgatgttatattttttttcctctttaaaaacaaaatttaaaaccttgctataatctcttattaggaaatgatcatagtttctgactgtgctctgccttcccatcctgccaatctcctggactggcttggagaagacagggggcccccgagcttcatctgtgactcgaaggagtttgctgctgtctcctgtgtcagtgtcccatctatgcaggatcagcacaggacccccctcaccttcccacttacactctagcctttccatacattggaattctctcctggccctagccagcgctccacacctgttggtgtgccacctccctccctcttcccccactggccttgaacaggcaaaccccctaatgtcgccactaggttgggtccgtgactaggacacctgctagagggtctgtgcttgggccttttctaggaatcccgatgttactgggtaagtgccaactctgtgggcagaatgctaatgataatcctgttccctgacctctttctcagaagtaccctggctcactctccccaatctcagctttatagaacaacattttggtcttgattattcccatatcaagctgccccagggcttcggtaagctgttagttgccccactgcctcaaggctgggtctggctgagctacttcttaggcacacaaatagtgggtgtctccttggaacctgacacaaaactatcagtgctaccaagccttgtaaaatagggaggaaactaatatttcttgagtggcttctgagtgcctggtgctttcgcggctctctggagagattccttgccctgatggctttggtgtgtactcctctcccaggacttcagcactgagattttcccaaccccctggcttttcctcaccttgggttgagttgatccggcactaccacaaaccccaccatctgcaaaccaaccaagattaggcagtatgccctttccgtcttgcactgctcttccaaaacttccatctgtatttctcacaccctcagtaagcaaagctgagtgtgcatggacagagctgcatccactgctttctcccagcgggtgcagtctaatctgacacggggaacactaggagtttagcggaatcttcagccaccctattaatgtgttacgcattaggcattgtagtggaaactcctctgatggctcatgactatatgaacaggagcaatttggaatataacatgtcagctgtggactgggaagtgccgtgagagaaaacactacctgggtcataggcttgggtccctgaggcaacccagcagggacactgttgcccattcctctcatccagactgcaggtgtcttcctacacctccctgtcccatagcctccgtcctgttttttgtttgtttgtttttctttgtgaatgtagaaaaacatttcatcatgagccctagctcctcagttttccacctaacacccacattcccttgtttctaactgccgtgtttttctggagcctgctgggatctttgcagtttgcaggtcatagaatcagacatgaaaaggcttctcttccgacgtcattggttcctggctcctttacagatgagaacacaggtccagaggtgagaaatgactctagcagggtcatagaatttgttagtgcagctcaagatgggacttaaactcaggcctcctgatcacccattcccaggctaggaaacaggtctctgctcggtgtggtggttcatacctgtaatcgcaacactttgggaggctgaggcaggagcattgcttgagcccaggagttcgagaccagtctgagcaacatagtgggaccctgtctctacaaaaacttttaaaattagctgggcatggtggcacacatctgtattcccagctactcaggaagctgagacaggaggatcgcttgagcccaggagttggaggttactgagctatgatcgcaccactgcactccagcttggtgacagtgagaccctcaaaaaaaaaaagaaaagaaagaggtctctacacaagcccgtgattcttcatggcaagggataacatcagaaatgtttcattttctgctattagtttccattcctttccccatccaggcataaagagaaacaaaagacaatgatggtattctctgtgtcctcagctttggcacttttgttgatgttgctaaggagcagtgaccttgctaaaaagactgaataatccacccactgaatagctaacctggggaggaaatgaaaatttcctttgtggatctccccaaatccattgttgtcaccaggccctcccagaacctcctcagttccttcacagtgcaaccctgtgtacttggcccgcaacccaatagtattgtgcctcacttcaccttccatgggcaactgccctcccttctggacataaaacctcatattttaaataaagttgaaatatgaaaagaaagta

SEQ ID NO: 299624 - DNA, 2614 bp, Homo sapiens
cacgctcagagcagaccgctagcaggaggcaggatgtgatagtctaagaccctggaagctgacggccagagggagggaagggtggtcacagaggagaggcaaagcaacgggaggtggaggatcctggaggtgtctgcaaggagaatacacagcagcgaggggctgcagaagcggacccagcgacttctgcgctgacgcggggcgggcgggagagaggaagagaggggagcgcggtggcgctgcgagctggccccgccggggaaggggctgccatgtcccgtgagcggcccccgggcaccgacattccccgcaacctgagcttcatcgccgcgctaacggagcgcgcctactaccgtagccagcggcccagcctcgaggaggagccggaggaggagccaggcgagggcgggacgcggttcggggcccgatcccgcgctcacgcaccgagtcggggccgccgggcccgatctgcaccagccggaggcggcggggcccgggcgccccgcagccgtagcccagacacccgcaagagagtgcgtttcgccgacgcactggggttggagctggctgtcgtgcgccgcttccgtcccggtgagctgccccgggtgccccgccacgtgcagatccaattgcagagggacgccctccgccacttcgcgccctgccagccccgcgcccgcggcctccaggaggcgcgcgccgccctggagccggccagcgagcccggcttcgccgcccgcttgctgacgcagcgcatctgcctggaacgcgccgaggcgggcccgctgggcgtggccgggagcgcgcgcgtggtggacctggcctacgagaagcgcgtgagcgtgcgctggagcgccgacggctggcggagccaacgcgaggcgccagccgcctacgccggtccggccccgcccccgccgcgcgccgaccgcttcgccttccgcctgcccgcgccgccgattgggggcgccctgctcttcgccttgcgctaccgtgtgacaggtcacgagttctgggacaacaacggcggccgtgactatgctctacgtgggcccgagcacccgggcagtggcggagctccggagccgcagggctggatccactttatctgagacgaggcgcctgcggccgacggcggaaaacaccaaaggcacccgggggcggggcgacccgatgtggcggggaggagtaggagagaccaggattggcgggagcggtccaagggagtcaagccggggagggcgaaaagggtggggaaatcaggggcgtgggggcgtgggggcgtgggggcggggggagtgagcggaaccaaagaagctccgggagatccgggtgttaaaagctggttggatgtgagtggaaggaactcagaatataggaggaaggagacccgaaacggcaccggagggattataaaaaaaggaaaagaatggggatgatggtggccttcccttcagtgagtgggctctgggagaaagggaggaggtccatcaggcctaggcggttgaagaaggttaagaaccttttggagatggaggaggtatgatgtgaagtagcccacccagtcgaaggcatttacattgctggcgcattccctcttcttaccggccttttccacctcagatccccctgtcctacccatcctagctttaactcagccataattgccttgcttaatcccaggaacctggccactgctccttggtccttggcattatgacgggattcccttgtcacctctgacagttcctggctgcggtgtccgcggactggctggggagtgatgacaggtagctatcagagctccagcctccaggcagctttagggattaaaacggaggccaaagcaactccagacctgtttttatagccaaatactgagcctcaggggttgtacactcaggggcttccaggaaaatgccagccttacttttctggggtgccttttaataacctccaagcactttgtggactgtttgtcgagggacggtgaatcagaagaatcactattctgatttcctttgtctccgaagaggaagtccctgactagctatataactttgggcgagttacctctcacttctttgtgccccagtgttctccttgggaaactggatttaggttagatgaccttttaaggctccttgtatgatattttgtgatctgtacatggcagagtatagattaggagccaaattttccaacctagtgctatggttcagaatacatagcaccccaagcgtctggctggagccgaggatgggtcctccagtttttggcacagatgttccggagcccaggaagcatcccataaccaaccttcagccccaccgccacccccagcgtattccagagccgcttccaaaccacagcctatcctctgctccatttcactcttgccctcacagactttcagcctccatgctctgagacaactgtgggtaggtacatctctgttggtggaaatgatgcttaagaaccccaaagattaaaggaaacaatgttaagggcttttgtgaggataaaagataatgggtatatggaatagaaacatttcaaatgaagaatcaaagcatttcaatcaatccacttagttgtaaaaaaaaaaaaaaaa

SEQ ID NO: 299625 - DNA, 5234 bp, Homo sapiens
  misc_feature (5215)..(5215): n is a, c, g, or t
  misc_feature (5228)..(5228): n is a, c, g, or t
  misc_feature (5231)..(5231): n is a, c, g, or t
cacgctcagagcagaccgctagcaggaggcaggatgtgatagtctaagaccctggaagctgacggccagagggagggaagggtggtcacagaggagaggcaaagcaacgggaggtggaggatcctggaggtgtctgcaaggagaatacacagcagcgaggggctgcagaagcggacccagcgacttctgcgctgacgcggggcgggcgggagagaggaagagaggggagcgcggtggcgctgcgagctggccccgccggggaaggggctgccatgtcccgtgagcggcccccgggcaccgacattccccgcaacctgagcttcatcgccgcgctaacggagcgcgcctactaccgtagccagcggcccagcctcgaggaggagccggaggaggagccaggcgagggcgggacgcggttcggggcccgatcccgcgctcacgcaccgagtcggggccgccgggcccgatctgcaccagccggaggcggcggggcccgggcgccccgcagccgtagcccagacacccgcaagagagtgcgtttcgccgacgcactggggttggagctggctgtcgtgcgccgcttccgtcccggtgagctgccccgggtgccccgccacgtgcagatccaattgcagagggacgccctccgccacttcgcgccctgccagccccgcgcccgcggcctccaggaggcgcgcgccgccctggagccggccagcgagcccggcttcgccgcccgcttgctgacgcagcgcatctgcctggaacgcgccgaggcgggcccgctgggcgtggccgggagcgcgcgcgtggtggacctggcctacgagaagcgcgtgagcgtgcgctggagcgccgacggctggcggagccaacgcgaggcgccagccgcctacgccggtccggccccgcccccgccgcgcgccgaccgcttcgccttccgcctgcccgcgccgccgattgggggcgccctgctcttcgccttgcgctaccgtgtgacaggtcacgagttctgggacaacaacggcggccgtgactatgctctacgtgggcccgagcacccgggcagtggcggagctccggagccgcagggctggatccactttatctgagacgaggcgcctgcggccgacggcggaaaacaccaaaggcacccgggggcggggcgacccgatgtggcggggaggagtaggagagaccaggattggcgggagcggtccaagggagtcaagccggggagggcgaaaagggtggggaaatcaggggcgtgggggcgtgggggcgtgggggcggggggagtgagcggaaccaaagaagctccgggagatccgggtgttaaaagctggttggatgtgagtggaaggaactcagaatataggaggaaggagacccgaaacggcaccggagggattataaaaaaaggaaaagaatggggatgatggtggccttcccttcagtgagtgggctctgggagaaagggaggaggtccatcaggcctaggcggttgaagaaggttaagaaccttttggagatggaggaggtatgatgtgaagtagcccacccagtcgaaggcatttacattgctggcgcattccctcttcttaccggccttttccacctcagatccccctgtcctacccatcctagctttaactcagccataattgccttgcttaatcccaggaacctggccactgctccttggtccttggcattatgacgggattcccttgtcacctctgacagttcctggctgcggtgtccgcggactggctggggagtgatgacaggtagctatcagagctccagcctccaggcagctttagggattaaaacggaggccaaagcaactccagacctgtttttatagccaaatactgagcctcaggggttgtacactcaggggcttccaggaaaatgccagccttacttttctggggtgccttttaataacctccaagcactttgtggactgtttgtcgagggacggtgaatcagaagaatcactattctgatttcctttgtctccgaagaggaagtccctgactagctatataactttgggcgagttacctctcacttctttgtgccccagtgttctccttgggaaactggatttaggttagatgaccttttaaggctccttgtatgatattttgtgatctgtacatggcagagtatagattaggagccaaattttccaacctagtgctatggttcagaatacatagcaccccaagcgtctggctggagccgaggatgggtcctccagtttttggcacagatgttccggagcccaggaagcatcccataaccaaccttcagccccaccgccacccccagcgtattccagagccgcttccaaaccacagcctatcctctgctccatttcactcttgccctcacagactttcagcctccatgctctgagacaactgtggaagggatggaaaccctattttcttttctccaagaccatggttggtctgcttccctcactcgggctccttgacagtcttctagaagagagaaggaggaaaagaagcagttcctgatgttacaaatgaacaaggatctcccagccttagtctttgagaaaagatggctgaaagagaggaactctccaagtcattccgcaaacaaatgcccatttaaacatcatccttgtcttgtgaagaaaacaggaagaatgtcatgtaccatgtggatcaccttcagttcaaagttgcagcaaagtgaagaaagaaactactggaagccacccagcaatgcactgtttagtcatcaattaggagcccatgggaggataatagggagactgggtggaggctcagtgtgtaataatctcttgtctaatgtatgtgtgtcactgccatgttgtatgaacaatagtgagggctcacatttacttaacacttgtgtgcgcaaatctgggtttttcttcctttccagaactatgactcgatcataaaatctgttttgtttgcatgcatgcccaaaacaaccctgtaagtagaacattgtcattatctctgttttagagatgaggaaacaggctcagagaagctcagaaatttgttcaagatcgcacagctagtaaatggcagaagtaggattgtgaacccagggaatctccagagcctctgtgtaaccatgatgttatattttttttcctctttaaaaacaaaatttaaaaccttgctataatctcttattaggaaatgatcatagtttctgactgtgctctgccttcccatcctgccaatctcctggactggcttggagaagacagggggcccccgagcttcatctgtgactcgaaggagtttgctgctgtctcctgtgtcagtgtcccatctatgcaggatcagcacaggacccccctcaccttcccacttacactctagcctttccatacattggaattctctcctggccctagccagcgctccacacctgttggtgtgccacctccctccctcttcccccactggccttgaacaggcaaaccccctaatgtcgccactaggttgggtccgtgactaggacacctgctagagggtctgtgcttgggccttttctaggaatcccgatgttactgggtaagtgccaactctgtgggcagaatgctaatgataatcctgttccctgacctctttctcagaagtaccctggctcactctccccaatctcagctttatagaacaacattttggtcttgattattcccatatcaagctgccccagggcttcggtaagctgttagttgccccactgcctcaaggctgggtctggctgagctacttcttaggcacacaaatagtgggtgtctccttggaacctgacacaaaactatcagtgctaccaagccttgtaaaatagggaggaaactaatatttcttgagtggcttctgagtgcctggtgctttcgcggctctctggagagattccttgccctgatggctttggtgtgtactcctctcccaggacttcagcactgagattttcccaaccccctggcttttcctcaccttgggttgagttgatccggcactaccacaaaccccaccatctgcaaaccaaccaagattaggcagtatgccctttccgtcttgcactgctcttccaaaacttccatctgtatttctcacaccctcagtaagcaaagctgagtgtgcatggacagagctgcatccactgctttctcccagcgggtgcagtctaatctgacacggggaacactaggagtttagcggaatcttcagccaccctattaatgtgttacgcattaggcattgtagtggaaactcctctgatggctcatgactatatgaacaggagcaatttggaatataacatgtcagctgtggactgggaagtgccgtgagagaaaacactacctgggtcataggcttgggtccctgaggcaacccagcagggacactgttgcccattcctctcatccagactgcaggtgtcttcctacacctccctgtcccatagcctccgtcctgttttttgtttgtttgtttttctttgtgaatgtagaaaaacatttcatcatgagccctagctcctcagttttccacctaacacccacattcccttgtttctaactgccgtgtttttctggagcctgctgggatctttgcagtttgcaggtcatagaatcagacatgaaaaggcttctcttccgacgtcattggttcctggctcctttacagatgagaacacaggtccagaggctaggaaacaggtctctgctcggtgtggtggttcatacctgtaatcgcaacactttgggaggctgaggcaggagcattgcttgagcccaggagttcgagaccagtctgagcaacatagtgggaccctgtctctacaaaaacttttaaaattagctgggcatggtggcacacatctgtattcccagctactcaggaagctgagacaggaggatcgcttgagcccaggagttggaggttactgagctatgatcgcaccactgcactccagcttggtgacagtgagaccctcaaaaaaaaaaagaaaagaaagaggtctctacacaagcccgtgattcttcatggcaagggataacatcagaaatgtttcattttctgctattagtttccattcctttccccatccagggagaacagtcacacgacagcccaaaaaaaccaccaaaacccaggtacaaaaaatcacagatctnagccgggccggtntcnccg

SEQ ID NO: 299626 - DNA, 4620 bp, Homo sapiens
cacgctcagagcagaccgctagcaggaggcaggatgtgatagtctaagaccctggaagctgacggccagagggagggaagggtggtcacagaggagaggcaaagcaacgggaggtggaggatcctggaggtgtctgcaaggagaatacacagcagcgaggggctgcagaagcggacccagcgacttctgcgctgacgcggggcgggcgggagagaggaagagaggggagcgcggtggcgctgcgagctggccccgccggggaaggggctgccatgtcccgtgagcggcccccgggcaccgacattccccgcaacctgagcttcatcgccgcgctaacggagcgcgcctactaccgtagccagcggcccagcctcgaggaggagccggaggaggagccaggcgagggcgggacgcggttcggggcccgatcccgcgctcacgcaccgagtcggggccgccgggcccgatctgcaccagccggaggcggcggggcccgggcgccccgcagccgtagcccagacacccgcaagagagtgcgtttcgccgacgcactggggttggagctggctgtcgtgcgccgcttccgtcccggtgagctgccccgggtgccccgccacgtgcagatccaattgcagagggacgccctccgccacttcgcgccctgccagccccgcgcccgcggcctccaggaggcgcgcgccgccctggagccggccagcgagcccggcttcgccgcccgcttgctgacgcagcgcatctgcctggaacgcgccgaggcgggcccgctgggcgtggccgggagcgcgcgcgtggtggacctggcctacgagaagcgcgtgagcgtgcgctggagcgccgacggctggcggagccaacgcgaggcgccagccgcctacgccggtccggccccgcccccgccgcgcgccgaccgcttcgccttccgcctgcccgcgccgccgattgggggcgccctgctcttcgccttgcgctaccgtgtgacaggtcacgagttctgggacaacaacggcggccgtgactatgctctacgtgggcccgagcacccgggcagtggcggagctccggagccgcagggctggatccactttatctgagacgaggcgcctgcggccgacggcggaaaacaccaaaggaacctggccactgctccttggtccttggcattatgacgggattcccttgtcacctctgacagttcctggctgcggtgtccgcggactggctggggagtgatgacagaatacatagcaccccaagcgtctggctggagccgaggatgggtcctccagtttttggcacagatgttccggagcccaggaagcatcccataaccaaccttcagccccaccgccacccccagcgtattccagagccgcttccaaaccacagcctatcctctgctccatttcactcttgccctcacagactttcagcctccatgctctgagacaactgtggaagggatggaaaccctattttcttttctccaagaccatggttggtctgcttccctcactcgggctccttgacagtcttctagaagagagaaggaggaaaagaagcagttcctgatgttacaaatgaacaaggatctcccagccttagtctttgagaaaagatggctgaaagagaggaactctccaagtcattccgcaaacaaatgcccatttaaacatcatccttgtcttgtgaagaaaacaggaagaatgtcatgtaccatgtggatcaccttcagttcaaagttgcagcaaagtgaagaaagaaactactggaagccacccagcaatgcactgtttagtcatcaattaggagcccatgggaggataatagggagactgggtggaggctcagtgtgtaataatctcttgtctaatgtatgtgtgtcactgccatgttgtatgaacaatagtgagggctcacatttacttaacacttgtgtgcgcaaatctgggtttttcttcctttccagaactatgactcgatcataaaatctgttttgtttgcatgcatgcccaaaacaaccctgtaagtagaacattgtcattatctctgttttagagatgaggaaacaggctcagagaagctcagaaatttgttcaagatcgcacagctagtaaatggcagaagtaggattgtgaacccagggaatctccagagcctctgtgtaaccatgatgttatattttttttcctctttaaaaacaaaatttaaaaccttgctataatctcttattaggaaatgatcatagtttctgactgtgctctgccttcccatcctgccaatctcctggactggcttggagaagacagggggcccccgagcttcatctgtgactcgaaggagtttgctgctgtctcctgtgtcagtgtcccatctatgcaggatcagcacaggacccccctcaccttcccacttacactctagcctttccatacattggaattctctcctggccctagccagcgctccacacctgttggtgtgccacctccctccctcttcccccactggccttgaacaggcaaaccccctaatgtcgccactaggttgggtccgtgactaggacacctgctagagggtctgtgcttgggccttttctaggaatcccgatgttactgggtaagtgccaactctgtgggcagaatgctaatgataatcctgttccctgacctctttctcagaagtaccctggctcactctccccaatctcagctttatagaacaacattttggtcttgattattcccatatcaagctgccccagggcttcggtaagctgttagttgccccactgcctcaaggctgggtctggctgagctacttcttaggcacacaaatagtgggtgtctccttggaacctgacacaaaactatcagtgctaccaagccttgtaaaatagggaggaaactaatatttcttgagtggcttctgagtgcctggtgctttcgcggctctctggagagattccttgccctgatggctttggtgtgtactcctctcccaggacttcagcactgagattttcccaaccccctggcttttcctcaccttgggttgagttgatccggcactaccacaaaccccaccatctgcaaaccaaccaagattaggcagtatgccctttccgtcttgcactgctcttccaaaacttccatctgtatttctcacaccctcagtaagcaaagctgagtgtgcatggacagagctgcatccactgctttctcccagcgggtgcagtctaatctgacacggggaacactaggagtttagcggaatcttcagccaccctattaatgtgttacgcattaggcattgtagtggaaactcctctgatggctcatgactatatgaacaggagcaatttggaatataacatgtcagctgtggactgggaagtgccgtgagagaaaacactacctgggtcataggcttgggtccctgaggcaacccagcagggacactgttgcccattcctctcatccagactgcaggtgtcttcctacacctccctgtcccatagcctccgtcctgttttttgtttgtttgtttttctttgtgaatgtagaaaaacatttcatcatgagccctagctcctcagttttccacctaacacccacattcccttgtttctaactgccgtgtttttctggagcctgctgggatctttgcagtttgcaggtcatagaatcagacatgaaaaggcttctcttccgacgtcattggttcctggctcctttacagatgagaacacaggtccagaggtgagaaatgactctagcagggtcatagaatttgttagtgcagctcaagatgggacttaaactcaggcctcctgatcacccattcccaggctaggaaacaggtctctgctcggtgtggtggttcatacctgtaatcgcaacactttgggaggctgaggcaggagcattgcttgagcccaggagttcgagaccagtctgagcaacatagtgggaccctgtctctacaaaaacttttaaaattagctgggcatggtggcacacatctgtattcccagctactcaggaagctgagacaggaggatcgcttgagcccaggagttggaggttactgagctatgatcgcaccactgcactccagcttggtgacagtgagaccctcaaaaaaaaaaagaaaagaaagaggtctctacacaagcccgtgattcttcatggcaagggataacatcagaaatgtttcattttctgctattagtttccattcctttccccatccaggcataaagagaaacaaaagacaatgatggtattctctgtgtcctcagctttggcacttttgttgatgttgctaaggagcagtgaccttgctaaaaagactgaataatccacccactgaatagctaacctggggaggaaatgaaaatttcctttgtggatctccccaaatccattgttgtcaccaggccctcccagaacctcctcagttccttcacagtgcaaccctgtgtacttggcccgcaacccaatagtattgtgcctcacttcaccttccatgggcaactgccctcccttctggacataaaacctcatattttaaataaagttgaaatatgaaaagaaagta

SEQ ID NO: 299627 - DNA, 4427 bp, Homo sapiens
cacgctcagagcagaccgctagcaggaggcaggatgtgatagtctaagaccctggaagctgacggccagagggagggaagggtggtcacagaggagaggcaaagcaacgggaggtggaggatcctggaggtgtctgcaaggagaatacacagcagcgaggggctgcagaagcggacccagcgacttctgcgctgacgcggggcgggcgggagagaggaagagaggggagcgcggtggcgctgcgagctggccccgccggggaaggggctgccatgtcccgtgagcggcccccgggcaccgacattccccgcaacctgagcttcatcgccgcgctaacggagcgcgcctactaccgtagccagcggcccagcctcgaggaggagccggaggaggagccaggcgagggcgggacgcggttcggggcccgatcccgcgctcacgcaccgagtcggggccgccgggcccgatctgcaccagccggaggcggcggggcccgggcgccccgcagccgtagcccagacacccgcaagagagtgcgtttcgccgacgcactggggttggagctggctgtcgtgcgccgcttccgtcccggtgagctgccccgggtgccccgccacgtgcagatccaattgcagagggacgccctccgccacttcgcgccctgccagccccgcgcccgcggcctccaggaggcgcgcgccgccctggagccggccagcgagcccggcttcgccgcccgcttgctgacgcagcgcatctgcctggaacgcgccgaggcgggcccgctgggcgtggccgggagcgcgcgcgtggtggacctggcctacgagaagcgcgtgagcgtgcgctggagcgccgacggctggcggagccaacgcgaggcgccagccgcctacgccggtccggccccgcccccgccgcgcgccgaccgcttcgccttccgcctgcccgcgccgccgattgggggcgccctgctcttcgccttgcgctaccgtgtgacaggtcacgagttctgggacaacaacggcggccgtgactatgctctacgtgggcccgagcacccgggcagtggcggagctccggagccgcagggctggatccactttatctgagacgaggcgcctgcggccgacggcggaaaacaccaaaggcacccgggggcggggcgacccgatgtggcggggaggagtaggagagaccaggattggcgggagcggtccaagggagtcaagccggggagggcgaaaaggactttcagcctccatgctctgagacaactgtggaagggatggaaaccctattttcttttctccaagaccatggttggtctgcttccctcactcgggctccttgacagtcttctagaagagagaaggaggaaaagaagcagttcctgatgttacaaatgaacaaggatctcccagccttagtctttgagaaaagatggctgaaagagaggaactctccaagtcattccgcaaacaaatgcccatttaaacatcatccttgtcttgtgaagaaaacaggaagaatgtcatgtaccatgtggatcaccttcagttcaaagttgcagcaaagtgaagaaagaaactactggaagccacccagcaatgcactgtttagtcatcaattaggagcccatgggaggataatagggagactgggtggaggctcagtgtgtaataatctcttgtctaatgtatgtgtgtcactgccatgttgtatgaacaatagtgagggctcacatttacttaacacttgtgtgcgcaaatctgggtttttcttcctttccagaactatgactcgatcataaaatctgttttgtttgcatgcatgcccaaaacaaccctgtaagtagaacattgtcattatctctgttttagagatgaggaaacaggctcagagaagctcagaaatttgttcaagatcgcacagctagtaaatggcagaagtaggattgtgaacccagggaatctccagagcctctgtgtaaccatgatgttatattttttttcctctttaaaaacaaaatttaaaaccttgctataatctcttattaggaaatgatcatagtttctgactgtgctctgccttcccatcctgccaatctcctggactggcttggagaagacagggggcccccgagcttcatctgtgactcgaaggagtttgctgctgtctcctgtgtcagtgtcccatctatgcaggatcagcacaggacccccctcaccttcccacttacactctagcctttccatacattggaattctctcctggccctagccagcgctccacacctgttggtgtgccacctccctccctcttcccccactggccttgaacaggcaaaccccctaatgtcgccactaggttgggtccgtgactaggacacctgctagagggtctgtgcttgggccttttctaggaatcccgatgttactgggtaagtgccaactctgtgggcagaatgctaatgataatcctgttccctgacctctttctcagaagtaccctggctcactctccccaatctcagctttatagaacaacattttggtcttgattattcccatatcaagctgccccagggcttcggtaagctgttagttgccccactgcctcaaggctgggtctggctgagctacttcttaggcacacaaatagtgggtgtctccttggaacctgacacaaaactatcagtgctaccaagccttgtaaaatagggaggaaactaatatttcttgagtggcttctgagtgcctggtgctttcgcggctctctggagagattccttgccctgatggctttggtgtgtactcctctcccaggacttcagcactgagattttcccaaccccctggcttttcctcaccttgggttgagttgatccggcactaccacaaaccccaccatctgcaaaccaaccaagattaggcagtatgccctttccgtcttgcactgctcttccaaaacttccatctgtatttctcacaccctcagtaagcaaagctgagtgtgcatggacagagctgcatccactgctttctcccagcgggtgcagtctaatctgacacggggaacactaggagtttagcggaatcttcagccaccctattaatgtgttacgcattaggcattgtagtggaaactcctctgatggctcatgactatatgaacaggagcaatttggaatataacatgtcagctgtggactgggaagtgccgtgagagaaaacactacctgggtcataggcttgggtccctgaggcaacccagcagggacactgttgcccattcctctcatccagactgcaggtgtcttcctacacctccctgtcccatagcctccgtcctgttttttgtttgtttgtttttctttgtgaatgtagaaaaacatttcatcatgagccctagctcctcagttttccacctaacacccacattcccttgtttctaactgccgtgtttttctggagcctgctgggatctttgcagtttgcaggtcatagaatcagacatgaaaaggcttctcttccgacgtcattggttcctggctcctttacagatgagaacacaggtccagaggtgagaaatgactctagcagggtcatagaatttgttagtgcagctcaagatgggacttaaactcaggcctcctgatcacccattcccaggctaggaaacaggtctctgctcggtgtggtggttcatacctgtaatcgcaacactttgggaggctgaggcaggagcattgcttgagcccaggagttcgagaccagtctgagcaacatagtgggaccctgtctctacaaaaacttttaaaattagctgggcatggtggcacacatctgtattcccagctactcaggaagctgagacaggaggatcgcttgagcccaggagttggaggttactgagctatgatcgcaccactgcactccagcttggtgacagtgagaccctcaaaaaaaaaaagaaaagaaagaggtctctacacaagcccgtgattcttcatggcaagggataacatcagaaatgtttcattttctgctattagtttccattcctttccccatccaggcataaagagaaacaaaagacaatgatggtattctctgtgtcctcagctttggcacttttgttgatgttgctaaggagcagtgaccttgctaaaaagactgaataatccacccactgaatagctaacctggggaggaaatgaaaatttcctttgtggatctccccaaatccattgttgtcaccaggccctcccagaacctcctcagttccttcacagtgcaaccctgtgtacttggcccgcaacccaatagtattgtgcctcacttcaccttccatgggcaactgccctcccttctggacataaaacctcatattttaaataaagttgaaatatgaaaagaaagta

SEQ ID NO: 299628 - DNA, 4394 bp, Homo sapiens
cacgctcagagcagaccgctagcaggaggcaggatgtgatagtctaagaccctggaagctgacggccagagggagggaagggtggtcacagaggagaggcaaagcaacgggaggtggaggatcctggaggtgtctgcaaggagaatacacagcagcgaggggctgcagaagcggacccagcgacttctgcgctgacgcggggcgggcgggagagaggaagagaggggagcgcggtggcgctgcgagctggccccgccggggaaggggctgccatgtcccgtgagcggcccccgggcaccgacattccccgcaacctgagcttcatcgccgcgctaacggagcgcgcctactaccgtagccagcggcccagcctcgaggaggagccggaggaggagccaggcgagggcgggacgcggttcggggcccgatcccgcgctcacgcaccgagtcggggccgccgggcccgatctgcaccagccggaggcggcggggcccgggcgccccgcagccgtagcccagacacccgcaagagagtgcgtttcgccgacgcactggggttggagctggctgtcgtgcgccgcttccgtcccggtgagctgccccgggtgccccgccacgtgcagatccaattgcagagggacgccctccgccacttcgcgccctgccagccccgcgcccgcggcctccaggaggcgcgcgccgccctggagccggccagcgagcccggcttcgccgcccgcttgctgacgcagcgcatctgcctggaacgcgccgaggcgggcccgctgggcgtggccgggagcgcgcgcgtggtggacctggcctacgagaagcgcgtgagcgtgcgctggagcgccgacggctggcggagccaacgcgaggcgccagccgcctacgccggtccggccccgcccccgccgcgcgccgaccgcttcgccttccgcctgcccgcgccgccgattgggggcgccctgctcttcgccttgcgctaccgtgtgacaggtcacgagttctgggacaacaacggcggccgtgactatgctctacgtgggcccgagcacccgggcagtggcggagctccggagccgcagggctggatccactttatctgagacgaggcgcctgcggccgacggcggaaaacaccaaaggcacccgggggcggggcgacccgatgtggcggggaggagtaggagagaccaggattggcgggagcggtccaagggagtcaagccggggagggcgaaaaggaagggatggaaaccctattttcttttctccaagaccatggttggtctgcttccctcactcgggctccttgacagtcttctagaagagagaaggaggaaaagaagcagttcctgatgttacaaatgaacaaggatctcccagccttagtctttgagaaaagatggctgaaagagaggaactctccaagtcattccgcaaacaaatgcccatttaaacatcatccttgtcttgtgaagaaaacaggaagaatgtcatgtaccatgtggatcaccttcagttcaaagttgcagcaaagtgaagaaagaaactactggaagccacccagcaatgcactgtttagtcatcaattaggagcccatgggaggataatagggagactgggtggaggctcagtgtgtaataatctcttgtctaatgtatgtgtgtcactgccatgttgtatgaacaatagtgagggctcacatttacttaacacttgtgtgcgcaaatctgggtttttcttcctttccagaactatgactcgatcataaaatctgttttgtttgcatgcatgcccaaaacaaccctgtaagtagaacattgtcattatctctgttttagagatgaggaaacaggctcagagaagctcagaaatttgttcaagatcgcacagctagtaaatggcagaagtaggattgtgaacccagggaatctccagagcctctgtgtaaccatgatgttatattttttttcctctttaaaaacaaaatttaaaaccttgctataatctcttattaggaaatgatcatagtttctgactgtgctctgccttcccatcctgccaatctcctggactggcttggagaagacagggggcccccgagcttcatctgtgactcgaaggagtttgctgctgtctcctgtgtcagtgtcccatctatgcaggatcagcacaggacccccctcaccttcccacttacactctagcctttccatacattggaattctctcctggccctagccagcgctccacacctgttggtgtgccacctccctccctcttcccccactggccttgaacaggcaaaccccctaatgtcgccactaggttgggtccgtgactaggacacctgctagagggtctgtgcttgggccttttctaggaatcccgatgttactgggtaagtgccaactctgtgggcagaatgctaatgataatcctgttccctgacctctttctcagaagtaccctggctcactctccccaatctcagctttatagaacaacattttggtcttgattattcccatatcaagctgccccagggcttcggtaagctgttagttgccccactgcctcaaggctgggtctggctgagctacttcttaggcacacaaatagtgggtgtctccttggaacctgacacaaaactatcagtgctaccaagccttgtaaaatagggaggaaactaatatttcttgagtggcttctgagtgcctggtgctttcgcggctctctggagagattccttgccctgatggctttggtgtgtactcctctcccaggacttcagcactgagattttcccaaccccctggcttttcctcaccttgggttgagttgatccggcactaccacaaaccccaccatctgcaaaccaaccaagattaggcagtatgccctttccgtcttgcactgctcttccaaaacttccatctgtatttctcacaccctcagtaagcaaagctgagtgtgcatggacagagctgcatccactgctttctcccagcgggtgcagtctaatctgacacggggaacactaggagtttagcggaatcttcagccaccctattaatgtgttacgcattaggcattgtagtggaaactcctctgatggctcatgactatatgaacaggagcaatttggaatataacatgtcagctgtggactgggaagtgccgtgagagaaaacactacctgggtcataggcttgggtccctgaggcaacccagcagggacactgttgcccattcctctcatccagactgcaggtgtcttcctacacctccctgtcccatagcctccgtcctgttttttgtttgtttgtttttctttgtgaatgtagaaaaacatttcatcatgagccctagctcctcagttttccacctaacacccacattcccttgtttctaactgccgtgtttttctggagcctgctgggatctttgcagtttgcaggtcatagaatcagacatgaaaaggcttctcttccgacgtcattggttcctggctcctttacagatgagaacacaggtccagaggtgagaaatgactctagcagggtcatagaatttgttagtgcagctcaagatgggacttaaactcaggcctcctgatcacccattcccaggctaggaaacaggtctctgctcggtgtggtggttcatacctgtaatcgcaacactttgggaggctgaggcaggagcattgcttgagcccaggagttcgagaccagtctgagcaacatagtgggaccctgtctctacaaaaacttttaaaattagctgggcatggtggcacacatctgtattcccagctactcaggaagctgagacaggaggatcgcttgagcccaggagttggaggttactgagctatgatcgcaccactgcactccagcttggtgacagtgagaccctcaaaaaaaaaaagaaaagaaagaggtctctacacaagcccgtgattcttcatggcaagggataacatcagaaatgtttcattttctgctattagtttccattcctttccccatccaggcataaagagaaacaaaagacaatgatggtattctctgtgtcctcagctttggcacttttgttgatgttgctaaggagcagtgaccttgctaaaaagactgaataatccacccactgaatagctaacctggggaggaaatgaaaatttcctttgtggatctccccaaatccattgttgtcaccaggccctcccagaacctcctcagttccttcacagtgcaaccctgtgtacttggcccgcaacccaatagtattgtgcctcacttcaccttccatgggcaactgccctcccttctggacataaaacctcatattttaaataaagttgaaatatgaaaagaaagta

SEQ ID NO: 299629 - DNA, 3507 bp, Homo sapiens
aacttgaatagtaaatggcaccagaagatggcagtctgctccataaccagagcaagtgcagtgggaaagctggactctcatacccactcacattcatgccttatataagcctctcctcctggttaaccttaacaggggagtgattcctctgctggttgctgtttttccttttctcttaccctattcctaacctctttgcttctctctttctttccttgtgtctcttccttctcttttctttttttttttaacatatagggtatttttttcttttaacatatagggtatttaccttcattttgtttatttccatttgtttccttcttcattcatgttcatctctgctattccttctccctccagaagggatggaaaccctattttcttttctccaagaccatggttggtctgcttccctcactcgggctccttgacagtcttctagaagagagaaggaggaaaagaagcagttcctgatgttacaaatgaacaaggatctcccagccttagtctttgagaaaagatggctgaaagagaggaactctccaagtcattccgcaaacaaatgcccatttaaacatcatccttgtcttgtgaagaaaacaggaagaatgtcatgtaccatgtggatcaccttcagttcaaagttgcagcaaagtgaagaaagaaactactggaagccacccagcaatgcactgtttagtcatcaattaggagcccatgggaggataatagggagactgggtggaggctcagtgtgtaataatctcttgtctaatgtatgtgtgtcactgccatgttgtatgaacaatagtgagggctcacatttacttaacacttgtgtgcgcaaatctgggtttttcttcctttccagaactatgactcgatcataaaatctgttttgtttgcatgcatgcccaaaacaaccctgtaagtagaacattgtcattatctctgttttagagatgaggaaacaggctcagagaagctcagaaatttgttcaagatcgcacagctagtaaatggcagaagtaggattgtgaacccagggaatctccagagcctctgtgtaaccatgatgttatattttttttcctctttaaaaacaaaatttaaaaccttgctataatctcttattaggaaatgatcatagtttctgactgtgctctgccttcccatcctgccaatctcctggactggcttggagaagacagggggcccccgagcttcatctgtgactcgaaggagtttgctgctgtctcctgtgtcagtgtcccatctatgcaggatcagcacaggacccccctcaccttcccacttacactctagcctttccatacattggaattctctcctggccctagccagcgctccacacctgttggtgtgccacctccctccctcttcccccactggccttgaacaggcaaaccccctaatgtcgccactaggttgggtccgtgactaggacacctgctagagggtctgtgcttgggccttttctaggaatcccgatgttactgggtaagtgccaactctgtgggcagaatgctaatgataatcctgttccctgacctctttctcagaagtaccctggctcactctccccaatctcagctttatagaacaacattttggtcttgattattcccatatcaagctgccccagggcttcggtaagctgttagttgccccactgcctcaaggctgggtctggctgagctacttcttaggcacacaaatagtgggtgtctccttggaacctgacacaaaactatcagtgctaccaagccttgtaaaatagggaggaaactaatatttcttgagtggcttctgagtgcctggtgctttcgcggctctctggagagattccttgccctgatggctttggtgtgtactcctctcccaggacttcagcactgagattttcccaaccccctggcttttcctcaccttgggttgagttgatccggcactaccacaaaccccaccatctgcaaaccaaccaagattaggcagtatgccctttccgtcttgcactgctcttccaaaacttccatctgtatttctcacaccctcagtaagcaaagctgagtgtgcatggacagagctgcatccactgctttctcccagcgggtgcagtctaatctgacacggggaacactaggagtttagcggaatcttcagccaccctattaatgtgttacgcattaggcattgtagtggaaactcctctgatggctcatgactatatgaacaggagcaatttggaatataacatgtcagctgtggactgggaagtgccgtgagagaaaacactacctgggtcataggcttgggtccctgaggcaacccagcagggacactgttgcccattcctctcatccagactgcaggtgtcttcctacacctccctgtcccatagcctccgtcctgttttttgtttgtttgtttttctttgtgaatgtagaaaaacatttcatcatgagccctagctcctcagttttccacctaacacccacattcccttgtttctaactgccgtgtttttctggagcctgctgggatctttgcagtttgcaggtcatagaatcagacatgaaaaggcttctcttccgacgtcattggttcctggctcctttacagatgagaacacaggtccagaggtgagaaatgactctagcagggtcatagaatttgttagtgcagctcaagatgggacttaaactcaggcctcctgatcacccattcccaggctaggaaacaggtctctgctcggtgtggtggttcatacctgtaatcgcaacactttgggaggctgaggcaggagcattgcttgagcccaggagttcgagaccagtctgagcaacatagtgggaccctgtctctacaaaaacttttaaaattagctgggcatggtggcacacatctgtattcccagctactcaggaagctgagacaggaggatcgcttgagcccaggagttggaggttactgagctatgatcgcaccactgcactccagcttggtgacagtgagaccctcaaaaaaaaaaagaaaagaaagaggtctctacacaagcccgtgattcttcatggcaagggataacatcagaaatgtttcattttctgctattagtttccattcctttccccatccaggcataaagagaaacaaaagacaatgatggtattctctgtgtcctcagctttggcacttttgttgatgttgctaaggagcagtgaccttgctaaaaagactgaataatccacccactgaatagctaacctggggaggaaatgaaaatttcctttgtggatctccccaaatccattgttgtcaccaggccctcccagaacctcctcagttccttcacagtgcaaccctgtgtacttggcccgcaacccaatagtattgtgcctcacttcaccttccatgggcaactgccctcccttctggacataaaacctcatattttaaataaagttgaaatatgaaaagaaagta

SEQ ID NO: 299630 - DNA, 3161 bp, Homo sapiens
cacgctcagagcagaccgctagcaggaggcaggatgtgatagtctaagaccctggaagctgacggccagagggagggaagggtggtcacagaggagaggcaaagcaacgggaggtggaggatcctggaggtgtctgcaaggagaatacacagcagcgaggggctgcagaagcggacccagcgacttctgcgctgacgcggggcgggcgggagagaggaagagaggggagcgcggtggcgctgcgagctggccccgccggggaaggggctgccatgtcccgtgagcggcccccgggcaccgacattccccgcaacctgagcttcatcgccgcgctaacggagcgcgcctactaccgtagccagcggcccagcctcgaggaggagccggaggaggagccaggcgagggcgggacgcggttcggggcccgatcccgcgctcacgcaccgagtcggggccgccgggcccgatctgcaccagccggaggcggcggggcccgggcgccccgcagccgtagcccagacacccgcaagagagtgcgtttcgccgacgcactggggttggagctggctgtcgtgcgccgcttccgtcccggtgagctgccccgggtgccccgccacgtgcagatccaattgcagagggacgccctccgccacttcgcgccctgccagccccgcgcccgcggcctccaggaggcgcgcgccgccctggagccggccagcgagcccggcttcgccgcccgcttgctgacgcagcgcatctgcctggaacgcgccgaggcgggcccgctgggcgtggccgggagcgcgcgcgtggtggacctggcctacgagaagcgcgtgagcgtgcgctggagcgccgacggctggcggagccaacgcgaggcgccagccgcctacgccggtccggccccgcccccgccgcgcgccgaccgcttcgccttccgcctgcccgcgccgccgattgggggcgccctgctcttcgccttgcgctaccgtgtgacaggtcacgagttctgggacaacaacggcggccgtgactatgctctacgtgggcccgagcacccgggcagtggcggagctccggagccgcagggctggatccactttatctgagacgaggcgcctgcggccgacggcggaaaacaccaaaggcacccgggggcggggcgacccgatgtggcggggaggagtaggagagaccaggattggcgggagcggtccaagggagtcaagccggggagggcgaaaagggtggggaaatcaggggcgtgggggcgtgggggcgtgggggcggggggagtgagcggaaccaaagaagctccgggagatccgggtgttaaaagctggttggatgtgagtggaaggaactcagaatataggaggaaggagacccgaaacggcaccggagggattataaaaaaaggaaaagaatggggatgatggtggccttcccttcagtgagtgggctctgggagaaagggaggaggtccatcaggcctaggcggttgaagaaggttaagaaccttttggagatggaggaggtatgatgtgaagtagcccacccagtcgaaggcatttacattgctggcgcattccctcttcttaccggccttttccacctcagatccccctgtcctacccatcctagctttaactcagccataattgccttgcttaatcccaggaacctggccactgctccttggtccttggcattatgacgggattcccttgtcacctctgacagttcctggctgcggtgtccgcggactggctggggagtgatgacaggtagctatcagagctccagcctccaggcagctttagggattaaaacggaggccaaagcaactccagacctgtttttatagccaaatactgagcctcaggggttgtacactcaggggcttccaggaaaatgccagccttacttttctggggtgccttttaataacctccaagcactttgtggactgtttgtcgagggacggtgaatcagaagaatcactattctgatttcctttgtctccgaagaggaagtccctgactagctatataactttgggcgagttacctctcacttctttgtgccccagtgttctccttgggaaactggatttaggttagatgaccttttaaggctccttgtatgatattttgtgatctgtacatggcagagtatagattaggagccaaattttccaacctagtgctatggttcagaatacatagcaccccaagcgtctggctggagccgaggatgggtcctccagtttttggcacagatgttccggagcccaggaagcatcccataaccaaccttcagccccaccgccacccccagcgtattccagagccgcttccaaaccacagcctatcctctgctccatttcactcttgccctcacagactttcagcctccatgctctgagacaactgtggaagggatggaaaccctattttcttttctccaagaccatggttggtctgcttccctcactcgggctccttgacagtcttctagaagagagaaggaggaaaagaagcagttcctgatgttacaaatgaacaaggatctcccagaaaacaggaagaatgtcatgtaccatgtggatcaccttcagttcaaagttgcagcaaagtgaagaaagaaactactggaagccacccagcaatgcactgtttagtcatcaattaggagcccatgggaggataatagggagactgggtggaggctcagtgtgtaataatctcttgtctaatgtatgtgtgtcactgccatgttgtatgaacaatagtgagggctcacatttacttaacacttgtgtgcgcaaatctgggtttttcttcctttccagaactatgactcgatcataaaatctgttttgtttgcatgcatgcccaaaacaaccctgtaagtagaacattgtcattatctctgttttagagatgaggaaacaggctcagagaagctcagaaatttgttcaagatcgcacagctagtaaatggcagaagtaggattgtgaacccagggaatctccagagcctctgtgtaaccatgatgttatattttttttcctctttaaaaacaaaatttaaaacctttgagaaaaaacaaaaaaacatgtcaatcacgtataagaaataaaaatatcccttgg

SEQ ID NO: 299631 - DNA, 3942 bp, Homo sapiens
cacgctcagagcagaccgctagcaggaggcaggatgtgatagtctaagaccctggaagctgacggccagagggagggaagggtggtcacagaggagaggcaaagcaacgggaggtggaggatcctggaggtgtctgcaaggagaatacacagcagcgaggggctgcagaagcggacccagcgacttctgcgctgacgcggggcgggcgggagagaggaagagaggggagcgcggtggcgctgcgagctggccccgccggggaaggggctgccatgtcccgtgagcggcccccgggcaccgacattccccgcaacctgagcttcatcgccgcgctaacggagcgcgcctactaccgtagccagcggcccagcctcgaggaggagccggaggaggagccaggcgagggcgggacgcggttcggggcccgatcccgcgctcacgcaccgagtcggggccgccgggcccgatctgcaccagccggaggcggcggggcccgggcgccccgcagccgtagcccagacacccgcaagagagtgcgtttcgccgacgcactggggttggagctggctgtcgtgcgccgcttccgtcccggtgagctgccccgggtgccccgccacgtgcagatccaattgcagagggacgccctccgccacttcgcgccctgccagccccgcgcccgcggcctccaggaggcgcgcgccgccctggagccggccagcgagcccggcttcgccgcccgcttgctgacgcagcgcatctgcctggaacgcgccgaggcgggcccgctgggcgtggccgggagcgcgcgcgtggtggacctggcctacgagaagcgcgtgagcgtgcgctggagcgccgacggctggcggagccaacgcgaggcgccagccgcctacgccggtccggccccgcccccgccgcgcgccgaccgcttcgccttccgcctgcccgcgccgccgattgggggcgccctgctcttcgccttgcgctaccgtgtgacaggtcacgagttctgggacaacaacggcggccgtgactatgctctacgtgggcccgagcacccgggcagtggcggagctccggagccgcagggctggatccactttatctgagacgaggcgcctgcggccgacggcggaaaacaccaaaggaacctggccactgctccttggtccttggcattatgacgggattcccttgtcacctctgacagttcctggctgcggtgtccgcggactggctggggagtgatgacagaagggatggaaaccctattttcttttctccaagaccatggttggtctgcttccctcactcgggctccttgacagtcttctagaagagagaaggaggaaaagaagcagttcctgatgttacaaatgaacaaggatctcccagagatgaggaaacaggctcagagaagctcagaaatttgttcaagatcgcacagctagtaaatggcagaagtaggattgtgaacccagggaatctccagagcctctgtgtaaccatgatgttatattttttttcctctttaaaaacaaaatttaaaaccttgctataatctcttattaggaaatgatcatagtttctgactgtgctctgccttcccatcctgccaatctcctggactggcttggagaagacagggggcccccgagcttcatctgtgactcgaaggagtttgctgctgtctcctgtgtcagtgtcccatctatgcaggatcagcacaggacccccctcaccttcccacttacactctagcctttccatacattggaattctctcctggccctagccagcgctccacacctgttggtgtgccacctccctccctcttcccccactggccttgaacaggcaaaccccctaatgtcgccactaggttgggtccgtgactaggacacctgctagagggtctgtgcttgggccttttctaggaatcccgatgttactgggtaagtgccaactctgtgggcagaatgctaatgataatcctgttccctgacctctttctcagaagtaccctggctcactctccccaatctcagctttatagaacaacattttggtcttgattattcccatatcaagctgccccagggcttcggtaagctgttagttgccccactgcctcaaggctgggtctggctgagctacttcttaggcacacaaatagtgggtgtctccttggaacctgacacaaaactatcagtgctaccaagccttgtaaaatagggaggaaactaatatttcttgagtggcttctgagtgcctggtgctttcgcggctctctggagagattccttgccctgatggctttggtgtgtactcctctcccaggacttcagcactgagattttcccaaccccctggcttttcctcaccttgggttgagttgatccggcactaccacaaaccccaccatctgcaaaccaaccaagattaggcagtatgccctttccgtcttgcactgctcttccaaaacttccatctgtatttctcacaccctcagtaagcaaagctgagtgtgcatggacagagctgcatccactgctttctcccagcgggtgcagtctaatctgacacggggaacactaggagtttagcggaatcttcagccaccctattaatgtgttacgcattaggcattgtagtggaaactcctctgatggctcatgactatatgaacaggagcaatttggaatataacatgtcagctgtggactgggaagtgccgtgagagaaaacactacctgggtcataggcttgggtccctgaggcaacccagcagggacactgttgcccattcctctcatccagactgcaggtgtcttcctacacctccctgtcccatagcctccgtcctgttttttgtttgtttgtttttctttgtgaatgtagaaaaacatttcatcatgagccctagctcctcagttttccacctaacacccacattcccttgtttctaactgccgtgtttttctggagcctgctgggatctttgcagtttgcaggtcatagaatcagacatgaaaaggcttctcttccgacgtcattggttcctggctcctttacagatgagaacacaggtccagaggtgagaaatgactctagcagggtcatagaatttgttagtgcagctcaagatgggacttaaactcaggcctcctgatcacccattcccaggctaggaaacaggtctctgctcggtgtggtggttcatacctgtaatcgcaacactttgggaggctgaggcaggagcattgcttgagcccaggagttcgagaccagtctgagcaacatagtgggaccctgtctctacaaaaacttttaaaattagctgggcatggtggcacacatctgtattcccagctactcaggaagctgagacaggaggatcgcttgagcccaggagttggaggttactgagctatgatcgcaccactgcactccagcttggtgacagtgagaccctcaaaaaaaaaaagaaaagaaagaggtctctacacaagcccgtgattcttcatggcaagggataacatcagaaatgtttcattttctgctattagtttccattcctttccccatccaggcataaagagaaacaaaagacaatgatggtattctctgtgtcctcagctttggcacttttgttgatgttgctaaggagcagtgaccttgctaaaaagactgaataatccacccactgaatagctaacctggggaggaaatgaaaatttcctttgtggatctccccaaatccattgttgtcaccaggccctcccagaacctcctcagttccttcacagtgcaaccctgtgtacttggcccgcaacccaatagtattgtgcctcacttcaccttccatgggcaactgccctcccttctggacataaaacctcatattttaaataaagttgaaatatgaaaagaaagta

SEQ ID NO: 299632 - DNA, 3765 bp, Homo sapiens
cacgctcagagcagaccgctagcaggaggcaggatgtgatagtctaagaccctggaagctgacggccagagggagggaagggtggtcacagaggagaggcaaagcaacgggaggtggaggatcctggaggtgtctgcaaggagaatacacagcagcgaggggctgcagaagcggacccagcgacttctgcgctgacgcggggcgggcgggagagaggaagagaggggagcgcggtggcgctgcgagctggccccgccggggaaggggctgccatgtcccgtgagcggcccccgggcaccgacattccccgcaacctgagcttcatcgccgcgctaacggagcgcgcctactaccgtagccagcggcccagcctcgaggaggagccggaggaggagccaggcgagggcgggacgcggttcggggcccgatcccgcgctcacgcaccgagtcggggccgccgggcccgatctgcaccagccggaggcggcggggcccgggcgccccgcagccgtagcccagacacccgcaagagagtgcgtttcgccgacgcactggggttggagctggctgtcgtgcgccgcttccgtcccggtgagctgccccgggtgccccgccacgtgcagatccaattgcagagggacgccctccgccacttcgcgccctgccagccccgcgcccgcggcctccaggaggcgcgcgccgccctggagccggccagcgagcccggcttcgccgcccgcttgctgacgcagcgcatctgcctggaacgcgccgaggcgggcccgctgggcgtggccgggagcgcgcgcgtggtggacctggcctacgagaagcgcgtgagcgtgcgctggagcgccgacggctggcggagccaacgcgaggcgccagccgcctacgccggtccggccccgcccccgccgcgcgccgaccgcttcgccttccgcctgcccgcgccgccgattgggggcgccctgctcttcgccttgcgctaccgtgtgacaggtcacgagttctgggacaacaacggcggccgtgactatgctctacgtgggcccgagcacccgggcagtggcggagctccggagccgcagggctggatccactttatctgagacgaggcgcctgcggccgacggcggaaaacaccaaaggaacctggccactgctccttggtccttggcattatgacgggattcccttgtcacctctgacagttcctggctgcggtgtccgcggactggctggggagtgatgacagaagggatggaaaccctattttcttttctccaagaccatggttggtctgcttccctcactcgggctccttgacagtcttctagaagagagaaggaggaaaagaagcagttcctgatgttacaaatgaacaaggatctcccaggaaatgatcatagtttctgactgtgctctgccttcccatcctgccaatctcctggactggcttggagaagacagggggcccccgagcttcatctgtgactcgaaggagtttgctgctgtctcctgtgtcagtgtcccatctatgcaggatcagcacaggacccccctcaccttcccacttacactctagcctttccatacattggaattctctcctggccctagccagcgctccacacctgttggtgtgccacctccctccctcttcccccactggccttgaacaggcaaaccccctaatgtcgccactaggttgggtccgtgactaggacacctgctagagggtctgtgcttgggccttttctaggaatcccgatgttactgggtaagtgccaactctgtgggcagaatgctaatgataatcctgttccctgacctctttctcagaagtaccctggctcactctccccaatctcagctttatagaacaacattttggtcttgattattcccatatcaagctgccccagggcttcggtaagctgttagttgccccactgcctcaaggctgggtctggctgagctacttcttaggcacacaaatagtgggtgtctccttggaacctgacacaaaactatcagtgctaccaagccttgtaaaatagggaggaaactaatatttcttgagtggcttctgagtgcctggtgctttcgcggctctctggagagattccttgccctgatggctttggtgtgtactcctctcccaggacttcagcactgagattttcccaaccccctggcttttcctcaccttgggttgagttgatccggcactaccacaaaccccaccatctgcaaaccaaccaagattaggcagtatgccctttccgtcttgcactgctcttccaaaacttccatctgtatttctcacaccctcagtaagcaaagctgagtgtgcatggacagagctgcatccactgctttctcccagcgggtgcagtctaatctgacacggggaacactaggagtttagcggaatcttcagccaccctattaatgtgttacgcattaggcattgtagtggaaactcctctgatggctcatgactatatgaacaggagcaatttggaatataacatgtcagctgtggactgggaagtgccgtgagagaaaacactacctgggtcataggcttgggtccctgaggcaacccagcagggacactgttgcccattcctctcatccagactgcaggtgtcttcctacacctccctgtcccatagcctccgtcctgttttttgtttgtttgtttttctttgtgaatgtagaaaaacatttcatcatgagccctagctcctcagttttccacctaacacccacattcccttgtttctaactgccgtgtttttctggagcctgctgggatctttgcagtttgcaggtcatagaatcagacatgaaaaggcttctcttccgacgtcattggttcctggctcctttacagatgagaacacaggtccagaggtgagaaatgactctagcagggtcatagaatttgttagtgcagctcaagatgggacttaaactcaggcctcctgatcacccattcccaggctaggaaacaggtctctgctcggtgtggtggttcatacctgtaatcgcaacactttgggaggctgaggcaggagcattgcttgagcccaggagttcgagaccagtctgagcaacatagtgggaccctgtctctacaaaaacttttaaaattagctgggcatggtggcacacatctgtattcccagctactcaggaagctgagacaggaggatcgcttgagcccaggagttggaggttactgagctatgatcgcaccactgcactccagcttggtgacagtgagaccctcaaaaaaaaaaagaaaagaaagaggtctctacacaagcccgtgattcttcatggcaagggataacatcagaaatgtttcattttctgctattagtttccattcctttccccatccaggcataaagagaaacaaaagacaatgatggtattctctgtgtcctcagctttggcacttttgttgatgttgctaaggagcagtgaccttgctaaaaagactgaataatccacccactgaatagctaacctggggaggaaatgaaaatttcctttgtggatctccccaaatccattgttgtcaccaggccctcccagaacctcctcagttccttcacagtgcaaccctgtgtacttggcccgcaacccaatagtattgtgcctcacttcaccttccatgggcaactgccctcccttctggacataaaacctcatattttaaataaagttgaaatatgaaaagaaagta

SEQ ID NO: 299633 - DNA, 2259 bp, Homo sapiens
ctaggcagagagaacagcataagcaaaaacagagatgagaaagtgtgtagtgggacagtgcaaagttctttttgactctagcctttccatacattggaattctctcctggccctagccagcgctccacacctgttggtgtgccacctccctccctcttcccccactggccttgaacaggcaaaccccctaatgtcgccactaggttgggtccgtgactaggacacctgctagagggtctgtgcttgggccttttctaggaatcccgatgttactgggtaagtgccaactctgtgggcagaatgctaatgataatcctgttccctgacctctttctcagaagtaccctggctcactctccccaatctcagctttatagaacaacattttggtcttgattattcccatatcaagctgccccagggcttcggtaagctgttagttgccccactgcctcaaggctgggtctggctgagctacttcttaggcacacaaatagtgggtgtctccttggaacctgacacaaaactatcagtgctaccaagccttgtaaaatagggaggaaactaatatttcttgagtggcttctgagtgcctggtgctttcgcggctctctggagagattccttgccctgatggctttggtgtgtactcctctcccaggacttcagcactgagattttcccaaccccctggcttttcctcaccttgggttgagttgatccggcactaccacaaaccccaccatctgcaaaccaaccaagattaggcagtatgccctttccgtcttgcactgctcttccaaaacttccatctgtatttctcacaccctcagtaagcaaagctgagtgtgcatggacagagctgcatccactgctttctcccagcgggtgcagtctaatctgacacggggaacactaggagtttagcggaatcttcagccaccctattaatgtgttacgcattaggcattgtagtggaaactcctctgatggctcatgactatatgaacaggagcaatttggaatataacatgtcagctgtggactgggaagtgccgtgagagaaaacactacctgggtcataggcttgggtccctgaggcaacccagcagggacactgttgcccattcctctcatccagactgcaggtgtcttcctacacctccctgtcccatagcctccgtcctgttttttgtttgtttgtttttctttgtgaatgtagaaaaacatttcatcatgagccctagctcctcagttttccacctaacacccacattcccttgtttctaactgccgtgtttttctggagcctgctgggatctttgcagtttgcaggtcatagaatcagacatgaaaaggcttctcttccgacgtcattggttcctggctcctttacagatgagaacacaggtccagaggtgagaaatgactctagcagggtcatagaatttgttagtgcagctcaagatgggacttaaactcaggcctcctgatcacccattcccaggctaggaaacaggtctctgctcggtgtggtggttcatacctgtaatcgcaacactttgggaggctgaggcaggagcattgcttgagcccaggagttcgagaccagtctgagcaacatagtgggaccctgtctctacaaaaacttttaaaattagctgggcatggtggcacacatctgtattcccagctactcaggaagctgagacaggaggatcgcttgagcccaggagttggaggttactgagctatgatcgcaccactgcactccagcttggtgacagtgagaccctcaaaaaaaaaaagaaaagaaagaggtctctacacaagcccgtgattcttcatggcaagggataacatcagaaatgtttcattttctgctattagtttccattcctttccccatccaggcataaagagaaacaaaagacaatgatggtattctctgtgtcctcagctttggcacttttgttgatgttgctaaggagcagtgaccttgctaaaaagactgaataatccacccactgaatagctaacctggggaggaaatgaaaatttcctttgtggatctccccaaatccattgttgtcaccaggccctcccagaacctcctcagttccttcacagtgcaaccctgtgtacttggcccgcaacccaatagtattgtgcctcacttcaccttccatgggcaactgccctcccttctggacataaaacctcatattttaaataaagttgaaatatgaaaagaaagta

SEQ ID NO: 299634 - DNA, 2999 bp, Homo sapiens
cacgctcagagcagaccgctagcaggaggcaggatgtgatagtctaagaccctggaagctgacggccagagggagggaagggtggtcacagaggagaggcaaagcaacgggaggtggaggatcctggaggtgtctgcaaggagaatacacagcagcgaggggctgcagaagcggacccagcgacttctgcgctgacgcggggcgggcgggagagaggaagagaggggagcgcggtggcgctgcgagctggccccgccggggaaggggctgccatgtcccgtgagcggcccccgggcaccgacattccccgcaacctgagcttcatcgccgcgctaacggagcgcgcctactaccgtagccagcggcccagcctcgaggaggagccggaggaggagccaggcgagggcgggacgcggttcggggcccgatcccgcgctcacgcaccgagtcggggccgccgggcccgatctgcaccagccggaggcggcggggcccgggcgccccgcagccgtagcccagacacccgcaagagagtgcgtttcgccgacgcactggggttggagctggctgtcgtgcgccgcttccgtcccggtgagctgccccgggtgccccgccacgtgcagatccaattgcagagggacgccctccgccacttcgcgccctgccagccccgcgcccgcggcctccaggaggcgcgcgccgccctggagccggccagcgagcccggcttcgccgcccgcttgctgacgcagcgcatctgcctggaacgcgccgaggcgggcccgctgggcgtggccgggagcgcgcgcgtggtggacctggcctacgagaagcgcgtgagcgtgcgctggagcgccgacggctggcggagccaacgcgaggcgccagccgcctacgccggtccggccccgcccccgccgcgcgccgaccgcttcgccttccgcctgcccgcgccgccgattgggggcgccctgctcttcgccttgcgctaccgtgtgacaggtcacgagttctgggacaacaacggcggccgtgactatgctctacgtgggcccgagcacccgggcagtggcggagctccggagccgcagggctggatccactttatctgagacgaggcgcctgcggccgacggcggaaaacaccaaaggcacccgggggcggggcgacccgatgtggcggggaggagtaggagagaccaggattggcgggagcggtccaagggagtcaagccggggagggcgaaaagggtggggaaatcaggggcgtgggggcgtgggggcgtgggggcggggggagtgagcggaaccaaagaagctccgggagatccgggtgttaaaagctggttggatgtgagtggaaggaactcagaatataggaggaaggagacccgaaacggcaccggagggattataaaaaaaggaaaagaatggggatgatggtggccttcccttcagtgagtgggctctgggagaaagggaggaggtccatcaggcctaggcggttgaagaaggttaagaaccttttggagatggaggaggtatgatgtgaagtagcccacccagtcgaaggcatttacattgctggcgcattccctcttcttaccggccttttccacctcagatccccctgtcctacccatcctagctttaactcagccataattgccttgcttaatcccaggaacctggccactgctccttggtccttggcattatgacgggattcccttgtcacctctgacagttcctggctgcggtgtccgcggactggctggggagtgatgacaggtagctatcagagctccagcctccaggcagctttagggattaaaacggaggccaaagcaactccagacctgtttttatagccaaatactgagcctcaggggttgtacactcaggggcttccaggaaaatgccagccttacttttctggggtgccttttaataacctccaagcactttgtggactgtttgtcgagggacggtgaatcagaagaatcactattctgatttcctttgtctccgaagaggaagtccctgactagctatataactttgggcgagttacctctcacttctttgtgccccagtgttctccttgggaaactggatttaggttagatgaccttttaaggctccttgtatgatattttgtgatctgtacatggcagagtatagattaggagccaaattttccaacctagtgctatggttcagaatacatagcaccccaagcgtctggctggagccgaggatgggtcctccagtttttggcacagatgttccggagcccaggaagcatcccataaccaaccttcagccccaccgccacccccagcgtattccagagccgcttccaaaccacagcctatcctctgctccatttcactcttgccctcacagactttcagcctccatgctctgagacaactgtggaagggatggaaaccctattttcttttctccaagaccatggttggtctgcttccctcactcgggctccttgacagtcttctagaagagagaaggaggaaaagaagcagttcctgatgttacaaatgaacaaggatctcccaggtaaccagctccccacacccatttctgttactaatttctcaaacagaaatttctggttccccttcttccttatcactgagtgaaaggggacaggcatgcacatgtgcccatacatgcattcagaatagagtgtgggggcaggggcggtagttcattcctgtaatcccagcactttgggaggctgagttaggtggatcatttgaggtcaggagttcaagactagcctggccacatactgaaccctgtctctactaaaaatacaaaaattagccgggcatggtgattcatgcctgtagtcccagctactcatgaggctgaggcaggagaatcactttaacggggagacagaggttgcagtgagctgagattgcaccactgcactccagcctgggtgacagagtgagactccgtctcaaa

SEQ ID NO: 299635 - DNA, 2177 bp, Homo sapiens
cacgctcagagcagaccgctagcaggaggcaggatgtgatagtctaagaccctggaagctgacggccagagggagggaagggtggtcacagaggagaggcaaagcaacgggaggtggaggatcctggaggtgtctgcaaggagaatacacagcagcgaggggctgcagaagcggacccagcgacttctgcgctgacgcggggcgggcgggagagaggaagagaggggagcgcggtggcgctgcgagctggccccgccggggaaggggctgccatgtcccgtgagcggcccccgggcaccgacattccccgcaacctgagcttcatcgccgcgctaacggagcgcgcctactaccgtagccagcggcccagcctcgaggaggagccggaggaggagccaggcgagggcgggacgcggttcggggcccgatcccgcgctcacgcaccgagtcggggccgccgggcccgatctgcaccagccggaggcggcggggcccgggcgccccgcagccgtagcccagacacccgcaagagagtgcgtttcgccgacgcactggggttggagctggctgtcgtgcgccgcttccgtcccggtgagctgccccgggtgccccgccacgtgcagatccaattgcagagggacgccctccgccacttcgcgccctgccagccccgcgcccgcggcctccaggaggcgcgcgccgccctggagccggccagcgagcccggcttcgccgcccgcttgctgacgcagcgcatctgcctggaacgcgccgaggcgggcccgctgggcgtggccgggagcgcgcgcgtggtggacctggcctacgagaagcgcgtgagcgtgcgctggagcgccgacggctggcggagccaacgcgaggcgccagccgcctacgccggtccggccccgcccccgccgcgcgccgaccgcttcgccttccgcctgcccgcgccgccgattgggggcgccctgctcttcgccttgcgctaccgtgtgacaggtcacgagttctgggacaacaacggcggccgtgactatgctctacgtgggcccgagcacccgggcagtggcggagctccggagccgcagggctggatccactttatctgagacgaggcgcctgcggccgacggcggaaaacaccaaaggcacccgggggcggggcgacccgatgtggcggggaggagtaggagagaccaggattggcgggagcggtccaagggagtcaagccggggagggcgaaaagggtggggaaatcaggggcgtgggggcgtgggggcgtgggggcggggggagtgagcggaaccaaagaagctccgggagatccgggtgttaaaagctggttggatgtgagtggaaggaactcagaatataggaggaaggagacccgaaacggcaccggagggattataaaaaaaggaaaagaatggggatgatggtggccttcccttcagtgagtgggctctgggagaaagggaggaggtccatcaggcctaggcggttgaagaaggttaagaaccttttggagatggaggaggtatgatgtgaagtagcccacccagtcgaaggcatttacattgctgggtattctctgtgtcctcagctttggcacttttgttgatgttgctaaggagcagtgaccttgctaaaaagactgaataatccacccactgaatagctaacctggggaggaaatgaaaatttcctttgtggatctccccaaatccattgttgtcaccaggccctcccagaacctcctcagttccttcacagtgcaaccctgtgtacttggcccgcaacccaatagtattgtgcctcacttcaccttccatgggcaactgccctcccttctggacataaaacctcatattttaaataaagttgaaatatgaaaagaaagtatgtcataagatattcagaagtattgtgtgttttgggctaagggcagcaagagactcagaggcaagattccctccttgactcaatttcttggtcaccttgttttttgtgtgtgtgtgtccagaaaaatttaataagtttgcttaaattattataaagttgaaccactgaaatgttcactgaaacattttgacttgcattaatgctttacttccccacctacatttacattaaaaattcacacacaaatgaaaattgaaaactgacaacacctg

SEQ ID NO: 299636 - DNA, 2172 bp, Homo sapiens
cacgctcagagcagaccgctagcaggaggcaggatgtgatagtctaagaccctggaagctgacggccagagggagggaagggtggtcacagaggagaggcaaagcaacgggaggtggaggatcctggaggtgtctgcaaggagaatacacagcagcgaggggctgcagaagcggacccagcgacttctgcgctgacgcggggcgggcgggagagaggaagagaggggagcgcggtggcgctgcgagctggccccgccggggaaggggctgccatgtcccgtgagcggcccccgggcaccgacattccccgcaacctgagcttcatcgccgcgctaacggagcgcgcctactaccgtagccagcggcccagcctcgaggaggagccggaggaggagccaggcgagggcgggacgcggttcggggcccgatcccgcgctcacgcaccgagtcggggccgccgggcccgatctgcaccagccggaggcggcggggcccgggcgccccgcagccgtagcccagacacccgcaagagagtgcgtttcgccgacgcactggggttggagctggctgtcgtgcgccgcttccgtcccggtgagctgccccgggtgccccgccacgtgcagatccaattgcagagggacgccctccgccacttcgcgccctgccagccccgcgcccgcggcctccaggaggcgcgcgccgccctggagccggccagcgagcccggcttcgccgcccgcttgctgacgcagcgcatctgcctggaacgcgccgaggcgggcccgctgggcgtggccgggagcgcgcgcgtggtggacctggcctacgagaagcgcgtgagcgtgcgctggagcgccgacggctggcggagccaacgcgaggcgccagccgcctacgccggtccggccccgcccccgccgcgcgccgaccgcttcgccttccgcctgcccgcgccgccgattgggggcgccctgctcttcgccttgcgctaccgtgtgacaggtcacgagttctgggacaacaacggcggccgtgactatgctctacgtgggcccgagcacccgggcagtggcggagctccggagccgcagggctggatccactttatctgagacgaggcgcctgcggccgacggcggaaaacaccaaaggcacccgggggcggggcgacccgatgtggcggggaggagtaggagagaccaggattggcgggagcggtccaagggagtcaagccggggagggcgaaaagggtggggaaatcaggggcgtgggggcgtgggggcgtgggggcggggggagtgagcggaaccaaagaagctccgggagatccgggtgttaaaagctggttggatgtgagtggaaggaactcagaatataggaggaaggagacccgaaacggcaccggagggattataaaaaaaggaaaagaatggggatgatggtggccttcccttcagtgagtgggctctgggagaaagggaggaggtccatcaggcctaggcggttgaagaaggttaagaaccttttggagatggaggaggtatgatgtgaagtagcccacccagtcgaaggcatttacattgctggcgcattccctcttcttaccggccttttccacctcagatccccctgtcctacccatcctagctttaactcagccataattgccttgcttaatcccaggaacctggccactgctccttggtccttggcattatgacgggattcccttgtcacctctgacagttcctggctgcggtgtccgcggactggctggggagtgatgacagaagggatggaaaccctattttcttttctccaagaccatggttggtctgcttccctcactcgggctccttgacagtcttctagaagagagaaggaggaaaagaagcagttcctgatgttacaaatgaacaaggatctcccagaaaacaggaagaatgtcatgtaccatgtggatcaccttcagttcaaagttgcagcaaagtgaagaaagaaactactggaagccacccagcaatgcactgtttagtcatcaattaggagcccatgggaggataataggacacctccctttgtggtgtgtccccctctttggggggggccccctgtggggggggttaagtaatctgttgtatgaacaatagtgagggctcacatttacttaaa

SEQ ID NO: 299637 - DNA, 1905 bp, Homo sapiens
cacgctcagagcagaccgctagcaggaggcaggatgtgatagtctaagaccctggaagctgacggccagagggagggaagggtggtcacagaggagaggcaaagcaacgggaggtggaggatcctggaggtgtctgcaaggagaatacacagcagcgaggggctgcagaagcggacccagcgacttctgcgctgacgcggggcgggcgggagagaggaagagaggggagcgcggtggcgctgcgagctggccccgccggggaaggggctgccatgtcccgtgagcggcccccgggcaccgacattccccgcaacctgagcttcatcgccgcgctaacggagcgcgcctactaccgtagccagcggcccagcctcgaggaggagccggaggaggagccaggcgagggcgggacgcggttcggggcccgatcccgcgctcacgcaccgagtcggggccgccgggcccgatctgcaccagccggaggcggcggggcccgggcgccccgcagccgtagcccagacacccgcaagagagtgcgtttcgccgacgcactggggttggagctggctgtcgtgcgccgcttccgtcccggtgagctgccccgggtgccccgccacgtgcagatccaattgcagagggacgccctccgccacttcgcgccctgccagccccgcgcccgcggcctccaggaggcgcgcgccgccctggagccggccagcgagcccggcttcgccgcccgcttgctgacgcagcgcatctgcctggaacgcgccgaggcgggcccgctgggcgtggccgggagcgcgcgcgtggtggacctggcctacgagaagcgcgtgagcgtgcgctggagcgccgacggctggcggagccaacgcgaggcgccagccgcctacgccggtccggccccgcccccgccgcgcgccgaccgcttcgccttccgcctgcccgcgccgccgattgggggcgccctgctcttcgccttgcgctaccgtgtgacaggtcacgagttctgggacaacaacggcggccgtgactatgctctacgtgggcccgagcacccgggcagtggcggagctccggagccgcagggctggatccactttatctgagacgaggcgcctgcggccgacggcggaaaacaccaaaggcacccgggggcggggcgacccgatgtggcggggaggagtaggagagaccaggattggcgggagcggtccaagggagtcaagccggggagggcgaaaagggtggggaaatcaggggcgtgggggcgtgggggcgtgggggcggggggagtgagcggaaccaaagaagctccgggagatccgggtgttaaaagctggttggatgtgagtggaaggaactcagaatataggaggaaggagacccgaaacggcaccggagggattataaaaaaaggaaaagaatggggatgatggtggccttcccttcagtgagtgggctctgggagaaagggaggaggtccatcaggcctaggcggttgaagaaggttaagaaccttttggagatggaggaggtatgatgtgaagtagcccacccagtcgaaggcatttacattgctgggtattctctgtgtcctcagctttggcacttttgttgatgttgctaaggagcagtgaccttgctaaaaagactgaataatccacccactgaatagctaacctggggaggaaatgaaaatttcctttgtggatctccccaaatccattgttgtcaccaggccctcccagaacctcctcagttccttcacagtgcaaccctgtgtacttggcccgcaacccaatagtattgtgcctcacttcaccttccatgggcaactgccctcccttctggacataaaacctcatattttaaataaagttgaaatatgaaaagaaagta

SEQ ID NO: 299638 - DNA, 620 bp, Homo sapiens
atgcgggtgatctagaggatcccattaggcgtattctctgtgtcctcagctttggcacttttgttgatgttgctaaggagcagtgaccttgctaaaaagactgaataatccacccactgaatagctaacctggggaggaaatgaaaatttcctttgtggatctccccaaatccattgttgtcaccaggccctcccagaacctcctcagttccttcacagtgcaaccctgtgtacttggcccgcaacccaatagtattgtgcctcacttcaccttccatgggcaactgccctcccttctggacataaaacctcatattttaaataaagttgaaatatgaaaagaaagtatgtcataagatattcagaagtattgtgtgttttgggctaagggcagcaagagactcagaggcaagattccctccttgactcaatttcttggtcaccttgttttttgtgtgtgtgtgtccagaaaaatttaataagtttgcttaaattattataaagttgaaccactgaaatgttcactgaaacattttgacttgcattaatgctttacttccccacctacatttacattaaaaattcacacacaaatgaaaattgaaaactgacaacacctg

SEQ ID NO: 299639 - DNA, 1633 bp, Homo sapiens
ggcggtgccggccgaacccagacccgaggttttagaagcagagtcaggcgaagctgggccagaaccgcgacctccgcaaccttgagcggcatccgtggagtgcgcctgcgcactacgaccgcagcaggaaagcgccgccggccaggcccagctgtggccggacagggactggaagagaggacgcggtcgagtaggtgtgcaccagccctggcaacgagagcgtctaccccgaactctgctggccttgaggtggggaagccggggagggcagttgaggaccccgcggaggcgcgtgactggttgagcgggcaggccagcctccgagccgggtggacacaggttttaaaacatgaatcctacactcatccttgctgccttttgcctgggaattgcctcagctactctaacatttgatcacagtttagaggcacagtggaccaagtggaaggcgatgcacaacagattatacggcatgaatgaagaaggatggaggagagcagtgtgggagaagaacatgaagatgattgaactgcacaatcaggaatacagggaagggaaacacagcttcacaatggccatgaacgcctttggagacatgaccagtgaagaattcaggcaggtgatgaatggctttcaaaaccgtaagcccaggaaggggaaagtgttccaggaacctctgttttatgaggcccccagatctgtggattggagagagaaaggctacgtgactcctgtgaagaatcagggtcagtgtggttcttgttgggcttttagtgctactggtgctcttgaaggacagatgttccggaaaactgggaggcttatctcactgagtgagcagaatctggtagactgctctgggcctcaaggcaatgaaggctgcaatggtggcctaatggattatgctttccagtatgttcaggataatggaggcctggactctgaggaatcctatccatatgaggcaacagaagaatcctgtaagtacaatcccaagtattctgttgctaatgacaccggctttgtggacatccctaagcaggagaaggccctgatgaaggcagttgcaactgtggggcccatttctgttgctattgatgcaggtcatgagtccttcctgttctataaagaaggcatttattttgagccagactgtagcagtgaagacatggatcatggtgtgctggtggttggctacggatttgaaagcacagaatcagataacaataaatattggctggtgaagaacagctggggtgaagaatggggcatgggtggctacgtaaagatggccaaagaccggagaaaccattgtggaattgcctcagcagccagctaccccactgtgtgagctggtggacggtgatgaggaaggacttgactggggatggcgcatgcatgggaggaattcatcttcagtctaccagcccccgctgtgtcggatacacactcgaatcattgaagatccgagtgtgatttgaattctgtgatattttcacactggtaaatgttacctctattttaattactgctataaataggtttatattattgattcacttactgactttgcattttcgtttttaaaaggatgtataaatttttacctgtttaaataaaatttaatttcaaa

SEQ ID NO: 299640 - DNA, 1715 bp, Homo sapiens
ggcggtgccggccgaacccagacccgaggttttagaagcagagtcaggcgaagctgggccagaaccgcgacctccgcaaccttgagcggcatccgtggagtgcgcctgcgcactacgaccgcagcaggaaagcgccgccggccaggcccagctgtggccggacagggactggaagagaggacgcggtcgagtaggtgtgcaccagccctggcaacgagagcgtctaccccgaactctgctggccttgaggtggggaagccggggagggcagttgaggaccccgcggaggcgcgtgactggttgagcgggcaggccagcctccgagccgggtggacacaggttttaaaacatgaatcctacactcatccttgctgccttttgcctgggaattgcctcagctactctaacatttgatcacagtttagaggcacagtggaccaagtggaaggcgatgcacaacagattatacggcatgaatgaagaaggatggaggagagcagtgtgggagaagaacatgaagatgattgaactgcacaatcaggaatacagggaagggaaacacagcttcacaatggccatgaacgcctttggagacatgaccagtgaagaattcaggcaggtgatgaatggctttcaaaaccgtaagcccaggaaggggaaagtgttccaggaacctctgttttatgaggcccccagatctgtggattggagagagaaaggctacgtgactcctgtgaagaatcagggtcagtgtggttcttgttgggcttttagtgctactggtgctcttgaaggacagatgttccggaaaactgggaggcttatctcactgagtgagcagaatctggtagactgctctgggcctcaaggcaatgaaggctgcaatggtggcctaatggattatgctttccagtatgttcaggataatggaggcctggactctgaggaatcctatccatatgaggcaacagaagaatcctgtaagtacaatcccaagtattctgttgctaatgacaccggctttgtggacatccctaagcaggagaaggccctgatgaaggcagttgcaactgtggggcccatttctgttgctattgatgcaggtcatgagtccttcctgttctataaagaaggcatttattttgagccagactgtagcagtgaagacatggatcatggtgtgctggtggttggctacggatttgaaagcacagaatcagataacaataaatattggctggtgaagaacagctggggtgaagaatggggcatgggtggctacgtaaagatggccaaagaccggagaaaccattgtggaattgcctcagcagccagctaccccactgtgtgagctggtggacggtgatgaggaaggacttgactggggatggcgcatgcatgggaggaattcatcttcagtctaccagcccccgctgtgtcggatacacactcgaatcattgaagatccgagtgtgatttgaattctgtgatattttcacactggtaaatgttacctctattttaattactgctataaataggtttatattattgattcacttactgactttgcattttcgtttttaaaaggatgtataaatttttacctgtttaaataaaatttaatttcaaaaaatgtagtggtggggcttctttctatttttgatgcactgaatttttgtgtaataaagaacataattgggctctaagccata

SEQ ID NO: 299641 - DNA, 1058 bp, Homo sapiens
ggcggtgccggccgaacccagacccgaggttttagaagcagagtcaggcgaagctgggccagaaccgcgacctccgcaaccttgagcggcatccgtggagtgcgcctgcgcactacgaccgcagcaggaaagcgccgccggccaggcccagctgtggccggacagggactggaagagaggacgcggtcgagtaggttttaaaacatgaatcctacactcatccttgctgccttttgcctgggaattgcctcagctactctaacatttgatcacagtttagaggcacagtggaccaagtggaaggctgcaatggtggcctaatggattatgctttccagtatgttcaggataatggaggcctggactctgaggaatcctatccatatgaggcaacagaagaatcctgtaagtacaatcccaagtattctgttgctaatgacaccggctttgtggacatccctaagcaggagaaggccctgatgaaggcagttgcaactgtggggcccatttctgttgctattgatgcaggtcatgagtccttcctgttctataaagaaggcatttattttgagccagactgtagcagtgaagacatggatcatggtgtgctggtggttggctacggatttgaaagcacagaatcagataacaataaatattggctggtgaagaacagctggggtgaagaatggggcatgggtggctacgtaaagatggccaaagaccggagaaaccattgtggaattgcctcagcagccagctaccccactgtgtgagctggtggacggtgatgaggaaggacttgactggggatggcgcatgcatgggaggaattcatcttcagtctaccagcccccgctgtgtcggatacacactcgaatcattgaagatccgagtgtgatttgaattctgtgatattttcacactggtaaatgttacctctattttaattactgctataaataggtttatattattgattcacttactgactttgcattttcgtttttaaaaggatgtataaatttttacctgtttaaataaaatttaatttcaaa

SEQ ID NO: 299642 - DNA, 1036 bp, Homo sapiens
aatatatatctgcaaattgtcagtactgtcattataaattattagcctttgcacaatcctgtgattagatgggtaacatatagctgttcttgcttctatgtaacgtgaagaatatacaagccattctaaatatacacatttctctattgtgaaaaatgtcttatggaagtaaacccagaggtctcattgaagagactggagtcaattttcagtttcagattaactaatagcatttcacttcctgggatgatttataacagtggtgacttggaaatactaagctgcacactgctgagtgttgtggttctaactcatgttctccaggaggaggacagcagtaatcaagtcttttttttccctttacctttgaaaggaagaatcctgtaagtacaatcccaagtattctgttgctaatgacaccggctttgtggacatccctaagcaggagaaggccctgatgaaggcagttgcaactgtggggcccatttctgttgctattgatgcaggtcatgagtccttcctgttctataaagaaggcatttattttgagccagactgtagcagtgaagacatggatcatggtgtgctggtggttggctacggatttgaaagcacagaatcagataacaataaatattggctggtgaagaacagctggggtgaagaatggggcatgggtggctacgtaaagatggccaaagaccggagaaaccattgtggaattgcctcagcagccagctaccccactgtgtgagctggtggacggtgatgaggaaggacttgactggggatggcgcatgcatgggaggaattcatcttcagtctaccagcccccgctgtgtcggatacacactcgaatcattgaagatccgagtgtgatttgaattctgtgatattttcacactggtaaatgttacctctattttaattactgctataaataggtttatattattgattcacttactgactttgcattttcgtttttaaaaggatgtataaatttttacctgtttaaataaaatttaatttcaaa

SEQ ID NO: 299643 - DNA, 1185 bp, Homo sapiens
ggcggtgccggccgaacccagacccgaggttttagaagcagagtcaggcgaagctgggccagaaccgcgacctccgcaaccttgagcggcatccgtggagtgcgcctgcgcactacgaccgcagcaggaaagcgccgccggccaggcccagctgtggccggacagggactggaagagaggacgcggtcgagtaggttttaaaacatgaatcctacactcatccttgctgccttttgcctgggaattgcctcagctactctaacatttgatcacagtttagaggcacagtggaccaagtggaaggcgatgcacaacagattatacggcatgaatgaagaaggatggaggagagcagtgtgggagaagaacatgaagatgattgaactgcacaatcaggaatacagggaagggaaacacagcttcacaatggccatgaacgcctttggagacatgaccagtgaagaattcaggcaggtgatgaatggctttcaaaaccgtaagcccaggaaggggaaagtgttccaggaacctctgttttatgaggcccccagatctgtggattggagagagaaaggctacgtgactcctgtgaagaatcagggtcagtgtggttcttgttgggcttttagtgctactggtgctcttgaaggacagatgttccggaaaactgggaggcttatctcactgagtgagcagaatctggtagactgctctgggcctcaaggcaatgaaggctgcaatggtggcctaatggattatgctttccagtatgttcaggataatggaggcctggactctgaggaatcctatccatatgaggcaacagtaagtggagctccttgtcatcattccagctcagcttttggaaggtggacactttcagagataacagatacctttttcggaattcatatattagggctgggtggggtggctcacgcctgtaatcccagccctttaggaggctgagccaggcagatggcttaagctcaggagtttgagaccagcctgggcaacaaggtgaaaccttgactctatcaaaaatacaacgaaaattagccggctgtggtggtgtgcgtctgtggtcccagctatgctgaggtagggcgattgcttgagtgtgggaggtggttgtgcaaatgcactctccagtctgagtgacagaatgagaccctgtctccaaaa

SEQ ID NO: 299644 - DNA, 1488 bp, Homo sapiens
ggcggtgccggccgaacccagacccgaggttttagaagcagagtcaggcgaagctgggccagaaccgcgacctccgcaaccttgagcggcatccgtggagtgcgcctgcgcactacgaccgcagcaggaaagcgccgccggccaggcccagctgtggccggacagggactggaagagaggacgcggtcgagtaggttttaaaacatgaatcctacactcatccttgctgccttttgcctgggaattgcctcagctactctaacatttgatcacagtttagaggcacagtggaccaagtggaaggcgatgcacaacagattatacggcatgaatgaagaaggatggaggagagcagtgtgggagaagaacatgaagatgattgaactgcacaatcaggaatacagggaagggaaacacagcttcacaatggccatgaacgcctttggagacatgaccagtgaagaattcaggcaggtgatgaatggctttcaaaaccgtaagcccaggaaggggaaagtgttccaggaacctctgttttatgaggcccccagatctgtggattggagagagaaaggctacgtgactcctgtgaagaatcagggtcagtgtggttcttgttgggcttttagtgctactggtgctcttgaaggacagatgttccggaaaactgggaggcttatctcactgagtgagcagaatctggtagactgctctgggcctcaaggcaatgaaggctgcaatggtggcctaatggattatgctttccagtatgttcaggataatggaggcctggactctgaggaatcctatccatatgaggcaacagaagaatcctgtaagtacaatcccaagtattctgttgctaatgacaccggctttgtggacatccctaagcaggagaaggccctgatgaaggcagttgcaactgtggggcccatttctgttgctattgatgcaggtcatgagtccttcctgttctataaagaaggcatttattttgagccagactgtagcagtgaagacatggatcatggtgtgctggtggttggctacggatttgaaagcacagaatcagataacaataaatattggctggtgaagaacagctggggtgaagaatggggcatgggtggctacgtaaagatggccaaagaccggagaaaccattgtggaattgcctcagcagccagctaccccactgtgtgagctggtggacggtgatgaggaaggacttgactggggatggcgcatgcatgggaggaattcatcttcagtctaccagcccccgctgtgtcggatacacactcgaatcattgaagatccgagtgtgatttgaattctgtgatattttcacactggtaaatgttacctctattttaattactgctataaataggtttatattattgattcacttactgactttgcattttcgtttttaaaaggatgtataaatttttacctgtttaaataaaatttaatttcaaa

SEQ ID NO: 299645 - DNA, 1543 bp, Homo sapiens
ggcggtgccggccgaacccagacccgaggttttagaagcagagtcaggcgaagctgggccagaaccgcgacctccgcaaccttgagcggcatccgtggagtgcgcctgcgcactacgaccgcagcaggaaagcgccgccggccaggcccagctgtggccggacagggactggaagagaggacgcggtcgagtaggtgtgcaccagccctggcaacgagagcgtctaccccgaactctgctggccttgaggttttaaaacatgaatcctacactcatccttgctgccttttgcctgggaattgcctcagctactctaacatttgatcacagtttagaggcacagtggaccaagtggaaggcgatgcacaacagattatacggcatgaatgaagaaggatggaggagagcagtgtgggagaagaacatgaagatgattgaactgcacaatcaggaatacagggaagggaaacacagcttcacaatggccatgaacgcctttggagacatgaccagtgaagaattcaggcaggtgatgaatggctttcaaaaccgtaagcccaggaaggggaaagtgttccaggaacctctgttttatgaggcccccagatctgtggattggagagagaaaggctacgtgactcctgtgaagaatcagggtcagtgtggttcttgttgggcttttagtgctactggtgctcttgaaggacagatgttccggaaaactgggaggcttatctcactgagtgagcagaatctggtagactgctctgggcctcaaggcaatgaaggctgcaatggtggcctaatggattatgctttccagtatgttcaggataatggaggcctggactctgaggaatcctatccatatgaggcaacagaagaatcctgtaagtacaatcccaagtattctgttgctaatgacaccggctttgtggacatccctaagcaggagaaggccctgatgaaggcagttgcaactgtggggcccatttctgttgctattgatgcaggtcatgagtccttcctgttctataaagaaggcatttattttgagccagactgtagcagtgaagacatggatcatggtgtgctggtggttggctacggatttgaaagcacagaatcagataacaataaatattggctggtgaagaacagctggggtgaagaatggggcatgggtggctacgtaaagatggccaaagaccggagaaaccattgtggaattgcctcagcagccagctaccccactgtgtgagctggtggacggtgatgaggaaggacttgactggggatggcgcatgcatgggaggaattcatcttcagtctaccagcccccgctgtgtcggatacacactcgaatcattgaagatccgagtgtgatttgaattctgtgatattttcacactggtaaatgttacctctattttaattactgctataaataggtttatattattgattcacttactgactttgcattttcgtttttaaaaggatgtataaatttttacctgtttaaataaaatttaatttcaaa

SEQ ID NO: 299646 - DNA, 1664 bp, Homo sapiens
ggcggtgccggccgaacccagacccgaggttttagaagcagagtcaggcgaagctgggccagaaccgcgacctccgcaaccttgagcggcatccgtggagtgcgcctgcgcactacgaccgcagcaggaaagcgccgccggccaggcccagctgtggccggacagggactggaagagaggacgcggtcgagtaggttttaaaacatgaatcctacactcatccttgctgccttttgcctgggaattgcctcagctactctaacatttgatcacagtttagaggcacagtggaccaagtggaaggcgatgcacaacagattatacggcatgaatgaagaaggatggaggagagcagtgtgggagaagaacatgaagatgattgaactgcacaatcaggaatacagggaagggaaacacagcttcacaatggccatgaacgcctttggagacatgaccagtgaagaattcaggcaggtgatgaatggctttcaaaaccgtaagcccaggaaggggaaagtgttccaggaacctctgttttatgaggcccccagatctgtggattggagagagaaaggctacgtgactcctgtgaagaatcagggtcagtgtggttcttgttgggcttttagtgctactggtgctcttgaaggacagatgttccggaaaactgggaggcttatctcactgagtgagcagaatctggtagactgctctgggcctcaaggcaatgaaggctgcaatggtggcctaatggattatgctttccagtatgttcaggataatggaggcctggactctgaggaatcctatccatatgaggcaacagaagaatcctgtaagtacaatcccaagtattctgttgctaatgacaccggctttgtggacatccctaagcaggagaaggccctgatgaaggcagttgcaactgtggggcccatttctgttgctattgatgcaggtcatgagtccttcctgttctataaagaaggcatttattttgagccagactgtagcagtgaagacatggatcatggtgtgctggtggttggctacggatttgaaagcacagaatcagataacaataaatattggctggtgaagaacagctggggtgaagaatggggcatgggtggctacgtaaagatggccaaagaccggagaaaccattgtggaattgcctcagcagccagctaccccactgtgtgagctggtggacggtgatgaggaaggacttgactggggatggcgcatgcatgggaggaattcatcttcagtctaccagcccccgctgtgtcggatacacactcgaatcattgaagatccgagtgtgatttgaattctgtgatattttcacactggtaaatgttacctctattttaattactgctataaataggtttatattattgattcacttactgactttgcattttcgtttttaaaaggatgtataaatttttacctgtttaaataaaatttaatttcaaaaaaaaaaaaaaaaaaaaaaaaaagaaaaaaaaaacaacaacacaaagacaaaagcacgaaaaccaacaaaaagaagacaaccgacaagagcaggcacaacaaaagagaaaacaaaaagaggcatgcaccccagcacccccaccacacagcagccctacaagatgggggacgcccga

SEQ ID NO: 299647 - DNA, 1637 bp, Homo sapiens
ggcggtgccggccgaacccagacccgaggttttagaagcagagtcaggcgaagctgggccagaaccgcgacctccgcaaccttgagcggcatccgtggagtgcgcctgcgcactacgaccgcagcaggaaagcgccgccggccaggcccagctgtggccggacagggactggaagagaggacgcggtcgagtaggttttaaaacatgaatcctacactcatccttgctgccttttgcctgggaattgcctcagctactctaacatttgatcacagtttagaggcacagtggaccaagtggaaggcgatgcacaacagattatacggcatgaatgaagaaggatggaggagagcagtgtgggagaagaacatgaagatgattgaactgcacaatcaggaatacagggaagggaaacacagcttcacaatggccatgaacgcctttggagacatgaccagtgaagaattcaggcaggtgatgaatggctttcaaaaccgtaagcccaggaaggggaaagtgttccaggaacctctgttttatgaggcccccagatctgtggattggagagagaaaggctacgtgactcctgtgaagaatcagggtcagtgtggttcttgttgggcttttagtgctactggtgctcttgaaggacagatgttccggaaaactgggaggcttatctcactgagtgagcagaatctggtagactgctctgggcctcaaggcaatgaaggctgcaatggtggcctaatggattatgctttccagtatgttcaggataatggaggcctggactctgaggaatcctatccatatgaggcaacagaagaatcctgtaagtacaatcccaagtattctgttgctaatgacaccggctttgtggacatccctaagcaggagaaggccctgatgaaggcagttgcaactgtggggcccatttctgttgctattgatgcaggtcatgagtccttcctgttctataaagaaggcatttattttgagccagactgtagcagtgaagacatggatcatggtgtgctggtggttggctacggatttgaaagcacagaatcagataacaataaatattggctggtgaagaacagctggggtgaagaatggggcatgggtggctacgtaaagatggccaaagaccggagaaaccattgtggaattgcctcagcagccagctaccccactgtgtgagctggtggacggtgatgaggaaggacttgactggggatggcgcatgcatgggaggaattcatcttcagtctaccagcccccgctgtgtcggatacacactcgaatcattgaagatccgagtgtgatttgaattctgtgatattttcacactggtaaatgttacctctattttaattactgctataaataggtttatattattgattcacttactgactttgcattttcgtttttaaaaggatgtataaatttttacctgtttaaataaaatttaatttcaaaaaaaaaaaaaaaaaaaaacttgaggggggggcccggtacccaatttcgcccctatagtggaggtcgtattacaaattcaaactggcccgtccgtttttacaaacgttctgggacttgggaaaaaaacccctggccgtgtttcccccaac

SEQ ID NO: 299648 - DNA, 1758 bp, Homo sapiens
aagatgtgtgaaggcctcctaactcttggggatctctttgtccctacttgggaatcccaccttatcattagtgaggttttgcctgggcacgaaacctggattttttgcgattggtacaaaacctggatcaaccgtttcccggtttcctagttgttgccttaagcttctcacacacaaggtagtttcataccgttctcataacctaaattgtcatcgcataaactgtttcagctcctacagctctggacaggctgcttttcattttggtgagtccatccagtacctccacgtgccctgtttttctccaggcacatccttggcctcttccacagtccttgggtaaatgcttgggagaataatttaaatatttttattctaccatggtggccctaatttttcagggggcagtaagatggctttttaggattggtctaatcagatcctcatttttgttcccttcctaggttttaaaacatgaatcctacactcatccttgctgccttttgcctgggaattgcctcagctactctaacatttgatcacagtttagaggcacagtggaccaagtggaaggcgatgcacaacagattatacggcatgaatgaagaaggatggaggagagcagtgtgggagaagaacatgaagatgattgaactgcacaatcaggaatacagggaagggaaacacagcttcacaatggccatgaacgcctttggagacatgaccagtgaagaattcaggcaggtgatgaatggctttcaaaaccgtaagcccaggaaggggaaagtgttccaggaacctctgttttatgaggcccccagatctgtggattggagagagaaaggctacgtgactcctgtgaagaatcagggtcagtgtggttcttgttgggcttttagtgctactggtgctcttgaaggacagatgttccggaaaactgggaggcttatctcactgagtgagcagaatctggtagactgctctgggcctcaaggcaatgaaggctgcaatggtggcctaatggattatgctttccagtatgttcaggataatggaggcctggactctgaggaatcctatccatatgaggcaacagaagaatcctgtaagtacaatcccaagtattctgttgctaatgacaccggctttgtggacatccctaagcaggagaaggccctgatgaaggcagttgcaactgtggggcccatttctgttgctattgatgcaggtcatgagtccttcctgttctataaagaaggcatttattttgagccagactgtagcagtgaagacatggatcatggtgtgctggtggttggctacggatttgaaagcacagaatcagataacaataaatattggctggtgaagaacagctggggtgaagaatggggcatgggtggctacgtaaagatggccaaagaccggagaaaccattgtggaattgcctcagcagccagctaccccactgtgtgagctggtggacggtgatgaggaaggacttgactggggatggcgcatgcatgggaggaattcatcttcagtctaccagcccccgctgtgtcggatacacactcgaatcattgaagatccgagtgtgatttgaattctgtgatattttcacactggtaaatgttacctctattttaattactgctataaataggtttatattattgattcacttactgactttgcattttcgtttttaaaaggatgtataaatttttacctgtttaaataaaatttaatttcaaa

SEQ ID NO: 299649 - DNA, 1699 bp, Homo sapiens
aagatgtgtgaaggcctcctaactcttggggatctctttgtccctacttgggaatcccaccttatcattagtgaggttttgcctgggcacgaaacctggattttttgcgattggtacaaaacctggatcaaccgtttcccggtttcctagttgttgccttaagcttctcacacacaaggtagtttcataccgttctcataacctaaattgtcatcgcataaactgtttcagctcctacagctctggacaggctgcttttcattttggtgagtccatccagtacctccacgtgccctgtttttctccaggcacatccttggcctcttccacagtccttgggtaaatgcttgggagaataatttaaatatttttattctaccatggtggccctaatttttcagggggcagtaagatggctttttaggattggtctaatcagatcctcatttttgttcccttcctagctactctaacatttgatcacagtttagaggcacagtggaccaagtggaaggcgatgcacaacagattatacggcatgaatgaagaaggatggaggagagcagtgtgggagaagaacatgaagatgattgaactgcacaatcaggaatacagggaagggaaacacagcttcacaatggccatgaacgcctttggagacatgaccagtgaagaattcaggcaggtgatgaatggctttcaaaaccgtaagcccaggaaggggaaagtgttccaggaacctctgttttatgaggcccccagatctgtggattggagagagaaaggctacgtgactcctgtgaagaatcagggtcagtgtggttcttgttgggcttttagtgctactggtgctcttgaaggacagatgttccggaaaactgggaggcttatctcactgagtgagcagaatctggtagactgctctgggcctcaaggcaatgaaggctgcaatggtggcctaatggattatgctttccagtatgttcaggataatggaggcctggactctgaggaatcctatccatatgaggcaacagaagaatcctgtaagtacaatcccaagtattctgttgctaatgacaccggctttgtggacatccctaagcaggagaaggccctgatgaaggcagttgcaactgtggggcccatttctgttgctattgatgcaggtcatgagtccttcctgttctataaagaaggcatttattttgagccagactgtagcagtgaagacatggatcatggtgtgctggtggttggctacggatttgaaagcacagaatcagataacaataaatattggctggtgaagaacagctggggtgaagaatggggcatgggtggctacgtaaagatggccaaagaccggagaaaccattgtggaattgcctcagcagccagctaccccactgtgtgagctggtggacggtgatgaggaaggacttgactggggatggcgcatgcatgggaggaattcatcttcagtctaccagcccccgctgtgtcggatacacactcgaatcattgaagatccgagtgtgatttgaattctgtgatattttcacactggtaaatgttacctctattttaattactgctataaataggtttatattattgattcacttactgactttgcattttcgtttttaaaaggatgtataaatttttacctgtttaaataaaatttaatttcaaa

SEQ ID NO: 299650 - DNA, 1352 bp, Homo sapiens
ggcggtgccggccgaacccagacccgaggttttagaagcagagtcaggcgaagctgggccagaaccgcgacctccgcaaccttgagcggcatccgtggagtgcgcctgcgcactacgaccgcagcaggaaagcgccgccggccaggcccagctgtggccggacagggactggaagagaggacgcggtcgagtagaatgaagaaggatggaggagagcagtgtgggagaagaacatgaagatgattgaactgcacaatcaggaatacagggaagggaaacacagcttcacaatggccatgaacgcctttggagacatgaccagtgaagaattcaggcaggtgatgaatggctttcaaaaccgtaagcccaggaaggggaaagtgttccaggaacctctgttttatgaggcccccagatctgtggattggagagagaaaggctacgtgactcctgtgaagaatcagggtcagtgtggttcttgttgggcttttagtgctactggtgctcttgaaggacagatgttccggaaaactgggaggcttatctcactgagtgagcagaatctggtagactgctctgggcctcaaggcaatgaaggctgcaatggtggcctaatggattatgctttccagtatgttcaggataatggaggcctggactctgaggaatcctatccatatgaggcaacagaagaatcctgtaagtacaatcccaagtattctgttgctaatgacaccggctttgtggacatccctaagcaggagaaggccctgatgaaggcagttgcaactgtggggcccatttctgttgctattgatgcaggtcatgagtccttcctgttctataaagaaggcatttattttgagccagactgtagcagtgaagacatggatcatggtgtgctggtggttggctacggatttgaaagcacagaatcagataacaataaatattggctggtgaagaacagctggggtgaagaatggggcatgggtggctacgtaaagatggccaaagaccggagaaaccattgtggaattgcctcagcagccagctaccccactgtgtgagctggtggacggtgatgaggaaggacttgactggggatggcgcatgcatgggaggaattcatcttcagtctaccagcccccgctgtgtcggatacacactcgaatcattgaagatccgagtgtgatttgaattctgtgatattttcacactggtaaatgttacctctattttaattactgctataaataggtttatattattgattcacttactgactttgcattttcgtttttaaaaggatgtataaatttttacctgtttaaataaaatttaatttcaaa

SEQ ID NO: 299651 - DNA, 1554 bp, Homo sapiens
  misc_feature (1490)..(1491): n is a, c, g, or t
  misc_feature (1493)..(1494): n is a, c, g, or t
  misc_feature (1536)..(1536): n is a, c, g, or t
ggcggtgccggccgaacccagacccgaggttttagaagcagagtcaggcgaagctgggccagaaccgcgacctccgcaaccttgagcggcatccgtggagtgcgcctgcgcactacgaccgcagcaggaaagcgccgccggccaggcccagctgtggccggacagggactggaagagaggacgcggtcgagtaggttttaaaacatgaatcctacactcatccttgctgccttttgcctgggaattgcctcagctactctaacatttgatcacagtttagaggcacagtggaccaagtggaaggcgatgcacaacagattatacggcatgaatgaagaaggatggaggagagcagtgtgggagaagaacatgaagatgattgaactgcacaatcaggaatacagggaagggaaacacagcttcacaatggccatgaacgcctttggagacatgaccagtgaagaattcaggcaggtgatgaatggctttcaaaaccgtaagcccaggaaggggaaagtgttccaggaacctctgttttatgaggcccccagatctgtggattggagagagaaaggctacgtgactcctgtgaagaatcagggtcagtgtggttcttgttgggcttttagtgctactggtgctcttgaaggacagatgttccggaaaactgggaggcttatctcactgagtgagcagaatctggtagactgctctgggcctcaaggcaatgaaggctgcaatggtggcctaatggattatgctttccagtatgttcaggataatggaggcctggactctgaggaatcctatccatatgaggcaacagaagaatcctgtaagtacaatcccaagtattctgttgctaatgacaccggctttgtggacatccctaagcaggagaaggccctgatgaaggcagttgcaactgtggggcccatttctgttgctattgatgcaggtcatgagtccttcctgttctataaagaaggcatttattttgagccagactgtagcagtgaagacatggatcatggtgtgctggtggttggctacggatttgaaagcacagaatcagataacaataaatattggctggtgaagaacagctggggtgaagaatggggcatgggtggctacgtaaagatggccaaagaccggagaaaccattgtggaattgcctcagcagccagctaccccactgtgtgagctggtggacggtgatgaggaaggacttgactggggatggcgcatgcatgggaggaattcatcttcagtctaccagcccccgctgtgtcggatacacactcgaatcattgaagatccgagtgtgatttgaattctgtgatattttcacactggtaaatgttacctctattttaattactgctataaataggtttatattattgattcacttactgactttgcattttcgtttttaaaaggatgtataaatttttacctgtttaaataaaatttaatttcaaacnncnngggggggggggggggggggggggggtggtgtctattttgggngttttggtttttgtgaat

SEQ ID NO: 299652 - DNA, 1588 bp, Homo sapiens
ggcggtgccggccgaacccagacccgaggttttagaagcagagtcaggcgaagctgggccagaaccgcgacctccgcaaccttgagcggcatccgtggagtgcgcctgcgcactacgaccgcagcaggaaagcgccgccggccaggcccagctgtggccggacagggactggaagagaggacgcggtcgagtaggttttaaaacatgaatcctacactcatccttgctgccttttgcctgggaattgcctcagctactctaacatttgatcacagtttagaggcacagtggaccaagtggaaggcgatgcacaacagattatacggcatgaatgaagaaggatggaggagagcagtgtgggagaagaacatgaagatgattgaactgcacaatcaggaatacagggaagggaaacacagcttcacaatggccatgaacgcctttggagacatggtaagtgtgctgtggactgccgagctctgtgcttcctctcttcggttctttactaaggtaatctcttgcttttcaacattttatttccttttccttgaagaccagtgaagaattcaggcaggtgatgaatggctttcaaaaccgtaagcccaggaaggggaaagtgttccaggaacctctgttttatgaggcccccagatctgtggattggagagagaaaggctacgtgactcctgtgaagaatcagggtcagtgtggttcttgttgggcttttagtgctactggtgctcttgaaggacagatgttccggaaaactgggaggcttatctcactgagtgagcagaatctggtagactgctctgggcctcaaggcaatgaaggctgcaatggtggcctaatggattatgctttccagtatgttcaggataatggaggcctggactctgaggaatcctatccatatgaggcaacagaagaatcctgtaagtacaatcccaagtattctgttgctaatgacaccggctttgtggacatccctaagcaggagaaggccctgatgaaggcagttgcaactgtggggcccatttctgttgctattgatgcaggtcatgagtccttcctgttctataaagaaggcatttattttgagccagactgtagcagtgaagacatggatcatggtgtgctggtggttggctacggatttgaaagcacagaatcagataacaataaatattggctggtgaagaacagctggggtgaagaatggggcatgggtggctacgtaaagatggccaaagaccggagaaaccattgtggaattgcctcagcagccagctaccccactgtgtgagctggtggacggtgatgaggaaggacttgactggggatggcgcatgcatgggaggaattcatcttcagtctaccagcccccgctgtgtcggatacacactcgaatcattgaagatccgagtgtgatttgaattctgtgatattttcacactggtaaatgttacctctattttaattactgctataaataggtttatattattgattcacttactgactttgcattttcgtttttaaaaggatgtataaatttttacctgtttaaataaaatttaatttcaaa

SEQ ID NO: 299653 - DNA, 2078 bp, Homo sapiens
ggcggtgccggccgaacccagacccgaggttttagaagcagagtcaggcgaagctgggccagaaccgcgacctccgcaaccttgagcggcatccgtggagtgcgcctgcgcactacgaccgcagcaggaaagcgccgccggccaggcccagctgtggccggacagggactggaagagaggacgcggtcgagtaggttttaaaacatgaatcctacactcatccttgctgccttttgcctgggaattgcctcagctactctaacatttgatcacagtttagaggcacagtggaccaagtggaaggcgatgcacaacagattatacggcatgaatgaagaaggatggaggagagcagtgtgggagaagaacatgaagatgattgaactgcacaatcaggaatacagggaagggaaacacagcttcacaatggccatgaacgcctttggagacatgaccagtgaagaattcaggcaggtgatgaatggctttcaaaaccgtaagcccaggaaggggaaagtgttccaggaacctctgttttatgaggcccccagatctgtggattggagagagaaaggctacgtgactcctgtgaagaatcagggtcagtgtggttcttgttgggcttttagtgctactggtgctcttgaaggacagatgttccggaaaactgggaggcttatctcactgagtgagcagaatctggtagactgctctgggcctcaaggcaatgaaggctgcaatggtggcctaatggattatgctttccagtatgttcaggataatggaggcctggactctgaggaatcctatccatatgaggcaacagaagaatcctgtaagtacaatcccaagtattctgttgctaatgacaccggctttgtggacatccctaagcaggagaaggccctgatgaaggcagttgcaactgtggggcccatttctgttgctattgatgcaggtcatgagtccttcctgttctataaagaaggcatttattttgagccagactgtagcagtgaagacatggatcatggtgtgctggtggttggctacggatttgaaagcacagaatcagataacaataaatattggctggtgaagaacaggtataaattgccagaaatacttacatttgaaattcaaaagagaatacttatttgcaaacagtgtttggatacagttccacatgcccttagcatacttctgaaatccccagaagtctaagttgaacatataatattaatgtttgattataaaagtaagaaactgtcacaaatatcttgggagtatgaatatagtctttgttccattgtataaaggtgtatctaaatctgaacagtttttaaattctgaggcatatctggctgcaaagacatcctattgttttcctgtctctgatctgtagttctgtgaaaggtcacagtttggaggctgggatggaaattatgtccaggttatgtcaagaattttttaaggataaacaggaacattgcctgtcctgattctttctgttaagtctatggcctctggcacagtgtttaagttgggtgttcctgttaataaccctttgggctttattctttctctgaaatggaaaacctgctcttttttcagctggggtgaagaatggggcatgggtggctacgtaaagatggccaaagaccggagaaaccattgtggaattgcctcagcagccagctaccccactgtgtgagctggtggacggtgatgaggaaggacttgactggggatggcgcatgcatgggaggaattcatcttcagtctaccagcccccgctgtgtcggatacacactcgaatcattgaagatccgagtgtgatttgaattctgtgatattttcacactggtaaatgttacctctattttaattactgctataaataggtttatattattgattcacttactgactttgcattttcgtttttaaaaggatgtataaatttttacctgtttaaataaaatttaatttcaaaaaatgtagtggtggggcttctttctatttttgatgcactgaatttttgtgtaataaagaacataattgggctctaagccata

SEQ ID NO: 299654 - DNA, 1996 bp, Homo sapiens
ggcggtgccggccgaacccagacccgaggttttagaagcagagtcaggcgaagctgggccagaaccgcgacctccgcaaccttgagcggcatccgtggagtgcgcctgcgcactacgaccgcagcaggaaagcgccgccggccaggcccagctgtggccggacagggactggaagagaggacgcggtcgagtaggttttaaaacatgaatcctacactcatccttgctgccttttgcctgggaattgcctcagctactctaacatttgatcacagtttagaggcacagtggaccaagtggaaggcgatgcacaacagattatacggcatgaatgaagaaggatggaggagagcagtgtgggagaagaacatgaagatgattgaactgcacaatcaggaatacagggaagggaaacacagcttcacaatggccatgaacgcctttggagacatgaccagtgaagaattcaggcaggtgatgaatggctttcaaaaccgtaagcccaggaaggggaaagtgttccaggaacctctgttttatgaggcccccagatctgtggattggagagagaaaggctacgtgactcctgtgaagaatcagggtcagtgtggttcttgttgggcttttagtgctactggtgctcttgaaggacagatgttccggaaaactgggaggcttatctcactgagtgagcagaatctggtagactgctctgggcctcaaggcaatgaaggctgcaatggtggcctaatggattatgctttccagtatgttcaggataatggaggcctggactctgaggaatcctatccatatgaggcaacagaagaatcctgtaagtacaatcccaagtattctgttgctaatgacaccggctttgtggacatccctaagcaggagaaggccctgatgaaggcagttgcaactgtggggcccatttctgttgctattgatgcaggtcatgagtccttcctgttctataaagaaggcatttattttgagccagactgtagcagtgaagacatggatcatggtgtgctggtggttggctacggatttgaaagcacagaatcagataacaataaatattggctggtgaagaacaggtataaattgccagaaatacttacatttgaaattcaaaagagaatacttatttgcaaacagtgtttggatacagttccacatgcccttagcatacttctgaaatccccagaagtctaagttgaacatataatattaatgtttgattataaaagtaagaaactgtcacaaatatcttgggagtatgaatatagtctttgttccattgtataaaggtgtatctaaatctgaacagtttttaaattctgaggcatatctggctgcaaagacatcctattgttttcctgtctctgatctgtagttctgtgaaaggtcacagtttggaggctgggatggaaattatgtccaggttatgtcaagaattttttaaggataaacaggaacattgcctgtcctgattctttctgttaagtctatggcctctggcacagtgtttaagttgggtgttcctgttaataaccctttgggctttattctttctctgaaatggaaaacctgctcttttttcagctggggtgaagaatggggcatgggtggctacgtaaagatggccaaagaccggagaaaccattgtggaattgcctcagcagccagctaccccactgtgtgagctggtggacggtgatgaggaaggacttgactggggatggcgcatgcatgggaggaattcatcttcagtctaccagcccccgctgtgtcggatacacactcgaatcattgaagatccgagtgtgatttgaattctgtgatattttcacactggtaaatgttacctctattttaattactgctataaataggtttatattattgattcacttactgactttgcattttcgtttttaaaaggatgtataaatttttacctgtttaaataaaatttaatttcaaa

SEQ ID NO: 299655 - DNA, 1434 bp, Homo sapiens
ggcggtgccggccgaacccagacccgaggttttagaagcagagtcaggcgaagctgggccagaaccgcgacctccgcaaccttgagcggcatccgtggagtgcgcctgcgcactacgaccgcagcaggaaagcgccgccggccaggcccagctgtggccggacagggactggaagagaggacgcggtcgagtaggttttaaaacatgaatcctacactcatccttgctgccttttgcctgggaattgcctcagctactctaacatttgatcacagtttagaggcacagtggaccaagtggaaggcgatgcacaacagattatacggcatgaatgaagaaggatggaggagagcagtgtgggagaagaacatgaagatgattgaactgcacaatcaggaatacagggaagggaaacacagcttcacaatggccatgaacgcctttggagacatgaccagtgaagaattcaggcaggtgatgaatggctttcaaaaccgtaagcccaggaaggggaaagtgttccaggaacctctgttttatgaggcccccagatctgtggattggagagagaaaggctacgtgactcctgtgaagaatcagggtcagtgtggttcttgttgggcttttagtgctactggtgctcttgaaggacagatgttccggcctcaaggcaatgaaggctgcaatggtggcctaatggattatgctttccagtatgttcaggataatggaggcctggactctgaggaatcctatccatatgaggcaacagaagaatcctgtaagtacaatcccaagtattctgttgctaatgacaccggctttgtggacatccctaagcaggagaaggccctgatgaaggcagttgcaactgtggggcccatttctgttgctattgatgcaggtcatgagtccttcctgttctataaagaaggcatttattttgagccagactgtagcagtgaagacatggatcatggtgtgctggtggttggctacggatttgaaagcacagaatcagataacaataaatattggctggtgaagaacagctggggtgaagaatggggcatgggtggctacgtaaagatggccaaagaccggagaaaccattgtggaattgcctcagcagccagctaccccactgtgtgagctggtggacggtgatgaggaaggacttgactggggatggcgcatgcatgggaggaattcatcttcagtctaccagcccccgctgtgtcggatacacactcgaatcattgaagatccgagtgtgatttgaattctgtgatattttcacactggtaaatgttacctctattttaattactgctataaataggtttatattattgattcacttactgactttgcattttcgtttttaaaaggatgtataaatttttacctgtttaaataaaatttaatttcaaa

SEQ ID NO: 299656 - DNA, 982 bp, Homo sapiens
aatatatatctgcaaattgtcagtactgtcattataaattattagcctttgcacaatcctgtgattagatgggtaacatatagctgttcttgcttctatgtaacgtgaagaatatacaagccattctaaatatacacatttctctattgtgatttcagtttcagattaactaatagcatttcacttcctgggatgatttataacagtggtgacttggaaatactaagctgcacactgctgagtgttgtggttctaactcatgttctccaggaggaggacagcagtaatcaagtcttttttttccctttacctttgaaaggaagaatcctgtaagtacaatcccaagtattctgttgctaatgacaccggctttgtggacatccctaagcaggagaaggccctgatgaaggcagttgcaactgtggggcccatttctgttgctattgatgcaggtcatgagtccttcctgttctataaagaaggcatttattttgagccagactgtagcagtgaagacatggatcatggtgtgctggtggttggctacggatttgaaagcacagaatcagataacaataaatattggctggtgaagaacagctggggtgaagaatggggcatgggtggctacgtaaagatggccaaagaccggagaaaccattgtggaattgcctcagcagccagctaccccactgtgtgagctggtggacggtgatgaggaaggacttgactggggatggcgcatgcatgggaggaattcatcttcagtctaccagcccccgctgtgtcggatacacactcgaatcattgaagatccgagtgtgatttgaattctgtgatattttcacactggtaaatgttacctctattttaattactgctataaataggtttatattattgattcacttactgactttgcattttcgtttttaaaaggatgtataaatttttacctgtttaaataaaatttaatttcaaa

SEQ ID NO: 299657 - DNA, 1044 bp, Homo sapiens
gtagtgacatgaacagtctctgttaagcacactcagacagatgagctgggtgagctggctcacacgctgtaatcacatgggtaacatatagctgttcttgcttctatgtaacgtgaagaatatacaagccattctaaatatacacatttctctattgtgaaaaatgtcttatggaagtaaacccagaggtctcattgaagagactggagtcaattttcagtttcagattaactaatagcatttcacttcctgggatgatttataacagtggtgacttggaaatactaagctgcacactgctgagtgttgtggttctaactcatgttctccaggaggaggacagcagtaatcaagtcttttttttccctttacctttgaaaggaagaatcctgtaagtacaatcccaagtattctgttgctaatgacaccggctttgtggacatccctaagcaggagaaggccctgatgaaggcagttgcaactgtggggcccatttctgttgctattgatgcaggtcatgagtccttcctgttctataaagaaggcatttattttgagccagactgtagcagtgaagacatggatcatggtgtgctggtggttggctacggatttgaaagcacagaatcagataacaataaatattggctggtgaagaacagctggggtgaagaatggggcatgggtggctacgtaaagatggccaaagaccggagaaaccattgtggaattgcctcagcagccagctaccccactgtgtgagctggtggacggtgatgaggaaggacttgactggggatggcgcatgcatgggaggaattcatcttcagtctaccagcccccgctgtgtcggatacacactcgaatcattgaagatccgagtgtgatttgaattctgtgatattttcacactggtaaatgttacctctattttaattactgctataaataggtttatattattgattcacttactgactttgcattttcgtttttaaaaggatgtataaatttttacctgtttaaataaaatttaatttcaaa

SEQ ID NO: 299658 - DNA, 715 bp, Homo sapiens
agacaggacactgtgggaggcaggacattaggaatctatcatataggcaacagaagaatcctgtaagtacaatcccaagtattctgttgctaatgacaccggctttgtggacatccctaagcaggagaaggccctgatgaaggcagttgcaactgtggggcccatttctgttgctattgatgcaggtcatgagtccttcctgttctataaagaaggcatttattttgagccagactgtagcagtgaagacatggatcatggtgtgctggtggttggctacggatttgaaagcacagaatcagataacaataaatattggctggtgaagaacagctggggtgaagaatggggcatgggtggctacgtaaagatggccaaagaccggagaaaccattgtggaattgcctcagcagccagctaccccactgtgtgagctggtggacggtgatgaggaaggacttgactggggatggcgcatgcatgggaggaattcatcttcagtctaccagcccccgctgtgtcggatacacactcgaatcattgaagatccgagtgtgatttgaattctgtgatattttcacactggtaaatgttacctctattttaattactgctataaataggtttatattattgattcacttactgactttgcattttcgtttttaaaaggatgtataaatttttacctgtttaaataaaatttaatttcaaa

SEQ ID NO: 299659 - DNA, 1144 bp, Homo sapiens
ggcggtgccggccgaacccagacccgaggttttagaagcagagtcaggcgaagctgggccagaaccgcgacctccgcaaccttgagcggcatccgtggagtgcgcctgcgcactacgaccgcagcaggaaagcgccgccggccaggcccagctgtggccggacagggactggaagagaggacgcggtcgagtaggtgtgcaccagccctggcaacgagagcgtctaccccgaactctgctggccttgaggtggggaagccggggagggcagttgaggaccccgcggaggcgcgtgactggttgagcgggcaggccagcctccgagccgggtggacacaggttttaaaacatgaatcctacactcatccttgctgccttttgcctgggaattgcctcagctactctaacatttgatcacagtttagaggcacagtggaccaagtggaaggcgatgcacaacagattatacggcatgaatgaagaaggatggaggagagcagtgtgggagaagaacatgaagatgattgaactgcacaatcaggaatacagggaagggaaacacagcttcacaatggccatgaacgcctttggagacatgaccagtgaagaattcaggcaggtgatgaatggctttcaaaaccgtaagcccaggaaggggaaagtgttccaggaacctctgttttatgaggcccccagatctgtggattggagagagaaaggctacgtgactcctgtgaagaatcagggtcagtgtggttcttgttgggcttttagtgctactggtgctcttgaaggacagatgttccggaaaactgggaggcttatctcactgagtgagcagaatctggtagactgctctgggcctcaaggcaatgaaggctgcaatggtggcctaatggattatgctttccagtatgttcaggataatggaggcctggactctgaggaatcctatccatatgaggcaacagaagaatcctgtaagtacaatcccaagtattctgttgctaatgacaccggctttgtggacatccctaagcaggagaaggccctgatgaaggcagttgcaactgtggggacccccgccggcaagcagagtgtcacagctggctttcctcacttgggaaacgggtactcctgtcta

SEQ ID NO: 299660 - DNA, 1364 bp, Homo sapiens
tgatatcctagagtagaattacaagcttacaaagaggggtctttttttcctctaggaaagcttttttttaatgaaggatttatgctgatttctatttctgctagttgtaaatgagagcttaaatccctggccttcttattgttgttaagtactatctggaatgtgtgtcacttcactgaattcagagatgcctcattccctgtgggtgacaggatgggttactgtcatgtgtcctctggagcttctcaccccagccctcattttaccatcccaggcatttattttgagccagactgtagcagtgaagacatggatcatggtgtgctggtggttggctacggatttgaaagcacagaatcagataacaataaatattggctggtgaagaacaggtataaattgccagaaatacttacatttgaaattcaaaagagaatacttatttgcaaacagtgtttggatacagttccacatgcccttagcatacttctgaaatccccagaagtctaagttgaacatataatattaatgtttgattataaaagtaagaaactgtcacaaatatcttgggagtatgaatatagtctttgttccattgtataaaggtgtatctaaatctgaacagtttttaaattctgaggcatatctggctgcaaagacatcctattgttttcctgtctctgatctgtagttctgtgaaaggtcacagtttggaggctgggatggaaattatgtccaggttatgtcaagaattttttaaggataaacaggaacattgcctgtcctgattctttctgttaagtctatggcctctggcacagtgtttaagttgggtgttcctgttaataaccctttgggctttattctttctctgaaatggaaaacctgctcttttttcagctggggtgaagaatggggcatgggtggctacgtaaagatggccaaagaccggagaaaccattgtggaattgcctcagcagccagctaccccactgtgtgagctggtggacggtgatgaggaaggacttgactggggatggcgcatgcatgggaggaattcatcttcagtctaccagcccccgctgtgtcggatacacactcgaatcattgaagatccgagtgtgatttgaattctgtgatattttcacactggtaaatgttacctctattttaattactgctataaataggtttatattattgattcacttactgactttgcattttcgtttttaaaaggatgtataaatttttacctgtttaaataaaatttaatttcaaaaaatgtagtggtggggcttctttctatttttgatgcactgaatttttgtgtaataaagaacataattgggctctaagccata

SEQ ID NO: 299661 - DNA, 856 bp, Homo sapiens
tgatatcctagagtagaattacaagcttacaaagaggggtctttttttcctctaggaaagcttttttttaatgaaggatttatgctgatttctatttctgctagttgtaaatgagagcttaaatccctggccttcttattgttgttaagtactatctggaatgtgtgtcacttcactgaattcagagatgcctcattccctgtgggtgacaggatgggttactgtcatgtgtcctctggagcttctcaccccagccctcattttaccatcccaggcatttattttgagccagactgtagcagtgaagacatggatcatggtgtgctggtggttggctacggatttgaaagcacagaatcagataacaataaatattggctggtgaagaacagctggggtgaagaatggggcatgggtggctacgtaaagatggccaaagaccggagaaaccattgtggaattgcctcagcagccagctaccccactgtgtgagctggtggacggtgatgaggaaggacttgactggggatggcgcatgcatgggaggaattcatcttcagtctaccagcccccgctgtgtcggatacacactcgaatcattgaagatccgagtgtgatttgaattctgtgatattttcacactggtaaatgttacctctattttaattactgctataaataggtttatattattgattcacttactgactttgcattttcgtttttaaaaggatgtataaatttttacctgtttaaataaaatttaatttcaaaaaatgtagtggtggggcttctttctatttttgatgcactgaatttttgtgtaataaagaacataattgggctctaagccata

SEQ ID NO: 299662 - DNA, 1330 bp, Homo sapiens
ggcggtgccggccgaacccagacccgaggttttagaagcagagtcaggcgaagctgggccagaaccgcgacctccgcaaccttgagcggcatccgtggagtgcgcctgcgcactacgaccgcagcaggaaagcgccgccggccaggcccagctgtggccggacagggactggaagagaggacgcggtcgagtaggtgtgcaccagccctggcaacgagagcgtctaccccgaactctgctggccttgaggtggggaagccggggagggcagttgaggaccccgcggaggcgcgtgactggttgagcgggcaggccagcctccgagccgggtggacacaggttttaaaacatgaatcctacactcatccttgctgccttttgcctgggaattgcctcagctactctaacatttgatcacagtttagaggcacagtggaccaagtggaaggcgatgcacaacagattatacggcatgaatgaagaaggatggaggagagcagtgtgggagaagaacatgaagatgattgaactgcacaatcaggaatacagggaagggaaacacagcttcacaatggccatgaacgcctttggagacatgaccagtgaagaattcaggcaggtgatgaatggctttcaaaaccgtaagcccaggaaggggaaagtgttccaggaacctctgttttatgaggcccccagatctgtggattggagagagaaaggctacgtgactcctgtgaagaatcagggtcagtgtggttcttgttgggcttttagtgctactggtgctcttgaaggacagatgttccggaaaactgggaggcttatctcactgagtgagcagaatctggtagactgctctgggcctcaaggcaatgaaggctgcaatggtggcctaatggattatgctttccagtatgttcaggataatggaggcctggactctgaggaatcctatccatatgaggcaacagtaagtggagctccttgtcatcattccagctcagcttttggaaggtggacactttcagagataacagatacctttttcggaattcatatattagggctgggtggggtggctcacgcctgtaatcccagccctttaggaggctgagccaggcagatggcttaagctcaggagtttgagaccagcctgggcaacaaggtgaaaccttgactctatcaaaaatacaacgaaaattagccggctgtggtggtgtgcgtctgtggtcccagctatgctgaggtagggcgattgcttgagtgtgggaggtggttgtgcaaatgcactctccagtctgagtgacagaatgagaccctgtctccaaaa

SEQ ID NO: 299663 - DNA, 522 bp, Homo sapiens
atgtacctccccctgatactttgctcaactctcctttgtacaaatgatcttgattcttatgccatctacctcttccttctgcttacctaccaaatcctggttatcccataatagtccattgtggaattgcctcagcagccagctaccccactgtgtgagctggtggacggtgatgaggaaggacttgactggggatggcgcatgcatgggaggaattcatcttcagtctaccagcccccgctgtgtcggatacacactcgaatcattgaagatccgagtgtgatttgaattctgtgatattttcacactggtaaatgttacctctattttaattactgctataaataggtttatattattgattcacttactgactttgcattttcgtttttaaaaggatgtataaatttttacctgtttaaataaaatttaatttcaaaaaatgtagtggtggggcttctttctatttttgatgcactgaatttttgtgtaataaagaacataattgggctctaagccata

SEQ ID NO: 299664 - DNA, 466 bp, Homo sapiens
tgttacctcatccagatgctgactttattatctgaattttctagcttgataaacaaacgtaccaccctgtcggtgcctgggatagcaaagagcacctttcacaggctactgggattctaacagagagaattaaggcaatccagaaaaaattccccacgtggagtgttgctcagcacctcaaaggtaggctgtattctgagtactttgtttaaatgagcaatgaatgagaccactgaaggccagtgtgacccgagactccctgggagcatttccacggggtcagcagtggccctgggaggagctgtctagaggctgcatttgcattccctgaaccactgagttactttgagaggtcctccatcctcaacctccatttcctcttctgcagaatgttggggttcttattcattgcttactgagctattgagtgataccttgaaacatagtgagaccctgtctctacaaa

SEQ ID NO: 299665 - DNA, 760 bp, Homo sapiens
gcacttccaggggctcataccccttcagtcactcaatgaagcctcacctacatccacgcctgtaccacggctgctatggggacatcatgaccatgaagacctctggggccacttgtgatgcaaacagtgtgatgaactgcgggatccgtggttctgaaatgtttgctgagatggatttgagggccataaaaccttaccagactctgatcaaagaagtcgggcagagacattgcgtggaccctgctgtcatcgcagccatcatctccagggaaagccatggcggatctgtcctgcaagacggctgggaccacaggggacttaaatttggcttgatgcagcttgataaacaaacgtaccaccctgtcggtgcctgggatagcaaagagcacctttcacaggctactgggattctaacagagagaattaaggcaatccagaaaaaattccccacgtggagtgttgctcagcacctcaaaggtaggctgtattctgagtactttgtttaaatgagcaatgaatgagaccactgaaggccagtgtgacccgagactccctgggagcatttccacggggtcagcagtggccctgggaggagctgtctagaggctgcatttgcattccctgaaccactgagttactttgagaggtcctccatcctcaacctccatttcctcttctgcagaatgttggggttcttattcattgcttactgagctattgagtgataccttgaaacatagtgagaccctgtctctacaaa

SEQ ID NO: 299666 - DNA, 774 bp, Homo sapiens
taattagagatgggctctcactatgatgcccaggctggtttcgaactcctcctgggttcaagcaatcctcctgtttcagcctcctgtgtagcaggaactgacttcaggcacacactaccatgcccggaaaaacagtttcttttctattgacgtagggatccgtggttctgaaatgtttgctgagatggatttgagggccataaaaccttaccagactctgatcaaagaagtcgggcagagacattgcgtggaccctgctgtcatcgcagccatcatctccagggaaagccatggcggatctgtcctgcaagacggctgggaccacaggggacttaaatttggcttgatgcagcttgataaacaaacgtaccaccctgtcggtgcctgggatagcaaagagcacctttcacaggctactgggattctaacagagagaattaaggcaatccagaaaaaattccccacgtggagtgttgctcagcacctcaaaggtaggctgtattctgagtactttgtttaaatgagcaatgaatgagaccactgaaggccagtgtgacccgagactccctgggagcatttccacggggtcagcagtggccctgggaggagctgtctagaggctgcatttgcattccctgaaccactgagttactttgagaggtcctccatcctcaacctccatttcctcttctgcagaatgttggggttcttattcattgcttactgagctattgagtgataccttgaaacatagtgagaccctgtctctacaaa

SEQ ID NO: 299667 - DNA, 2824 bp, Homo sapiens
cccccgcgccgcgcagccccggccgccaggccttagcccgccccggcccccgccaggccgcgtccccctcccctcccctcccccgcgcgccacccgcgcccgcccccgcccggcaccgcggacccacccggacctcggcggggagatggaggtcctggcggcagagaccacgtcccagcaggagcggctgcaggccatcgcagagaagcggaagcggcaggcggagatcgagaacaagcgccggcagctggaggacgagcggaggcagctgcagcacctgaagtccaaggcactgcgggagcgctggctgctggaggggacgccgtcctcggcctcagagggggatgaggacctgaggaggcagatgcaggacgacgagcagaagacacggctgctggaggactcggtgtccaggttggagaaggaaattgaggtgctggagcgtggagactccgccccagccgctgccaaggagaacgcggcggccccgagcccagtccgggccccagccccgagtccagccaaggaggagcgcaagacagaggtggtgatgaattcacagcagacgccggtgggcacgcccaaagacaagcgagtctccaacacgcccctgaggacggttgacggctcccccatgatgaaggcagccatgtactcggttgagatcactgtggagaaggacaaggtgacaggggagaccagggtgctgtccagcaccacgctgctccctcggcagccgctccctctgggcatcaaagtctacgaggacgagaccaaagtggtccatgctgtggacggcaccgccgagaacgggatccaccccctgagctcctccgaggtggacgaactcatccacaaagcggacgaggtcacgctgagcgaggcagggtccacggccggggcggcagagacccggggggctgtggagggggcagcccggaccacgccctcccggcgggagatcaccggtgtgcaggcacagccaggcgaggccacgtccggcccgccggggatccagcccggccaggagcccccggtcacaatgatcttcatgggttaccagaacgtggaggatgaggccgagaccaagaaggtgctgggccttcaagataccatcacggcggagctggtggtcatcgaagacgcggctgagcccaaggagcctgcaccacccaacggcagtgctgccgagcctcccacggaggccgcctccagggaagagaatcaggcggggcccgaggccaccaccagcgacccccaggacctcgacatgaagaagcaccgttgtaaatgctgctccatcatgtgagccggcccccgagaccccggcccccaccccacaccacagacacccaccagcccggcccctcccggcgcctgcccaccctccacccacagcctcacgggtccaggacttggcgtgttgttacatgttccttccgagttttctttcgctggaaagagggacaggggcccccacccgtcaccacgccccaacactccccccgaaccagagccgtgcacttgtgcctggtaggagagagacaggacagacccgcttttcccgagacaaggaccccccatgtcacggcagcttcacagacgcggctcgcgcccaccggggtcctggcgggtgggacccgcggcctccacgcggcccaggccagcctgccaccctctgggcctcctacctgtgcctttctctgaggggacaccccgccagagagggccccgggagccgggggtgggtactgaggcctgctcaggccctggaagtgaggctctatggggttccctggccaaggcgctggccccccaatctcaggcagttggggtgaggccgtgcctctttgggggctaaaggtcttgggtggaggacaggcccctctgctgtgcccctatgccctgtgtgggcccaaccagtggacaatggagtctgggggagggggaaccccggggacatgcccccacccgggaggggccggtaacccctgggctatcttctagacggggcgaaccaggggtcattgacctgccccctgcacagggcagggaccgagtgagccactccttgtcccgagctcccgcccccactgggccctccttcctcctggtgctaatttggggaccccaggggccgcccccggcctcttctccatcctgcttggaccagggtcctgggtcttcccaaccataccccgagatcaggccccacctgccagctctactgggcttggagcacgtccgggcagtggagggagggacacagcctgggacaggaagcctcttgggttggagcaggagaccctcatttgccacccagaccaatgtgagcctgcccccagccccctctcattggaagtggcaaggggcttccctcctgggggcagctacactcgtccccagaggcacattcgtgcacattctcacagacaccgtctcacacgttggctttggacaaccaggccccaacttggtccctgccctagggacctccagcctggtgcccagtgctcaggccacctcctggtccagtcaccacctgcagcctcggcagggcaggtacaggggccacctcggatgggagcctgggtccctgcctccgctctgcccctgggtggctgggaggagaggccctctcgggggtgacctgggcgtcagccgtggaaccccctcctcctccctggagtctgcctgagtccctcgagccgcgagccttcgctgaagtgcccttgctataaccccctctgcttctggtgtgtgacgaggcccccgatgttcttgattttcccagagaagcaaataaacagcgtgaacagcccca

SEQ ID NO: 299668 - DNA, 599 bp, Homo sapiens
gaggaggcagatgcaggacgacgagcagaagacacggctgctggaggactcggtgtcaggttggagaaggaaattgagtgtgctggagatggaggtcctggcggcagagaccacgtcccagcaggagcggctgcaggccatcgcagagaagcggaagcggcaggcggagatcgagaacaagcgccggcagctggaggacgagcggaggcagctgcagcacctgaagtccaaggcactgcgggagcgctggctgctggaggggacgccgtcctcggcctcagagggggatgaggacctgaggaggcagatgcaggacgacgagcagaagactccgccccagccgctgccaaggagaacgcggcggccccgagcccagtccgggccccagccccgagtccagccaaggaggagcgcaagacagaggtggtgatgaattcacagcagaacgcctggttgggcacgcccaaagacaaagcgagtctccaagacggcccctgaggaacggttgacggctcccccatgatgcaacggcagtggtccatgcctgtggaaccgggcaccgggccgaaggaaaccggggaattcccaagcccccttga

SEQ ID NO: 299669 - DNA, 2931 bp, Homo sapiens
tctgggcccttccaacaccaacgccccgcaccgcggaggcctctgcggggctcccgtcgggtttgggcctcatgaactcatctcctggagcaggactatctcacgcgctccagacgacgccctcgccgggccccgagccgcccacaccgccacacgccgtaaaaagcatcgcggggacgggaggcctgtgcgcgccggggtgggcgtcgggcggggggcgtggcgctccaggggctctgcgcggctgccgggagccagggaggctcggagacccagcacctgccccgggacccccagcacctgccctgggacccccagcagcaccaggaccgccgccgccctgagcttttccacgcctttgcccgggactcagctcctccgcccagcatggtcctggcggcagagaccacgtcccagcaggagcggctgcaggccatcgcagagaagcggaagcggcaggcggagatcgagaacaagcgccggcagctggaggacgagcggaggcagctgcagcacctgaagtccaaggcactgcgggagcgctggctgctggaggggacgccgtcctcggcctcagagggggatgaggacctgaggaggcagatgcaggacgacgagcagaagacacggctgctggaggactcggtgtccaggttggagaaggaaattgaggtgctggagcgtggagactccgccccagccgctgccaaggagaacgcggcggccccgagcccagtccgggccccagccccgagtccagccaaggaggagcgcaagacagaggtggtgatgaattcacagcagacgccggtgggcacgcccaaagacaagcgagtctccaacacgcccctgaggacggttgacggctcccccatgatgaaggcagtggtccatgctgtggacggcaccgccgagaacgggatccaccccctgagctcctccgaggtggacgaactcatccacaaagcggacgaggtcacgctgagcgaggcagggtccacggccggggcggcagagacccggggggctgtggagggggcagcccggaccacgccctcccggcgggagatcaccggtgtgcaggcacagccaggcgaggccacgtccggcccgccggggatccagcccggccaggagcccccggtcacaatgatcttcatgggttaccagaacgtggaggatgaggccgagaccaagaaggtgctgggccttcaagataccatcacggcggagctggtggtcatcgaagacgcggctgagcccaaggagcctgcaccacccaacggcagtgctgccgagcctcccacggaggccgcctccagggaagagaatcaggcggggcccgaggccaccaccagcgacccccaggacctcgacatgaagaagcaccgttgtaaatgctgctccatcatgtgagccggcccccgagaccccggcccccaccccacaccacagacacccaccagcccggcccctcccggcgcctgcccaccctccacccacagcctcacgggtccaggacttggcgtgttgttacatgttccttccgagttttctttcgctggaaagagggacaggggcccccacccgtcaccacgccccaacactccccccgaaccagagccgtgcacttgtgcctggtaggagagagacaggacagacccgcttttcccgagacaaggaccccccatgtcacggcagcttcacagacgcggctcgcgcccaccggggtcctggcgggtgggacccgcggcctccacgcggcccaggccagcctgccaccctctgggcctcctacctgtgcctttctctgaggggacaccccgccagagagggccccgggagccgggggtgggtactgaggcctgctcaggccctggaagtgaggctctatggggttccctggccaaggcgctggccccccaatctcaggcagttggggtgaggccgtgcctctttgggggctaaaggtcttgggtggaggacaggcccctctgctgtgcccctatgccctgtgtgggcccaaccagtggacaatggagtctgggggagggggaaccccggggacatgcccccacccgggaggggccggtaacccctgggctatcttctagacggggcgaaccaggggtcattgacctgccccctgcacagggcagggaccgagtgagccactccttgtcccgagctcccgcccccactgggccctccttcctcctggtgctaatttggggaccccaggggccgcccccggcctcttctccatcctgcttggaccagggtcctgggtcttcccaaccataccccgagatcaggccccacctgccagctctactgggcttggagcacgtccgggcagtggagggagggacacagcctgggacaggaagcctcttgggttggagcaggagaccctcatttgccacccagaccaatgtgagcctgcccccagccccctctcattggaagtggcaaggggcttccctcctgggggcagctacactcgtccccagaggcacattcgtgcacattctcacagacaccgtctcacacgttggctttggacaaccaggccccaacttggtccctgccctagggacctccagcctggtgcccagtgctcaggccacctcctggtccagtcaccacctgcagcctcggcagggcaggtacaggggccacctcggatgggagcctgggtccctgcctccgctctgcccctgggtggctgggaggagaggccctctcgggggtgacctgggcgtcagccgtggaaccccctcctcctccctggagtctgcctgagtccctcgagccgcgagccttcgctgaagtgcccttgctataaccccctctgcttctggtgtgtgacgaggcccccgatgttcttgattttcccagagaagcaaataaacagcgtgaacagcccca

SEQ ID NO: 299670 - DNA, 2956 bp, Homo sapiens
tctgggcccttccaacaccaacgccccgcaccgcggaggcctctgcggggctcccgtcgggtttgggcctcatgaactcatctcctggagcaggactatctcacgcgctccagacgacgccctcgccgggccccgagccgcccacaccgccacacgccgtaaaaagcatcgcggggacgggaggcctgtgcgcgccggggtgggcgtcgggcggggggcgtggcgctccaggggctctgcgcggctgccgggagccagggaggctcggagacccagcacctgccccgggacccccagcacctgccctgggacccccagcagcaccaggaccgccgccgccctgagcttttccacgcctttgcccgggactcagctcctccgcccagcatggtcctggcggcagagaccacgtcccagcaggagcggctgcaggccatcgcagagaagcggaagcggcaggcggagatcgagaacaagcgccggcagctggaggacgagcggaggcagctgcagcacctgaagtccaaggcactgcgggagcgctggctgctggaggggacgccgtcctcggcctcagagggggatgaggacctgaggaggcagatgcaggacgacgagcagaagacacggctgctggaggactcggtgtccaggttggagaaggaaattgaggtgctggagcgtggagactccgccccagccgctgccaaggagaacgcggcggccccgagcccagtccgggccccagccccgagtccagccaaggaggagcgcaagacagaggtggtgatgaattcacagcagacgccggtgggcacgcccaaagacaagcgagtctccaacacgcccctgaggacggttgacggctcccccatgatgaaggcagtggtccatgctgtggacggcaccgccgagaacgggatccaccccctgagctcctccgaggtggacgaactcatccacaaagcggacgaggtcacgctgagcgaggcagggtccacggccggggcggcagagacccggggggctgtggagggggcagcccggaccacgccctcccggcgggagatcaccggtgtgcaggcacagccaggcgaggccacgtccggcccgccggggatccagcccggccaggagcccccggtcacaatgatcttcatgggttaccagaacgtggaggatgaggccgagaccaagaaggtgctgggccttcaagataccatcacggcggagctggtggtcatcgaagacgcggctgagcccaaggagcctgcaccacccaacggcagtgctgccgagcctcccacggaggccgcctccagggaagagaatcaggcggggcccgaggccaccaccagcgacccccaggacctcgacatgaagaagcaccgttgtaaatgctgctccatcatgtgagccggcccccgagaccccggcccccaccccacaccacagacacccaccagcccggcccctcccggcgcctgcccaccctccacccacagcctcacgggtccaggacttggcgtgttgttacatgttccttccgagttttctttcgctggaaagagggacaggggcccccacccgtcaccacgccccaacactccccccgaaccagagccgtgcacttgtgcctggtaggagagagacaggacagacccgcttttcccgagacaaggaccccccatgtcacggcagcttcacagacgcggctcgcgcccaccggggtcctggcgggtgggacccgcggcctccacgcggcccaggccagcctgccaccctctgggcctcctacctgtgcctttctctgaggggacaccccgccagagagggccccgggagccgggggtgggtactgaggcctgctcaggccctggaagtgaggctctatggggttccctggccaaggcgctggccccccaatctcaggcagttggggtgaggccgtgcctctttgggggctaaaggtcttgggtggaggacaggcccctctgctgtgcccctatgccctgtgtgggcccaaccagtggacaatggagtctgggggagggggaaccccggggacatgcccccacccgggaggggccggtaacccctgggctatcttctagacggggcgaaccaggggtcattgacctgccccctgcacagggcagggaccgagtgagccactccttgtcccgagctcccgcccccactgggccctccttcctcctggtgctaatttggggaccccaggggccgcccccggcctcttctccatcctgcttggaccagggtcctgggtcttcccaaccataccccgagatcaggccccacctgccagctctactgggcttggagcacgtccgggcagtggagggagggacacagcctgggacaggaagcctcttgggttggagcaggagaccctcatttgccacccagaccaatgtgagcctgcccccagccccctctcattggaagtggcaaggggcttccctcctgggggcagctacactcgtccccagaggcacattcgtgcacattctcacagacaccgtctcacacgttggctttggacaaccaggccccaacttggtccctgccctagggacctccagcctggtgcccagtgctcaggccacctcctggtccagtcaccacctgcagcctcggcagggcaggtacaggggccacctcggatgggagcctgggtccctgcctccgctctgcccctgggtggctgggaggagaggccctctcgggggtgacctgggcgtcagccgtggaaccccctcctcctccctggagtctgcctgagtccctcgagccgcgagccttcgctgaagtgcccttgctataaccccctctgcttctggtgtgtgacgaggcccccgatgttcttgattttcccagagaagcaaataaacagcgtgaacagccccacagcaaaaaaacaaaacaaaaaaag

SEQ ID NO: 299671 - DNA, 417 bp, Homo sapiens
tcctcctccctggagtctgcctgagtccctcgagccgcgagccttcgctgaagtgcccttgctataaccccctctgcttctggtgtgtgacgaggcccccgatgttcttgattttcccagagaagcaaataaacagcgtgaacagccccacccagttcctggagttcttgcctttcaacctggcgaggaaggcgtggccaggccagggggtggggcctgccggcctttgagccattaaagggaggctgagcagggttgcggtgtgctggcttcacctgcctgcacccgctcaccctgagcgccttggggtggtgggaggcgctggaatccccactgtgcaggtaaggcctggctgtaaggggctgctgtgggggggcaggactggcttcccggggggccctcgggttctgcggccgc

SEQ ID NO: 299672 - DNA, 1829 bp, Homo sapiens
gtcgggggcggggggtgcgccggggtagccgagaggcggacgcaacagcggggtcccgcgctgtctgggcggccccaggggctgtcggctcacttccgggaacgccggggaaccgcagtagccgcctgctagtggcgctgctagccggccggcgcaggctgccgagcgggtgagcgcgcaggccaggccaaagccctggtacccgcgcggtgcgggcctcagtctgcggccatgggggcgtccgcgcggctgctgcgagcggtgatcatgggggccccgggctcgggcaagggcaccgtgtcgtcgcgcatcactacacacttcgagctgaagcacctctccagcggggacctgctccgggacaacatgctgcggggcacagaaattggcgtgttagccaaggctttcattgaccaagggaaactcatcccagatgatgtcatgactcggctggcccttcatgagctgaaaaatctcacccagtatagctggctgttggatggttttccaaggacacttccacaggcagaagccctagatagagcttatcagatcgacacagtgattaacctgaatgtgccctttgaggtcattaaacaacgccttactgctcgctggattcatcccgccagtggccgagtctataacattgaattcaaccctcccaaaactgtgggcattgatgacctgactggggagcctctcattcagcgtgaggatgataaaccagagacggttatcaagagactaaaggcttatgaagaccaaacaaagccagtcctggaatattaccagaaaaaaggggtgctggaaacattctccggaacagaaaccaacaagatttggccctatgtatatgctttcctacaaactaaagttccacaaagaagccagaaagcttcagttactccatgaggagaaatgtgtgtaactattaatagtaagatgggcaaacctcctagtccttgcatttagaagctgcttttcctaagacttctagtatgtatgaattctttgaaaattatattacttttatttctactgattttattttggatactaaggatgtgccaaatgattcggatactaagatgcatcgtttgaaatcatctagtgtgttgtatgcagttatcctcaaaaacatcagcgatgtctgaacctttaaaacatctgttagagcaaaattaaaagagcatttggtagtaatctaactttttgttcagttaataagtggttgataaagtttccatatttttctggaaaagttaaaaaaagttacatgtcatttggagaaaatacgtaatcagaaatttgtgcatagattgatgccaaaaaagacatttccagcattgtggaacatggtgagacactatataaaattccagaaagaaagcaactggatttacagatttattgtgagacacaaattcactgctgcctttacactaagaaatgtatatgttaaccatatatgctgtatttattttgtcgttaagcatactttcagtttactcagaattttcaatttgctataaagatgtatcaattagcatatagaaaaatattactttaagatgacttgtttcctttgaaaatacctgtgtactgagggttatgatttgtgtcaaaaattgacataagtgcttttacaagcaccaaagttgaatgaattttcaacaaaatgtaattaaagtctatgttttcagttatgactcaggttaagaaatgtgttttaggatctacttgctggtttttctttttgatccaaatgtgtgatctgccctgataaataacaagttatagtaccatctcccccgccaataaaaaag

SEQ ID NO: 299673 - DNA, 1519 bp, Homo sapiens
acacactcttttacgttatttataaaagagtctcactcaatggaagctggatttcctctcctgtaaaatgagaaattggcgtgttagccaaggctttcattgaccaagggaaactcatcccagatgatgtcatgactcggctggcccttcatgagctgaaaaatctcacccagtatagctggctgttggatggttttccaaggacacttccacaggcagaagccctagatagagcttatcagatcgacacagtgattaacctgaatgtgccctttgaggtcattaaacaacgccttactgctcgctggattcatcccgccagtggccgagtctataacattgaattcaaccctcccaaaactgtgggcattgatgacctgactggggagcctctcattcagcgtgaggatgataaaccagagacggttatcaagagactaaaggcttatgaagaccaaacaaagccagtcctggaatattaccagaaaaaaggggtgctggaaacattctccggaacagaaaccaacaagatttggccctatgtatatgctttcctacaaactaaagttccacaaagaagccagaaagcttcagttactccatgaggagaaatgtgtgtaactattaatagtaagatgggcaaacctcctagtccttgcatttagaagctgcttttcctaagacttctagtatgtatgaattctttgaaaattatattacttttatttctactgattttattttggatactaaggatgtgccaaatgattcggatactaagatgcatcgtttgaaatcatctagtgtgttgtatgcagttatcctcaaaaacatcagcgatgtctgaacctttaaaacatctgttagagcaaaattaaaagagcatttggtagtaatctaactttttgttcagttaataagtggttgataaagtttccatatttttctggaaaagttaaaaaaagttacatgtcatttggagaaaatacgtaatcagaaatttgtgcatagattgatgccaaaaaagacatttccagcattgtggaacatggtgagacactatataaaattccagaaagaaagcaactggatttacagatttattgtgagacacaaattcactgctgcctttacactaagaaatgtatatgttaaccatatatgctgtatttattttgtcgttaagcatactttcagtttactcagaattttcaatttgctataaagatgtatcaattagcatatagaaaaatattactttaagatgacttgtttcctttgaaaatacctgtgtactgagggttatgatttgtgtcaaaaattgacataagtgcttttacaagcaccaaagttgaatgaattttcaacaaaatgtaattaaagtctatgttttcagttatgactcaggttaagaaatgtgttttaggatctacttgctggtttttctttttgatccaaatgtgtgatctgccctgataaataacaagttatagtaccatctcccccgccaataaaaaag

SEQ ID NO: 299674 - DNA, 888 bp, Homo sapiens
gtcgggggcggggggtgcgccggggtagccgagaggcggacgcaacagcggggtcccgcgctgtctgggcggccccaggggctgtcggctcacttccgggaacgccggggaaccgcagtagccgcctgctagtggcgctgctagccggccggcgcaggctgccgagcgggtgagcgcgcaggccaggccaaagccctggtacccgcgcggtgcgggcctcagtctgcggccatgggggcgtccgcgcggctgctgcgagcggtgatcatgggggccccgggctcgggcaagggcaccgtgtcgtcgcgcatcactacacacttcgagctgaagcacctctccagcggggacctgctccgggacaacatgctgcggggcacagaaattggcgtgttagccaaggctttcattgaccaagggaaactcatcccagatgatgtcatgactcggctggcccttcatgagctgaaaaatctcacccagtatagctggctgttggatggttttccaaggacacttccacaggcagaagccctagatagagcttatcagatcgacacagtgattaacctgaatgtgccctttgaggtcattaaacaacgccttactgctcgctggattcatcccgccagtggccgagtctataacattgaattcaaccctcccaaaactgtgggcattgatgacctgactggggagcctctcattcagcgtgaggatgataaaccagagacggttatcaagagactaaaggcttatgaagaccaaacaaagccagtcctggaatattaccagaaggggtgctgaactaagttcacaagaagcagaagctcagtactcatgagggaatgggtgactattatagaagatggccctctagcctgcatg

SEQ ID NO: 299675 - DNA, 818 bp, Homo sapiens
gtcgggggcggggggtgcgccggggtagccgagaggcggacgcaacagcggggtcccgcgctgtctgggcggccccaggggctgtcggctcacttccgggaacgccggggaaccgcagtagccgcctgctagtggcgctgctagccggccggcgcaggctgccgagcgggtgagcgcgcaggccaggccaaagccctggtacccgcgcggtgcgggcctcagtctgcggccatgggggcgtccgcgcggctgctgcgagcggtgatcatgggggccccgggctcgggcaagggcaccgtgtcgtcgcgcatcactacacacttcgagctgaagcacctctccagcggggacctgctccgggacaacatgctgcggggcacagcttccctattccctgagacacaacaatattgaaattaggccaactaataaccctacagtggcctctaagtgttcaagttaaaggaagagagtggcacatctctcactttaaatcaaaagctagaaatgattaagcttagtgaggaaggcatgctgaaaaccaagacaggctgaaaccaggcttcttgcaccagttagccaagttgtaagtgcaaaggaagaccttgaaggaaattaaaagtgctgctccagtaaacactggagcacaagaaagcaaaacaaccttgttgttgatatggagaaagcttgagtggtctagaaagaagatcagaccagccacatcatccattaagccaaagcccagtccagagcaaggccctaattctcttcatttcagtgaaggctgagagatgtgttgaagctgcagaataaaaatt

SEQ ID NO: 299676 - DNA, 3233 bp, Homo sapiens
gtcgggggcggggggtgcgccggggtagccgagaggcggacgcaacagcggggtcccgcgctgtctgggcggccccaggggctgtcggctcacttccgggaacgccggggaaccgcagtagccgcctgctagtggcgctgctagccggccggcgcaggctgccgagcgggtgagcgcgcaggccaggccaaagccctggtacccgcgcggtgcgggcctcagtctgcggccatgggggcgtccgcgcggctgctgcgagcggtgatcatgggggccccgggctcgggcaagggcaccgtgtcgtcgcgcatcactacacacttcgagctgaagcacctctccagcggggacctgctccgggacaacatgctgcggggcacagaaattggcgtgttagccaaggctttcattgaccaagggaaactcatcccagatgatgtcatgactcggctggcccttcatgagctgaaaaatctcacccagtatagctggctgttggatggttttccaaggacacttccacaggcagaagccctagatagagcttatcagatcgacacagtgattaacctgaatgtgccctttgaggtcattaaacaacgccttactgctcgctggattcatcccgccagtggccgagtctataacattgaattcaaccctcccaaaactgtgggcattgatgacctgactggggagcctctcattcagcgtgaggatgataaaccagagacggttatcaagagactaaaggcttatgaagaccaaacaaagccagtcctggaatattaccagaaaaaaggggtgctggaaacattctccggaacagaaaccaacaagatttggccctatgtatatgctttcctacaaactaaagttccacaaagaagccagaaagcttcagttactccatgaggagaaatgtgtgtaactattaatagtaagatgggcaaacctcctagtccttgcatttagaagctgcttttcctaagacttctagtatgtatgaattctttgaaaattatattacttttatttctactgattttattttggatactaaggatgtgccaaatgattcggatactaagatgcatcgtttgaaatcatctagtgtgttgtatgcagttatcctcaaaaacatcagcgatgtctgaacctttaaaacatctgttagagcaaaattaaaagagcatttggtagtaatctaactttttgttcagttaataagtggttgataaagtttccatatttttctggaaaagttaaaaaaagttacatgtcatttggagaaaatacgtaatcagaaatttgtgcatagattgatgccaaaaaagacatttccagcattgtggaacatggtgagacactatataaaattccagaaagaaagcaactggatttacagatttattgtgagacacaaattcactgctgcctttacactaagaaatgtatatgttaaccatatatgctgtatttattttgtcgttaagcatactttcagtttactcagaattttcaatttgctataaagatgtatcaattagcatatagaaaaatattactttaagatgacttgtttcctttgaaaatacctgtgtactgagggttatgatttgtgtcaaaaattgacataagtgcttttacaagcaccaaagttgaatgaattttcaacaaaatgtaattaaagtctatgttttcagttatgactcaggttaagaaatgtgttttaggatctacttgctggtttttctttttgatccaaatgtgtgatctgccctgataaataacaagttatagtaccatctcccccgccaataaaaaagagaagaaaaaagagaaacccgtggcactatgtaaataaagtaagcatactttgttgttagtaaatagatgaggcatgcctgggaaatgctcccttggcataaatagcaatcaattataattagtaaacaggtgtaccaataaaaagaatttacatgataggttaacaaggaccaggaaagtgagtttcctgaaggagttctttgttcctgatcaaagaaattgatacctgttagcattcactgccaccatattttaaggagaaagaactctattggtgtcgtctgagcagccatttaaaaattggaatctaaaggatggttgctgatgtactgtgtggtctggtagaagtggggaaatatgagagatggaggaaaaacttgattatgtcttccatggcatatttactcttactttacttcgtgccaaatcaaatgaaacaagccgtcttacaagtcgttattgcctttaaaaatctgttccgtttttttcccaggtacttaaaatacaagtgccagtaagtggttcttatgtgttttggggggaaaattttatttcccttttcttctgatatttaaaaaattcatcgatctttcaagatgaaccaaggttttttaaaagaattataggaaacacttcattctttataaaactttctataatgccttatttgaatgttaatcttatgtgctttctaaaaaatgttgtgaaataccaaacttatggattatcactaggttatcaagcatatattagtctttatcagaataaaatgaaatttcataactgtggctattactttgttcttggtccttcacagggcctgctccatcccacctgcctttctgctgcctgatgtctcaatggcttctgaatgactgttctaataaatgatcttaaaacagtccaaaaaaaaaaaaaaaaaaacaaaacaaaaaaaaaaaaaaaaaaaaaaaaaaaaaaaaaacaaaaccaaaaaaacacaaaaaaaacaataccaaacaaaaaacaaaaaaaaaaaaggaagggggggggcgggaaaaaatatctccccggggggggcgcccaacacccccccccctttttgtaaaggggcccccccagagggggctaaaaaaaaggggcggcgggcgaacaccaggcggaggagacaaaacactgacgacgttcattggagaggaccacctctggcggtggggaagtagagagcgccccacgaagaagaaagcggcagcaaaacattgctggaggggcaacccgcttgtcgggtcgaaattcctcctgttcttcattcagacgttataaaacagacacgacgacgccaacaacagacgagataaataaatctaaaagatataaatcaccacagtactcgcacactcacactcctccacaatcacgctgac

SEQ ID NO: 299677 - DNA, 2612 bp, Homo sapiens
gtcgggggcggggggtgcgccggggtagccgagaggcggacgcaacagcggggtcccgcgctgtctgggcggccccaggggctgtcggctcacttccgggaacgccggggaaccgcagtagccgcctgctagtggcgctgctagccggccggcgcaggctgccgagcgggtgagcgcgcaggccaggccaaagccctggtacccgcgcggtgcgggcctcagtctgcggccatgggggcgtccgcgcggctgctgcgagcggtgatcatgggggccccgggctcgggcaagggcaccgtgtcgtcgcgcatcactacacacttcgagctgaagcacctctccagcggggacctgctccgggacaacatgctgcggggcacagaaattggcgtgttagccaaggctttcattgaccaagggaaactcatcccagatgatgtcatgactcggctggcccttcatgagctgaaaaatctcacccagtatagctggctgttggatggttttccaaggacacttccacaggcagaagccctagatagagcttatcagatcgacacagtgattaacctgaatgtgccctttgaggtcattaaacaacgccttactgctcgctggattcatcccgccagtggccgagtctataacattgaattcaaccctcccaaaactgtgggcattgatgacctgactggggagcctctcattcagcgtgaggatgataaaccagagacggttatcaagagactaaaggcttatgaagaccaaacaaagccagtcctggaatattaccagaaaaaaggggtgctggaaacattctccggaacagaaaccaacaagatttggccctatgtatatgctttcctacaaactaaagttccacaaagaagccagaaagcttcagttactccatgaggagaaatgtgtgtaactattaatagtaagatgggcaaacctcctagtccttgcatttagaagctgcttttcctaagacttctagtatgtatgaattctttgaaaattatattacttttatttctactgattttattttggatactaaggatgtgccaaatgattcggatactaagatgcatcgtttgaaatcatctagtgtgttgtatgcagttatcctcaaaaacatcagcgatgtctgaacctttaaaacatctgttagagcaaaattaaaagagcatttggtagtaatctaactttttgttcagttaataagtggttgataaagtttccatatttttctggaaaagttaaaaaaagttacatgtcatttggagaaaatacgtaatcagaaatttgtgcatagattgatgccaaaaaagacatttccagcattgtggaacatggtgagacactatataaaattccagaaagaaagcaactggatttacagatttattgtgagacacaaattcactgctgcctttacactaagaaatgtatatgttaaccatatatgctgtatttattttgtcgttaagcatactttcagtttactcagaattttcaatttgctataaagatgtatcaattagcatatagaaaaatattactttaagatgacttgtttcctttgaaaatacctgtgtactgagggttatgatttgtgtcaaaaattgacataagtgcttttacaagcaccaaagttgaatgaattttcaacaaaatgtaattaaagtctatgttttcagttatgactcaggttaagaaatgtgttttaggatctacttgctggtttttctttttgatccaaatgtgtgatctgccctgataaataacaagttatagtaccatctcccccgccaataaaaaagagaagaaaaaagagaaacccgtggcactatgtaaataaagtaagcatactttgttgttagtaaatagatgaggcatgcctgggaaatgctcccttggcataaatagcaatcaattataattagtaaacaggtgtaccaataaaaagaatttacatgataggttaacaaggaccaggaaagtgagtttcctgaaggagttctttgttcctgatcaaagaaattgatacctgttagcattcactgccaccatattttaaggagaaagaactctattggtgtcgtctgagcagccatttaaaaattggaatctaaaggatggttgctgatgtactgtgtggtctggtagaagtggggaaatatgagagatggaggaaaaacttgattatgtcttccatggcatatttactcttactttacttcgtgccaaatcaaatgaaacaagccgtcttacaagtcgttattgcctttaaaaatctgttccgtttttttcccaggtacttaaaatacaagtgccagtaagtggttcttatgtgttttggggggaaaattttatttcccttttcttctgatatttaaaaaattcatcgatctttcaagatgaaccaaggttttttaaaagaattataggaaacacttcattctttataaaactttctataatgccttatttgaatgttaatcttatgtgctttctaaaaaatgttgtgaaataccaaacttatggattatcactaggttatcaagcatatattagtctttatcagaataaaatgaaatttcata

SEQ ID NO: 299678 - DNA, 2632 bp, Homo sapiens
  misc_feature (2632)..(2632): n is a, c, g, or t
gtcgggggcggggggtgcgccggggtagccgagaggcggacgcaacagcggggtcccgcgctgtctgggcggccccaggggctgtcggctcacttccgggaacgccggggaaccgcagtagccgcctgctagtggcgctgctagccggccggcgcaggctgccgagcgggtgagcgcgcaggccaggccaaagccctggtacccgcgcggtgcgggcctcagtctgcggccatgggggcgtccgcgcggctgctgcgagcggtgatcatgggggccccgggctcgggcaagggcaccgtgtcgtcgcgcatcactacacacttcgagctgaagcacctctccagcggggacctgctccgggacaacatgctgcggggcacagaaattggcgtgttagccaaggctttcattgaccaagggaaactcatcccagatgatgtcatgactcggctggcccttcatgagctgaaaaatctcacccagtatagctggctgttggatggttttccaaggacacttccacaggcagaagccctagatagagcttatcagatcgacacagtgattaacctgaatgtgccctttgaggtcattaaacaacgccttactgctcgctggattcatcccgccagtggccgagtctataacattgaattcaaccctcccaaaactgtgggcattgatgacctgactggggagcctctcattcagcgtgaggatgataaaccagagacggttatcaagagactaaaggcttatgaagaccaaacaaagccagtcctggaatattaccagaaaaaaggggtgctggaaacattctccggaacagaaaccaacaagatttggccctatgtatatgctttcctacaaactaaagttccacaaagaagccagaaagcttcagttactccatgaggagaaatgtgtgtaactattaatagtaagatgggcaaacctcctagtccttgcatttagaagctgcttttcctaagacttctagtatgtatgaattctttgaaaattatattacttttatttctactgattttattttggatactaaggatgtgccaaatgattcggatactaagatgcatcgtttgaaatcatctagtgtgttgtatgcagttatcctcaaaaacatcagcgatgtctgaacctttaaaacatctgttagagcaaaattaaaagagcatttggtagtaatctaactttttgttcagttaataagtggttgataaagtttccatatttttctggaaaagttaaaaaaagttacatgtcatttggagaaaatacgtaatcagaaatttgtgcatagattgatgccaaaaaagacatttccagcattgtggaacatggtgagacactatataaaattccagaaagaaagcaactggatttacagatttattgtgagacacaaattcactgctgcctttacactaagaaatgtatatgttaaccatatatgctgtatttattttgtcgttaagcatactttcagtttactcagaattttcaatttgctataaagatgtatcaattagcatatagaaaaatattactttaagatgacttgtttcctttgaaaatacctgtgtactgagggttatgatttgtgtcaaaaattgacataagtgcttttacaagcaccaaagttgaatgaattttcaacaaaatgtaattaaagtctatgttttcagttatgactcaggttaagaaatgtgttttaggatctacttgctggtttttctttttgatccaaatgtgtgatctgccctgataaataacaagttatagtaccatctcccccgccaataaaaaagagaagaaaaaagagaaacccgtggcactatgtaaataaagtaagcatactttgttgttagtaaatagatgaggcatgcctgggaaatgctcccttggcataaatagcaatcaattataattagtaaacaggtgtaccaataaaaagaatttacatgataggttaacaaggaccaggaaagtgagtttcctgaaggagttctttgttcctgatcaaagaaattgatacctgttagcattcactgccaccatattttaaggagaaagaactctattggtgtcgtctgagcagccatttaaaaattggaatctaaaggatggttgctgatgtactgtgtggtctggtagaagtggggaaatatgagagatggaggaaaaacttgattatgtcttccatggcatatttactcttactttacttcgtgccaaatcaaatgaaacaagccgtcttacaagtcgttattgcctttaaaaatctgttccgtttttttcccaggtacttaaaatacaagtgccagtaagtggttcttatgtgttttggggggaaaattttatttcccttttcttctgatatttaaaaaattcatcgatctttcaagatgaaccaaggttttaaagaatttgaaccttcatcttataacttctataggctatgagtaactaggtgctctaaagtggattcacttggtttcctgttcaggtttgctttcgaaaagaaacagggaaggtggccagggcccccctttggggtcgcggtggtggttaaaaaaaggcgggaagggggggaggttagagtaactggagn

SEQ ID NO: 299679 - DNA, 2480 bp, Homo sapiens
  misc_feature (2410)..(2410): n is a, c, g, or t
  misc_feature (2412)..(2412): n is a, c, g, or t
  misc_feature (2418)..(2419): n is a, c, g, or t
  misc_feature (2423)..(2423): n is a, c, g, or t
  misc_feature (2428)..(2428): n is a, c, g, or t
  misc_feature (2435)..(2435): n is a, c, g, or t
  misc_feature (2441)..(2441): n is a, c, g, or t
  misc_feature (2446)..(2446): n is a, c, g, or t
gtcgggggcggggggtgcgccggggtagccgagaggcggacgcaacagcggggtcccgcgctgtctgggcggccccaggggctgtcggctcacttccgggaacgccggggaaccgcagtagccgcctgctagtggcgctgctagccggccggcgcaggctgccgagcgggtgagcgcgcaggccaggccaaagccctggtacccgcgcggtgcgggcctcagtctgcggccatgggggcgtccgcgcggctgctgcgagcggtgatcatgggggccccgggctcgggcaagggcaccgtgtcgtcgcgcatcactacacacttcgagctgaagcacctctccagcggggacctgctccgggacaacatgctgcggggcacagaaattggcgtgttagccaaggctttcattgaccaagggaaactcatcccagatgatgtcatgactcggctggcccttcatgagctgaaaaatctcacccagtatagctggctgttggatggttttccaaggacacttccacaggcagaagccctagatagagcttatcagatcgacacagtgattaacctgaatgtgccctttgaggtcattaaacaacgccttactgctcgctggattcatcccgccagtggccgagtctataacattgaattcaaccctcccaaaactgtgggcattgatgacctgactggggagcctctcattcagcgtgaggatgataaaccagagacggttatcaagagactaaaggcttatgaagaccaaacaaagccagtcctggaatattaccagaaaaaaggggtgctggaaacattctccggaacagaaaccaacaagatttggccctatgtatatgctttcctacaaactaaagttccacaaagaagccagaaagcttcagttactccatgaggagaaatgtgtgtaactattaatagtaagatgggcaaacctcctagtccttgcatttagaagctgcttttcctaagacttctagtatgtatgaattctttgaaaattatattacttttatttctactgattttattttggatactaaggatgtgccaaatgattcggatactaagatgcatcgtttgaaatcatctagtgtgttgtatgcagttatcctcaaaaacatcagcgatgtctgaacctttaaaacatctgttagagcaaaattaaaagagcatttggtagtaatctaactttttgttcagttaataagtggttgataaagtttccatatttttctggaaaagttaaaaaaagttacatgtcatttggagaaaatacgtaatcagaaatttgtgcatagattgatgccaaaaaagacatttccagcattgtggaacatggtgagacactatataaaattccagaaagaaagcaactggatttacagatttattgtgagacacaaattcactgctgcctttacactaagaaatgtatatgttaaccatatatgctgtatttattttgtcgttaagcatactttcagtttactcagaattttcaatttgctataaagatgtatcaattagcatatagaaaaatattactttaagatgacttgtttcctttgaaaatacctgtgtactgagggttatgatttgtgtcaaaaattgacataagtgcttttacaagcaccaaagttgaatgaattttcaacaaaatgtaattaaagtctatgttttcagttatgactcaggttaagaaatgtgttttaggatctacttgctggtttttctttttgatccaaatgtgtgatctgccctgataaataacaagttatagtaccatctcccccgccaataaaaaagagaagaaaaaagagaaacccgtggcactatgtaaataaagtaagcatactttgttgttagtaaatagatgaggcatgcctgggaaatgctcccttggcataaatagcaatcaattataattagtaaacaggtgtaccaataaaaagaatttacatgataggttaacaaggaccaggaaagtgagtttcctgaaggagttctttgttcctgatcaaagaaattgatacctgttagcattcactgccaccatattttaaggagaaagaactctattggtgtcgtctgagcagccatttaaaaattggaatctaaaggatggttgctgatgtactgtgtggtctggtagaagtggggaaatatgagagatggaggaaaaacttgattatgtcttccatggcatatttactcttactttacttcgtgccaaatcaaatgaaacaagccgtcttacaagtcgttattgcctttaaaaatctgttccgtttttttcccaggtacttaaaatacaagtgccagtaagtggttcttatgtgttttggggggaaaattttatttcccttttcttctgatatttaaaaatncngcttcnnatanccggntttaaanttggancctcntttaaattataaacataaagaacatgcccacagg

SEQ ID NO: 299680 - DNA, 3179 bp, Homo sapiens
gtcgggggcggggggtgcgccggggtagccgagaggcggacgcaacagcggggtcccgcgctgtctgggcggccccaggggctgtcggctcacttccgggaacgccggggaaccgcagtagccgcctgctagtggcgctgctagccggccggcgcaggctgccgagcgggtgagcgcgcaggccaggccaaagccctggtacccgcgcggtgcgggcctcagtctgcggccatgggggcgtccgcgcggctgctgcgagcggtgatcatgggggccccgggctcgggcaagggcaccgtgtcgtcgcgcatcactacacacttcgagctgaagcacctctccagcggggacctgctccgggacaacatgctgcggggcacagaaattggcgtgttagccaaggctttcattgaccaagggaaactcatcccagatgatgtcatgactcggctggcccttcatgagctgaaaaatctcacccagtatagctggctgttggatggttttccaaggacacttccacaggcagaagccctagatagagcttatcagatcgacacagtgattaacctgaatgtgccctttgaggtcattaaacaacgccttactgctcgctggattcatcccgccagtggccgagtctataacattgaattcaaccctcccaaaactgtgggcattgatgacctgactggggagcctctcattcagcgtgaggatgataaaccagagacggttatcaagagactaaaggcttatgaagaccaaacaaagccagtcctggaatattaccagaaaaaaggggtgctggaaacattctccggaacagaaaccaacaagatttggccctatgtatatgctttcctacaaactaaagttccacaaagaagccagaaagcttcagttactccatgaggagaaatgtgtgtaactattaatagtaagatgggcaaacctcctagtccttgcatttagaagctgcttttcctaagacttctagtatgtatgaattctttgaaaattatattacttttatttctactgattttattttggatactaaggatgtgccaaatgattcggatactaagatgcatcgtttgaaatcatctagtgtgttgtatgcagttatcctcaaaaacatcagcgatgtctgaacctttaaaacatctgttagagcaaaattaaaagagcatttggtagtaatctaactttttgttcagttaataagtggttgataaagtttccatatttttctggaaaagttaaaaaaagttacatgtcatttggagaaaatacgtaatcagaaatttgtgcatagattgatgccaaaaaagacatttccagcattgtggaacatggtgagacactatataaaattccagaaagaaagcaactggatttacagatttattgtgagacacaaattcactgtcgttaagcatactttcagtttactcagaattttcaatttgctataaagatgtatcaattagcatatagaaaaatattactttaagatgacttgtttcctttgaaaatacctgtgtactgagggttatgatttgtgtcaaaaattgacataagtgcttttacaagcaccaaagttgaatgaattttcaacaaaatgtaattaaagtctatgttttcagttatgactcaggttaagaaatgtgttttaggatctacttgctggtttttctttttgatccaaatgtgtgatctgccctgataaataacaagttatagtaccatctcccccgccaataaaaaagagaagaaaaaagagaaacccgtggcactatgtaaataaagtaagcatactttgttgttagtaaatagatgaggcatgcctgggaaatgctcccttggcataaatagcaatcaattataattagtaaacaggtgtaccaataaaaagaatttacatgataggttaacaaggaccaggaaagtgagtttcctgaaggagttctttgttcctgatcaaagaaattgatacctgttagcattcactgccaccatattttaaggagaaagaactctattggtgtcgtctgagcagccatttaaaaattggaatctaaaggatggttgctgatgtactgtgtggtctggtagaagtggggaaatatgagagatggaggaaaaacttgattatgtcttccatggcatatttactcttactttacttcgtgccaaatcaaatgaaacaagccgtcttacaagtcgttattgcctttaaaaatctgttccgtttttttcccaggtacttaaaatacaagtgccagtaagtggttcttatgtgttttggggggaaaattttatttcccttttcttctgatatttaaaaaattcatcgatctttcaagatgaaccaaggttttttaaaagaattataggaaacacttcattctttataaaactttctataatgccttatttgaatgttaatcttatgtgctttctaaaaaatgttgtgaaataccaaacttatggattatcactaggttatcaagcatatattagtctttatcagaataaaatgaaatttcataactgtggctattactttgttcttggtccttcacagggcctgctccatcccacctgcctttctgctgcctgatgtctcaatggcttctgaatgactgttctaataaatgatcttaaaacagtccaaaaaaaaaaaaaaaaaaacaaaacaaaaaaaaaaaaaaaaaaaaaaaaaaaaaaaaaacaaaaccaaaaaaacacaaaaaaaacaataccaaacaaaaaacaaaaaaaaaaaaggaagggggggggcgggaaaaaatatctccccggggggggcgcccaacacccccccccctttttgtaaaggggcccccccagagggggctaaaaaaaaggggcggcgggcgaacaccaggcggaggagacaaaacactgacgacgttcattggagaggaccacctctggcggtggggaagtagagagcgccccacgaagaagaaagcggcagcaaaacattgctggaggggcaacccgcttgtcgggtcgaaattcctcctgttcttcattcagacgttataaaacagacacgacgacgccaacaacagacgagataaataaatctaaaagatataaatcaccacagtactcgcacactcacactcctccacaatcacgctgac

SEQ ID NO: 299681 - DNA, 2923 bp, Homo sapiens
acacactcttttacgttatttataaaagagtctcactcaatggaagctggatttcctctcctgtaaaatgagaaattggcgtgttagccaaggctttcattgaccaagggaaactcatcccagatgatgtcatgactcggctggcccttcatgagctgaaaaatctcacccagtatagctggctgttggatggttttccaaggacacttccacaggcagaagccctagatagagcttatcagatcgacacagtgattaacctgaatgtgccctttgaggtcattaaacaacgccttactgctcgctggattcatcccgccagtggccgagtctataacattgaattcaaccctcccaaaactgtgggcattgatgacctgactggggagcctctcattcagcgtgaggatgataaaccagagacggttatcaagagactaaaggcttatgaagaccaaacaaagccagtcctggaatattaccagaaaaaaggggtgctggaaacattctccggaacagaaaccaacaagatttggccctatgtatatgctttcctacaaactaaagttccacaaagaagccagaaagcttcagttactccatgaggagaaatgtgtgtaactattaatagtaagatgggcaaacctcctagtccttgcatttagaagctgcttttcctaagacttctagtatgtatgaattctttgaaaattatattacttttatttctactgattttattttggatactaaggatgtgccaaatgattcggatactaagatgcatcgtttgaaatcatctagtgtgttgtatgcagttatcctcaaaaacatcagcgatgtctgaacctttaaaacatctgttagagcaaaattaaaagagcatttggtagtaatctaactttttgttcagttaataagtggttgataaagtttccatatttttctggaaaagttaaaaaaagttacatgtcatttggagaaaatacgtaatcagaaatttgtgcatagattgatgccaaaaaagacatttccagcattgtggaacatggtgagacactatataaaattccagaaagaaagcaactggatttacagatttattgtgagacacaaattcactgctgcctttacactaagaaatgtatatgttaaccatatatgctgtatttattttgtcgttaagcatactttcagtttactcagaattttcaatttgctataaagatgtatcaattagcatatagaaaaatattactttaagatgacttgtttcctttgaaaatacctgtgtactgagggttatgatttgtgtcaaaaattgacataagtgcttttacaagcaccaaagttgaatgaattttcaacaaaatgtaattaaagtctatgttttcagttatgactcaggttaagaaatgtgttttaggatctacttgctggtttttctttttgatccaaatgtgtgatctgccctgataaataacaagttatagtaccatctcccccgccaataaaaaagagaagaaaaaagagaaacccgtggcactatgtaaataaagtaagcatactttgttgttagtaaatagatgaggcatgcctgggaaatgctcccttggcataaatagcaatcaattataattagtaaacaggtgtaccaataaaaagaatttacatgataggttaacaaggaccaggaaagtgagtttcctgaaggagttctttgttcctgatcaaagaaattgatacctgttagcattcactgccaccatattttaaggagaaagaactctattggtgtcgtctgagcagccatttaaaaattggaatctaaaggatggttgctgatgtactgtgtggtctggtagaagtggggaaatatgagagatggaggaaaaacttgattatgtcttccatggcatatttactcttactttacttcgtgccaaatcaaatgaaacaagccgtcttacaagtcgttattgcctttaaaaatctgttccgtttttttcccaggtacttaaaatacaagtgccagtaagtggttcttatgtgttttggggggaaaattttatttcccttttcttctgatatttaaaaaattcatcgatctttcaagatgaaccaaggttttttaaaagaattataggaaacacttcattctttataaaactttctataatgccttatttgaatgttaatcttatgtgctttctaaaaaatgttgtgaaataccaaacttatggattatcactaggttatcaagcatatattagtctttatcagaataaaatgaaatttcataactgtggctattactttgttcttggtccttcacagggcctgctccatcccacctgcctttctgctgcctgatgtctcaatggcttctgaatgactgttctaataaatgatcttaaaacagtccaaaaaaaaaaaaaaaaaaacaaaacaaaaaaaaaaaaaaaaaaaaaaaaaaaaaaaaaacaaaaccaaaaaaacacaaaaaaaacaataccaaacaaaaaacaaaaaaaaaaaaggaagggggggggcgggaaaaaatatctccccggggggggcgcccaacacccccccccctttttgtaaaggggcccccccagagggggctaaaaaaaaggggcggcgggcgaacaccaggcggaggagacaaaacactgacgacgttcattggagaggaccacctctggcggtggggaagtagagagcgccccacgaagaagaaagcggcagcaaaacattgctggaggggcaacccgcttgtcgggtcgaaattcctcctgttcttcattcagacgttataaaacagacacgacgacgccaacaacagacgagataaataaatctaaaagatataaatcaccacagtactcgcacactcacactcctccacaatcacgctgac

SEQ ID NO: 299682 - DNA, 3004 bp, Homo sapiens
cacagccacctcatcatttagcaacctccatcctgatcagtcagcagccatcagccatggaggcaagaccctccatcagcaaaaagattaagactctctgaaggctcagatgatcattaacattttttagcaataaaactattttaaattaagaaattggcgtgttagccaaggctttcattgaccaagggaaactcatcccagatgatgtcatgactcggctggcccttcatgagctgaaaaatctcacccagtatagctggctgttggatggttttccaaggacacttccacaggcagaagccctagatagagcttatcagatcgacacagtgattaacctgaatgtgccctttgaggtcattaaacaacgccttactgctcgctggattcatcccgccagtggccgagtctataacattgaattcaaccctcccaaaactgtgggcattgatgacctgactggggagcctctcattcagcgtgaggatgataaaccagagacggttatcaagagactaaaggcttatgaagaccaaacaaagccagtcctggaatattaccagaaaaaaggggtgctggaaacattctccggaacagaaaccaacaagatttggccctatgtatatgctttcctacaaactaaagttccacaaagaagccagaaagcttcagttactccatgaggagaaatgtgtgtaactattaatagtaagatgggcaaacctcctagtccttgcatttagaagctgcttttcctaagacttctagtatgtatgaattctttgaaaattatattacttttatttctactgattttattttggatactaaggatgtgccaaatgattcggatactaagatgcatcgtttgaaatcatctagtgtgttgtatgcagttatcctcaaaaacatcagcgatgtctgaacctttaaaacatctgttagagcaaaattaaaagagcatttggtagtaatctaactttttgttcagttaataagtggttgataaagtttccatatttttctggaaaagttaaaaaaagttacatgtcatttggagaaaatacgtaatcagaaatttgtgcatagattgatgccaaaaaagacatttccagcattgtggaacatggtgagacactatataaaattccagaaagaaagcaactggatttacagatttattgtgagacacaaattcactgctgcctttacactaagaaatgtatatgttaaccatatatgctgtatttattttgtcgttaagcatactttcagtttactcagaattttcaatttgctataaagatgtatcaattagcatatagaaaaatattactttaagatgacttgtttcctttgaaaatacctgtgtactgagggttatgatttgtgtcaaaaattgacataagtgcttttacaagcaccaaagttgaatgaattttcaacaaaatgtaattaaagtctatgttttcagttatgactcaggttaagaaatgtgttttaggatctacttgctggtttttctttttgatccaaatgtgtgatctgccctgataaataacaagttatagtaccatctcccccgccaataaaaaagagaagaaaaaagagaaacccgtggcactatgtaaataaagtaagcatactttgttgttagtaaatagatgaggcatgcctgggaaatgctcccttggcataaatagcaatcaattataattagtaaacaggtgtaccaataaaaagaatttacatgataggttaacaaggaccaggaaagtgagtttcctgaaggagttctttgttcctgatcaaagaaattgatacctgttagcattcactgccaccatattttaaggagaaagaactctattggtgtcgtctgagcagccatttaaaaattggaatctaaaggatggttgctgatgtactgtgtggtctggtagaagtggggaaatatgagagatggaggaaaaacttgattatgtcttccatggcatatttactcttactttacttcgtgccaaatcaaatgaaacaagccgtcttacaagtcgttattgcctttaaaaatctgttccgtttttttcccaggtacttaaaatacaagtgccagtaagtggttcttatgtgttttggggggaaaattttatttcccttttcttctgatatttaaaaaattcatcgatctttcaagatgaaccaaggttttttaaaagaattataggaaacacttcattctttataaaactttctataatgccttatttgaatgttaatcttatgtgctttctaaaaaatgttgtgaaataccaaacttatggattatcactaggttatcaagcatatattagtctttatcagaataaaatgaaatttcataactgtggctattactttgttcttggtccttcacagggcctgctccatcccacctgcctttctgctgcctgatgtctcaatggcttctgaatgactgttctaataaatgatcttaaaacagtccaaaaaaaaaaaaaaaaaaacaaaacaaaaaaaaaaaaaaaaaaaaaaaaaaaaaaaaaacaaaaccaaaaaaacacaaaaaaaacaataccaaacaaaaaacaaaaaaaaaaaaggaagggggggggcgggaaaaaatatctccccggggggggcgcccaacacccccccccctttttgtaaaggggcccccccagagggggctaaaaaaaaggggcggcgggcgaacaccaggcggaggagacaaaacactgacgacgttcattggagaggaccacctctggcggtggggaagtagagagcgccccacgaagaagaaagcggcagcaaaacattgctggaggggcaacccgcttgtcgggtcgaaattcctcctgttcttcattcagacgttataaaacagacacgacgacgccaacaacagacgagataaataaatctaaaagatataaatcaccacagtactcgcacactcacactcctccacaatcacgctgac

SEQ ID NO: 299683 - DNA, 2137 bp, Homo sapiens
gtcgggggcggggggtgcgccggggtagccgagaggcggacgcaacagcggggtcccgcgctgtctgggcggccccaggggctgtcggctcacttccgggaacgccggggaaccgcagtagccgcctgctagtggcgctgctagccggccggcgcaggctgccgagcgggtgagcgcgcaggccaggccaaagccctggtacccgcgcggtgcgggcctcagtctgcggccatgggggcgtccgcgcggctgctgcgagcggtgatcatgggggccccgggctcgggcaagggcaccgtgtcgtcgcgcatcactacacacttcgagctgaagcacctctccagcggggacctgctccgggacaacatgctgcggggcacagaaattggcgtgttagccaaggctttcattgaccaagggaaactcatcccagatgatgtcatgactcggctggcccttcatgagctgaaaaatctcacccagtatagctggctgttggatggttttccaaggacacttccacaggcagaagccctagatagagcttatcagatcgacacagtgattaacctgaatgtgccctttgaggtcattaaacaacgccttactgctcgctggattcatcccgccagtggccgagtctataacattgaattcaaccctcccaaaactgtgggcattgatgacctgactggggagcctctcattcagcgtgaggatgataaaccagagacggttatcaagagactaaaggcttatgaagaccaaacaaagccagtcctggaatattaccagaaaaaaggggtgctggaaacattctccggaacagaaaccaacaagatttggccctatgtatatgctttcctacaaactaaagttccacaaagaagccagaaagcttcagttactccatgaggagaaatgtgtgtaactattaatagtaagatgggcaaacctcctagtccttgcatttagaagctgcttttcctaagacttctagtatgtatgaattctttgaaaattatattacttttatttctactgattttattttggatactaaggatgtgccaaatgattcggatactaagatgcatcgtttgaaatcatctagtgtgttgtatgcagttatcctcaaaaacatcagcgatgtctgaacctttaaaacatctgttagagcaaaattaaaagagcatttggtagtaatctaactttttgttcagttaataagtggttgataaagtttccatatttttctggaaaagttaaaaaaagttacatgtcatttggagaaaatacgtaatcagaaatttgtgcatagattgatgccaaaaaagacatttccagcattgtggaacatggtgagacactatataaaattccagaaagaaagcaactggatttacagatttattgtgagacacaaattcactgctgcctttacactaagaaatgtatatgttaaccatatatgctgtatttattttgtcgttaagcatactttcagtttactcagaattttcaatttgctataaagatgtatcaattagcatatagaaaaatattactttaagatgacttgtttcctttgaaaatacctgtgtactgagggttatgatttgtgtcaaaaattgacataagtgcttttacaagcaccaaagttgaatgaattttcaacaaaatgtaattaaagtctatgttttcagttatgactcaggttaagaaatgtgttttaggatctacttgctggtttttctttttgatccaaatgtgtgatctgccctgataaataacaagttatagtaccatctcccccgccaataaaaaagagaagaaaaaagagaaacccgtggcactatgtaaataaagtaagcatactttgttgttagtaaatagatgaggcatgcctgggaaatgctcccttggcataaatagcaatcaattataattagtaaacaggtgtaccaataaaaagaatttacatgataggttaacaaggaccaggaaagtgagtttcctgaaggagttctttgttcctgatcaaagaaattgatacctgttagcattcactgccaccatattttaaggagaaagaactctattgatgggtgcgctgtacggggtcctctagttagcc

SEQ ID NO: 299684 - DNA, 1775 bp, Homo sapiens
gtcgggggcggggggtgcgccggggtagccgagaggcggacgcaacagcggggtcccgcgctgtctgggcggccccaggggctgtcggctcacttccgggaacgccggggaaccgcagtagccgcctgctagtggcgctgctagccggccggcgcaggctgccgagcgggtgagcgcgcaggccaggccaaagccctggtacccgcgcggtgcgggcctcagtctgcggccatgggggcgtccgcgcggctgctgcgagcggtgatcatgggggccccgggctcgggcaagggcaccgtgtcgtcgcgcatcactacacacttcgagctgaagcacctctccagcggggacctgctccgggacaacatgctgcggggcacagaaattggcgtgttagccaaggctttcattgaccaagggaaactcatcccagatgatgtcatgactcggctggcccttcatgagctgaaaaatctcacccagtatagctggctgttggatggttttccaaggacacttccacaggcagaagccctagatagagcttatcagatcgacacagtgattaacctgaatgtgccctttgaggtcattaaacaacgccttactgctcgctggattcatcccgccagtggccgagtctataacattgaattcaaccctcccaaaactgtgggcattgatgacctgactggggagcctctcattcagcgtgaggatgataaaccagagacggttatcaagagactaaaggcttatgaagaccaaacaaagccagtcctggaatattaccagaaaaaaggggtgctggaaacattctccggaacagaaaccaacaagatttggccctatgtatatgctttcctacaaactaaagttccacaaagaagccagaaagcttcagttactccatgaggagaaatgtgtgtaactattaatagtaagatgggcaaacctcctagtccttgcatttagaagctgcttttcctaagacttctagtatgtatgaattctttgaaaattatattacttttatttctactgattttattttggatactaaggatgtgccaaatgattcggatactaagatgcatcgtttgaaatcatctagtgtgttgtatgcagttatcctcaaaaacatcagcgatgtctgaacctttaaaacatctgttagagcaaaattaaaagagcatttggtagtaatctaactttttgttcagttaataagtggttgataaagtttccatatttttctggaaaagttaaaaaaagttacatgtcatttggagaaaatacgtaatcagaaatttgtgcatagattgatgccaaaaaagacatttccagcattgtggaacatggtgagacactatataaaattccagaaagaaagcaactggatttacagatttattgtgagacacaaattcactgtcgttaagcatactttcagtttactcagaattttcaatttgctataaagatgtatcaattagcatatagaaaaatattactttaagatgacttgtttcctttgaaaatacctgtgtactgagggttatgatttgtgtcaaaaattgacataagtgcttttacaagcaccaaagttgaatgaattttcaacaaaatgtaattaaagtctatgttttcagttatgactcaggttaagaaatgtgttttaggatctacttgctggtttttctttttgatccaaatgtgtgatctgccctgataaataacaagttatagtaccatctcccccgccaataaaaaag

SEQ ID NO: 299685 - DNA, 2066 bp, Homo sapiens
tccccccccagacggagtctcgctctcttgccaggctggagtgcagtgacattatcttggctcactgcagcctctgattccctggttcaagcaattctcctgcctcagcctcccgagtagctgggattacaggcatccaccaccacgtccagctaatttttgtatttttagtagagacggggtttcaccatgttggccaggatgggaaaattttttaaaagacatttattaaaaaaaaatgtctatgccttatcaaagtttataactcaagaattaatgagataaacagtggacaaaaagtgttggcagataacatgcataattttaattaaaagttaagcagtgaaaaataaacatctttttttcttaaagagatatttcatatctgttctatttgtttagttttatttattctttttagagacagggtctctctgtggagtgcagtggcatgattatagccctctgcggcctcaatcttcagggcttaagttatcctcctgcctcatcctcccaagtagctgggactgcaagtgtgtgccaccatacctggctaatttttaaaaactattttgtagagacagggtcttactatgttgcccagagtggtcttgaactcccatcctcatggaatcctcccacttcagtctctgaaagtgctaggattataggcatgagccatttatgcccagccagttttcttttttctaattgaagcttggcaagcagagggaaatgtattagggaaatagctttagttttgagtgggtgtcagtagccagctgaagaaaaagcaaaatgaaataggtagtagaaatgagaaagggagagagggaagaagaaaaaaatggatgttggaaagttgttgcatgtctctctggatagctcagaagtatcagttgtggttattgcctcacttggcttttgtaagcatgaaaaagccagggacaatttcaactaccatttctgaccatcatcaaccacaaattttaggcaatttgttagaattttttttaaatgttcttaatagttgttgggtacctgggagatttcagagaaagtaatcacctttgtatatattattaatgtgtttataatagaaattaaattctttgggatgtacaggtaagataagctatgtgaagcatagctgttatccaagtcgtgtgcctttgaaatacttggaatttgaagaacaggacatgcagcttatgttataattaatttgcgagcaatatatggcatgatagtattttcttatctaaattctgagtgcattgaaagtttaaagcaaaggacaaaagcttcctttgttcatggcccatattccagtatatttttctgaaactgccaatattttctgatcggtactttcatttttctagttggttaccaaatactgttattggtattatttctatataaaaggctttaagaagactatagtataattttcttaagaaaaaagacatgattataagctaaaatatgccttcggttttgtgtgctacaaattgagggagattgagaatattttaaatcaagggcagacattgagtaaaagcttatgactttggatggatttgaaacatgattaaatgacagagtaaataaaagcccctagtcaagtgaattctaatgggggaaataagaggactatataaaaattgaacctctgttttgaaaacaaatctttccaggaagtggtaccactctggggtcaagagaaattgtaagaacaataaaatgagcacacatgaccttcctttcctataaaaatatgaagcagaaaactcccccatgatttcctcatgttgcttagaatagtgtgtatttcagaacttttccatttaatatttttggaccacagttgactgaaactgaggatgggaggaagggatgcttaaaaccttggatagtaccaaaccctatatatattatgtttttttctatatatacacagctatgataaagttcataaattaggcacagtaagagattaaaaatattaaattgggccaattaatatattgtaataaaagctatgttaatgtggtctccctctc

SEQ ID NO: 299686 - DNA, 536 bp, Homo sapiens
cttgcccagagacctttccctcaaacagatgctttcaagagctgcgaaagagtagggcatcccctgtggtggtacctctatgtttaaagaaagaagaaaaaaaccccagaatttggttgtagaaaacaatgcccacaacagactggccagtgcttagacaaatttggggttggggggagtcactccgacgacacagggacatcgcgaggccactgcatgcgatgtcgcgggaggattgcttgagcccaggagttcatgcctgagcaacatagcaagaccctggctctctataaaacagaaaacgcaaactttaatattatcaacaatcaatatattataagagattgcaatttctaagtttctacctgagtcatcgccggagacatcgcatgctgggggggccagtgttgtgggcttcctgctgggactgagaaggctcacgaagggcatccgcaatgttggtttcactgagagctgcctcctggtctcttcaccactgtagttctctcatttccaacccacccgccggatggagg

SEQ ID NO: 299687 - DNA, 3070 bp, Homo sapiens
aaaaaaagagctaaaaaattacattttacaagtttatggccagcccacctgtaataacattctctgatattcctttacttaggatgtccctattgagatcattttttaaatttatgtggaaggattctctagattattattagaatgagcaattcagttttgtttgtttttgagcctgtcttgtacctggttgcactaaatatataatagttatcttttgtggagaccttaaaaccctaaatttgaatacatgttcaatgatagtaaagatatgacagaaactagaagatagctgtttatgatttgagcttttggaaaattttcgtttcttgaatgtaatagtattttttcctgaattggaggagactgatctatattgtttcatttttcttttgtcctagtctatttcactttcttttgtcataatctatttaatttcccactttcttattttagtaaagagagaataaatagcaagtgcaggccaggcatggtggtgcaggccagacatagcggtacatgcctgtaatcctagcactttgggatgccaaggcgggaggattgcttgagcccaggagttcatgcctgagcaacatagcaagaccctggctctctataaaacagaaaacgcaaactttaatattatcaacaatcaatatattataagagattgcaatttctaagtttctacctgagtgtttcacaaatacaaactggacattttccctttaaatgagttttattataaaatgtacatattgattgtaaaaacaaaaaattcaaatagtacaaaagcatataagtaactaataaaagctccctttctgcattaggcccctcagttcttcccagggaaaatgattaatagtttacattcttgcagaaattttttatgtataaatttttacccaaatgaattcattatataaattttttccaacttagtgtttttttacataatagtagcaagttaaaaaattgtacttcaggccaggcacggtgggtcacgcctgttaatctcagcactttgggaggctgaggcaggaagaccacttgaggtcaggagttcaagaccagcctggccaacatggtgaaaacccatctctactaaaatacaaaaatcactgggattacaggcatccaccaccacgtccagctaatttttgtatttttagtagagacggggtttcaccatgttggccaggatgggaaaattttttaaaagacatttattaaaaaaaaatgtctatgccttatcaaagtttataactcaagaattaatgagataaacagtggacaaaaagtgttggcagataacatgcataattttaattaaaagttaagcagtgaaaaataaacatctttttttcttaaagagatatttcatatctgttctatttgtttagttttatttattctttttagagacagggtctctctgtggagtgcagtggcatgattatagccctctgcggcctcaatcttcagggcttaagttatcctcctgcctcatcctcccaagtagctgggactgcaagtgtgtgccaccatacctggctaatttttaaaaactattttgtagagacagggtcttactatgttgcccagagtggtcttgaactcccatcctcatggaatcctcccacttcagtctctgaaagtgctaggattataggcatgagccatttatgcccagccagttttcttttttctaattgaagcttggcaagcagagggaaatgtattagggaaatagctttagttttgagtgggtgtcagtagccagctgaagaaaaagcaaaatgaaataggtagtagaaatgagaaagggagagagggaagaagaaaaaaatggatgttggaaagttgttgcatgtctctctggatagctcagaagtatcagttgtggttattgcctcacttggcttttgtaagcatgaaaaagccagggacaatttcaactaccatttctgaccatcatcaaccacaaattttaggcaatttgttagaattttttttaaatgttcttaatagttgttgggtacctgggagatttcagagaaagtaatcacctttgtatatattattaatgtgtttataatagaaattaaattctttgggatgtacaggtaagataagctatgtgaagcatagctgttatccaagtcgtgtgcctttgaaatacttggaatttgaagaacaggacatgcagcttatgttataattaatttgcgagcaatatatggcatgatagtattttcttatctaaattctgagtgcattgaaagtttaaagcaaaggacaaaagcttcctttgttcatggcccatattccagtatatttttctgaaactgccaatattttctgatcggtactttcatttttctagttggttaccaaatactgttattggtattatttctatataaaaggctttaagaagactatagtataattttcttaagaaaaaagacatgattataagctaaaatatgccttcggttttgtgtgctacaaattgagggagattgagaatattttaaatcaagggcagacattgagtaaaagcttatgactttggatggatttgaaacatgattaaatgacagagtaaataaaagcccctagtcaagtgaattctaatgggggaaataagaggactatataaaaattgaacctctgttttgaaaacaaatctttccaggaagtggtaccactctggggtcaagagaaattgtaagaacaataaaatgagcacacatgaccttcctttcctataaaaatatgaagcagaaaactcccccatgatttcctcatgttgcttagaatagtgtgtatttcagaacttttccatttaatatttttggaccacagttgactgaaactgaggatgggaggaagggatgcttaaaaccttggatagtaccaaaccctatatatattatgtttttttctatatatacacagctatgataaagttcataaattaggcacagtaagagattaaaaatattaaattgggccaattaatatattgtaataaaagctatgttaatgtggtctccctctc

SEQ ID NO: 299688 - DNA, 1272 bp, Homo sapiens
aaaaaaagagctaaaaaattacattttacaagtttatggccagcccacctgtaataacattctctgatattcctttacttaggatgtccctattgagatcattttttaaatttatgtggaaggattctctagattattattagaatgagcaattcagttttgtttgtttttgagcctgtcttgtacctggttgcactaaatatataatagttatcttttgtggagaccttaaaaccctaaatttgaatacatgttcaatgatagtaaagatatgacagaaactagaagatagctgtttatgatttgagcttttggaaaattttcgtttcttgaatgtaatagtattttttcctgaattggaggagactgatctatattgtttcatttttcttttgtcctagtctatttcactttcttttgtcataatctatttaatttcccactttcttattttagtaaagagagaataaatagcaagtgcaggccaggcatggtggtgcaggccagacatagcggtacatgcctgtaatcctagcactttgggatgccaaggcgggaggattgcttgagcccaggagttcatgcctgagcaacatagcaagaccctggctctctataaaacagaaaacgcaaactttaatattatcaacaatcaatatattataagagattgcaatttctaagtttctacctgagtgtttcacaaatacaaactggacattttccctttaaatgagttttattataaaatgtacatattgattgtaaaaacaaaaaattcaaatagtacaaaagcatataagtaactaataaaagctccctttctgcattaggcccctcagttcttcccagggaaaatgattaatagtttacattcttgcagaaattttttatgtataaatttttacccaaatgaattcattatataaattttttccaacttagtgtttttttacataatagtagcaagttaaaaaattgtacttcaggccaggcacggtgggtcacgcctgttaatctcagcactttgggaggctgaggcaggaagaccacttgaggtcaggagttcaagaccagcctggccaacatggtgaaaacccatctctactaaaatacaaaaatcagctgggcatggtggcgcatgtctgtaatcccagctactcgggaggctgaggcaggagaatcgcttgaacccgggaggcggaggttgcagtgagctgagattgcgccattgcactccagcctggaggacaagagggagacttcctctca

SEQ ID NO: 299689 - DNA, 1769 bp, Homo sapiens
tctcttcttgacttgatgcaggcacagatttatcaagctcctcagtcaacaaacacatcaccggaagaaacatggaaggaaaggaattttaaaaggaaataccaatctctgtgcaaacaaagccttgtatattcatgtttgcaccaatctactgtgagatttatgaagaaaaacaaattgcggacaactctctatgtacacttacaaatgcctcagttgatgcttgtgggctgtttgtcagcgttctgtgataatgaacacatggacttctgtttattaaattcagttgacccctttagccaattgccaggagcctggatttttacttccaactgctgatatctgtgtaaaaattgatctacatccaccctttaaaagcattgatgaattaattagaactttagacaacaaagaaaaattgaaaaagaattctcagtaaaagcgaattcgatgttcaaaacaaactacaaagagacaagacttctctgtttactttctaagaactaatataattgctaccttaaaaaggaaaaaatgaacagcacatgtattgaagaacagcatgacctggatcactatttgtttcccattgtttacatctttgtgattatagtcagcattccagccaatattggatctctgtgtgtgtctttcctgcaagcaaagaaggaaagtgaactaggaatttacctcttcagtttgtcactatcagatttactctatgcattaactctccctttatggattgattatacttggaataaagacaactggactttctctcctgccttgtgcaaagggagtgcttttctcatgtacatgaatttttacagcagcacagcattcctcacctgcattgccgttgatcggtatttggctgttgtctaccctttgaagttttttttcctaaggacaagaagatttgcactcatggtcagcctgtccatctggatattggaaaccatcttcaatgctgtcatgttgtgggaagatgaaacagttgttgaatattgcgatgccgaaaagtctaattttactttatgctatgacaaataccctttagagaaatggcaaatcaacctcaacttgttcaggacgtgtacaggctatgcaatacctttggtcaccatcctgatctgcaaccggaaagtctaccaagctgtgcggcacaataaagccacggaaaacaaggaaaagaagagaatcataaaactacttgtcagcatcacagttacttttgtcttatgctttactccctttcatgtgatgttgctgattcgctgcattttagagcatgctgtgaacttcgaagaccacagcaattctgggaagcgaacttacacaatgtatagaatcacggttgcattaacaagtttaaattgtgttgctgatccaattctgtactgttttgtaaccgaaacaggaagatatgatatgtggaatatattaaaattctgcactgggaggtgtaatacatcacaaagacaaagaaaacgcatactttctgtgtctacaaaagatactatggaattagaggtccttgagtagaaccaaggatgttttgaagggaagggaagtttaagttatgcattattatatcatcaagattacattttgaaaaggaaatctagcatgtgaggggactaagtgttctcagagtgatgttttaatccagtccaataaaaatatcttaaaactgcattgtacagctccctccctgcgttttattaaatgatgtatattaaacaaagatcaatattttcttaatg

SEQ ID NO: 299690 - DNA, 1715 bp, Homo sapiens
tctcttcttgacttgatgcaggcacagatttatcaagctcctcagtcaacaaacacatcaccggaagaaacatggaaggaaaggaattttaaaaggaaataccaatctctgtgcaaacaaagccttgtatattcatgtttgcaccaatctactgtgagatttatgaagaaaaacaaattgcggacaactctctatgtacacttacaaatgcctcagttgatgcttgtgggctgtttgtcagcgttctgtgataatgaacacatggacttctgtttattaaattcagttgacccctttagccaattgccaggagcctggatttttacttccaactgctgatatctgtgtaaaaattgatctacatccaccctttaaaagcattgatgaattaattagaactttagacaacaaagaaaaattgaaaaagaattctcagtaaaagcgaattcgatgttcaaaacaaactacaaagagacaagacttctctgtttactttctaagaactaatataattgctaccttaaaaaggaacccattgtttacatctttgtgattatagtcagcattccagccaatattggatctctgtgtgtgtctttcctgcaagcaaagaaggaaagtgaactaggaatttacctcttcagtttgtcactatcagatttactctatgcattaactctccctttatggattgattatacttggaataaagacaactggactttctctcctgccttgtgcaaagggagtgcttttctcatgtacatgaatttttacagcagcacagcattcctcacctgcattgccgttgatcggtatttggctgttgtctaccctttgaagttttttttcctaaggacaagaagatttgcactcatggtcagcctgtccatctggatattggaaaccatcttcaatgctgtcatgttgtgggaagatgaaacagttgttgaatattgcgatgccgaaaagtctaattttactttatgctatgacaaataccctttagagaaatggcaaatcaacctcaacttgttcaggacgtgtacaggctatgcaatacctttggtcaccatcctgatctgcaaccggaaagtctaccaagctgtgcggcacaataaagccacggaaaacaaggaaaagaagagaatcataaaactacttgtcagcatcacagttacttttgtcttatgctttactccctttcatgtgatgttgctgattcgctgcattttagagcatgctgtgaacttcgaagaccacagcaattctgggaagcgaacttacacaatgtatagaatcacggttgcattaacaagtttaaattgtgttgctgatccaattctgtactgttttgtaaccgaaacaggaagatatgatatgtggaatatattaaaattctgcactgggaggtgtaatacatcacaaagacaaagaaaacgcatactttctgtgtctacaaaagatactatggaattagaggtccttgagtagaaccaaggatgttttgaagggaagggaagtttaagttatgcattattatatcatcaagattacattttgaaaaggaaatctagcatgtgaggggactaagtgttctcagagtgatgttttaatccagtccaataaaaatatcttaaaactgcattgtacagctccctccctgcgttttattaaatgatgtatattaaacaaagatcaatattttcttaatg

SEQ ID NO: 299691 - DNA, 1296 bp, Homo sapiens
tctcttcttgacttgatgcaggcacagatttatcaagctcctcagtcaacaaacacatcaccggaagaaacatggaaggaaaggaattttaaaaggaaataccaatctctgtgcaaacaaagccttgtatattcatgtttgcaccaatctactgtgagatttatgaagaaaaacaaattgcggacaactctctatgtacacttacaaatgcctcagttgatgcttgtgggctgtttgtcagcgttctgtgataatgaacacatggacttctgtttattaaattcagttgacccctttagccaattgccaggagcctggatttttacttccaactgctgatatctgtgtaaaaattgatctacatccaccctttaaaagcattgatgaattaattagaactttagacaacaaagaaaaattgaaaaagaattctcagtaaaagcgaattcgatgttcaaaacaaactacaaagagacaagacttctctgtttactttctaagaactaatataattgctaccttaaaaaggaaaaaatgaacagcacatgtattgaagaacagcatgacctggatcactatttgtttcccattgtttacatctttgtgattatagtcagcattccagccaatattggatctctgtgtgtgtctttcctgcaagcaaagaaggaaagtgaactaggaatttacctcttcagtttgtcactatcagatttactctatgcattaactctccctttatggattgattatacttggaataaagacaactggactttctctcctgccttgtgcaaagggagtgcttttctcatgtacatgaatttttacagcagcacagcattcctcacctgcattgccgttgatcggtatttggctgttgtctaccctttgaagttttttttcctaaggacaagaagatttgcactcatggtcagcctgtccatctggatattggaaaccatcttcaatgctgtcatgttgtgggaagatgaaacagttgttgaatattgcgatgccgaaaagtctaattttactttatgctatgacaaataccctttagagaaatggcaaatcaacctcaacttgttcaggacgtgtacaggctatgcaatacctttggtcaccatcctgatctgcaaccggaaagtctaccaagctgtgcggcacaataaagccacggaaaacaaggaaaagaagagaattttaaatctttttggcaacaaaaaaaatctttgggtaataggctaacccccctattaagggagagtgcctcatccttaaataattaaaact

SEQ ID NO: 299692 - DNA, 953 bp, Homo sapiens
gagggtaagaagtttgtcccacgaggtttctcttactttgcctccgcagtatacacgtacatccaaagccggttctaccgatccccagaagtgatcctgggccacccctacgacgtggccattgacatgtggagcctgggctgcatcacggcggagttgtacacgggctaccccctgttccccggggagaatgaggtggagcagctggcctgcatcatggaggtgctgggtctgccgccagccggcttcattcagacagcctccaggagacagacattctttgattccaaaggttttcctaaaaatataaccaacaacagggggaaaaaaagatacccagattccaaggacctcacgatggtgctgaaaacctatgacaccagcttcctggactttctcagaaggtgtttggtatgggaaccttctcttcgcatgaccccggaccaggccctcaagcatgcttggattcatcagtctcggaacctcaagccacagcccaggccccagaccctgaggaaatccaattcctttttcccctctgagacaaggaaggacaaggttcaaggctgtcatcactcgagcagaaaagcagatgagatcaccaaagagactacagagaaaacaaaagatagccccacgaagcatgttcagcattcaggtgatcagcaggactgtctccagcacggagctgacactgttcagctgcctcaactggtagacgctcccaagaagtcagaggcagctgtcggggcggaggtgtccatgacctccccaggacagagcaaaaacttctccctcaagaacacaaacgttttaccccctattgtatgacctttgctgagggtatgtcctgctcctttccaccagtgatttgtattaagacagcacttatattgtacaatacttcagactgttttttttaaatacataaaactttatgttaaaaaactcta

SEQ ID NO: 299693 - DNA, 893 bp, Homo sapiens
  misc_feature (24)..(24): n is a, c, g, or t
  misc_feature (740)..(740): n is a, c, g, or t
  misc_feature (806)..(806): n is a, c, g, or t
gctaggtacgaggcggtgttaatnggcgaggccgggttgtccgggtcctgtcaatgtcacgttctgccattactgcaatagccacatctgtgtgtcacggcccaccctgtcgccagcttcatcatgccctcatgcctcatgggaaaggtggacgttcctcagtcagtgggattgtggccactgtgtttggagcaacaggattcctggggcgatatgttgtcaaccaccttggacgcatggggtcacaggtaatcataccctatcggtgtgataaatatgacatcatgcaccttcgtcccatgggtgacctgggccagcttctgtttctggaatgggacgcgagagataaagattctatccgacgagtagtacaacacagcaatgtggtcatcaatcttattggacgagactgggaaaccaaaaactttgattttgaggatgtttttgtgaagattccccaagcaattgctcaactgtccaaggaagctggagttgaaaaattcattcatgtttcacatctgaatgcgaatattaaaagctcttctagatatttgagaaataaggctgttggagagaaagtagtgagagatgcatttccggaagccattatcgtaaagccgtcggacatctttggaagagaggatagattccttaattcttttgcaagtatgcatcggtttggtcctataccccttggttccttgggctggaagacagttaaacaaccagtatatcgtgcngttccccggcatgtatggcgtagggtccgggccgggaacctggtcggggcccgcggccccttcccngggagaaacttgcggggccacaatgtcccacaccgcgcgttggcctacaggggacattaaacccccccaaaaaaaggggcacacaag

SEQ ID NO: 299694 - DNA, 771 bp, Homo sapiens
acatgatcatgactttaggagctttgttattgataagactgtgagcttgattcttctttggtcattggtaaaaaggacaatgtaggatgaagtgggagggctaaggccatgatccaaaaggaaatggatatttgtacaatttcacaggaccttgtcacttaacatttactttaccattgtcattattatcattagcattattattttatcttggttggtgttaagccatttaaattatttctttgatttggagaggaggcagtgggaaggaagttcagaacatactgaatagtaggaaaaaatcaatttttaaagtaaattgcattccttgggtaatctacacatggttatttcaaactgagtgtgtgtgtgtgtgtttattggggtgtggcatgaggcgagtgtgtaagacagagagcaaaagagctacagaggccactctaagcagcagcatcatgtgaccactaaagatttacacctgaaactaaatacagaatgttctatctctacagattccaaaggttttcctaaaaatataaccaacaacagggggaaaaaaagatacccagattccaaggacctcacgatggtgctgaaaacctatgacaccagcttcctggactttctcagaaggtgtttggtgtgagtttgttgggacatctctgcttctgggtttcctcttaaatgctgtactttgacacacgtttgctggtgaaagactaaggctgggagatagttataaaagtaacaagaaatgctaacaatagagct

SEQ ID NO: 299695 - DNA, 442 bp, Homo sapiens
cgaaaagggacttgcaaaggacacagagcaagcggtttcagctgtactctgctaatgtaacagggaatagactcaaatggatgctaaaaagccaaggaaatgtgatttgactcccttcctggttttgaaagcaagaaagaaacaaaagttcacctctgcgaagggccccactctttctgagatctacatggttggaagtaaactttcggttcagatccagaagccaccttccaatatcaagaactccagaatgacccaagtctttcataagaacaccagtgttacttcactcccctttgtggacaccaaggggaagaagaatacggtaagcttcccacacattagcaagaaagtcctgctgaagtcatccctgctgtatcaggtgagtgcagacggactggaccctgagaaggcaggtgaaagacctggttttagtccaaag

SEQ ID NO: 299696 - DNA, 129 bp, Homo sapiens
taggtcccagggtgggtgcccaccgcctgctcctttccaccagtgatttgtattaagacagcacttatattgtacaatacttcagactgttttttttaaatacataaaactttatgttaaaaaactcta

SEQ ID NO: 299697 - DNA, 1314 bp, Homo sapiens
cagcttagcagccgtagtcagccgggagtgctgtcgtgggggattgtgggaaaagatggcggctgccgcacaatcccgggttgtccgggtcctgtcaatgtcacgttctgccattactgcaatagccacatctgtgtgtcacggcccaccctgtcgccagcttcatcatgccctcatgcctcatgggaaaggtggacgttcctcagtcagtgggattgtggccactgtgtttggagcaacaggattcctggggcgatatgttgtcaaccaccttggacgcatggggtcacaggtaatcataccctatcggtgtgataaatatgacatcatgcaccttcgtcccatgggtgacctgggccagcttctgtttctggaatgggacgcgagagataaagattctatccgacgagtagtacaacacagcaatgtggtcatcaatcttattggacgagactgggaaaccaaaaactttgattttgaggatgtttttgtgaagattccccaagcaattgctcaactgtccaaggaagctggagttgaaaaattcattcatgtttcacatctgaatgcgaatattaaaagctcttctagatatttgagaaataaggctgttggagagaaagtagtgagagatgcatttccggaagccattatcgtaaagccgtcggacatctttggaagagaggatagattccttaattcttttgcaagtatgcatcggtttggtcctataccccttggttccttgggctggaagacagttaaacaaccagtatatgtcgtagatgtatccaaaggaattgttaatgcagttaaggatcctgatgccaatgggaaatcctttgctttcgttggtcccagtcggtacctccttttccacctggtgaagtacatctttgctgtggctcacagattgttcctcccattccccttgccgctttttgcctatcgatgggtagcaagagtctttgaaataagcccatttgagccctggataacaagggataaagtggagcggatgcacatcacagacatgaaattgcctcacctgcctggcttagaagaccttggtattcaggcaacaccactggaactcaaggccattgaggtgctgcggcgtcatcgcacttaccgctggctgtctgctgaaattgaggatgtgaagccggccaagaccgtcaacatttagtgcctcctgagcagctcttggttttggcgtcttttgggtcggcccatgtggtttgagcacccagccaggcggtctctttagaggatcctgtacacagttccactattaaaacatttcaggttgaa

SEQ ID NO: 299698 - DNA, 1585 bp, Homo sapiens
cagcttagcagccgtagtcagccgggagtgctgtcgtgggggattgtgggaaaagatggcggctgccgcacaatcccgggttgtccgggtcctgtcaatgtcacgttctgccattactgcaatagccacatctgtgtgtcacggcccaccctgtcgccagcttcatcatgccctcatgcctcatgggaaaggtggacgttcctcagtcagtgggattgtggccactgtgtttggagcaacaggattcctggggcgatatgttgtcaaccaccttggacgcatggggtcacaggtaatcataccctatcggtgtgataaatatgacatcatgcaccttcgtcccatgggtgacctgggccagcttctgtttctggaatgggacgcgagagataaagattctatccgacgagtagtacaacacagcaatgtggtcatcaatcttattggacgagactgggaaaccaaaaactttgattttgaggatgtttttgtgaagattccccaagcaattgctcaactgtccaaggaagctggagttgaaaaattcattcatgtttcacatctgaatgcgaatattaaaagctcttctagatatttgagaaataaggctgttggagagaaagtagtgagagatgcatttccggaagccattatcgtaaagccgtcggacatctttggaagagaggatagattccttaattcttttgcaagtatgcatcggtttggtcctataccccttggttccttgggctggaagacagttaaacaaccagtatatgtcgtagatgtatccaaaggaattgttaatgcagttaaggatcctgatgccaatgggaaatcctttgctttcgttggtcccagtcggtacctccttttccacctggtgaagtacatctttgctgtggctcacagattgttcctcccattccccttgccgctttttgcctatcgatgggtagcaagagtctttgaaataagcccatttgagccctggataacaagggataaagtggagcggatgcacatcacagacatgaaattgcctcacctgcctggcttagaagaccttggtattcaggcaacaccactggaactcaaggccattgaggtgctgcggcgtcatcgcacttaccgctggctgtctgctgaaattgaggatgtgaagccggccaagaccgtcaacatttagtgcctcctgagcagctcttggttttggcgtcttttgggtcggcccatgtggtttgagcacccagccaggcggtctctttagaggatcctgtacacagttccactattaaaacatttcaggttgaattctgcagtattttcttccttgatttacaaaatgagaaatgtagtcacttagaacttgagcatgatttttgttaaacatatttaataatgatatatatactatttattctctgaaatgccagagagtttgaattttcctatgacaaaccacttctagcatacgttctagaagacaaggaccctttttaatgtcaaagtattgtaaagaccccaagtgatatgtgattgttttttaatttccattaaatgagagagcatacagtatccccta

SEQ ID NO: 299699 - DNA, 2103 bp, Homo sapiens
cagcttagcagccgtagtcagccgggagtgctgtcgtgggggattgtgggaaaagatggcggctgccgcacaatcccgggttgtccgggtcctgtcaatgtcacgttctgccattactgcaatagccacatctgtgtgtcacggcccaccctgtcgccagcttcatcatgccctcatgcctcatgggaaaggtggacgttcctcagtcagtgggattgtggccactgtgtttggagcaacaggattcctggggcgatatgttgtcaaccaccttggacgcatggggtcacaggtaatcataccctatcggtgtgataaatatgacatcatgcaccttcgtcccatgggtgacctgggccagcttctgtttctggaatgggacgcgagagataaagattctatccgacgagtagtacaacacagcaatgtggtcatcaatcttattggacgagactgggaaaccaaaaactttgattttgaggatgtttttgtgaagattccccaagcaattgctcaactgtccaaggaagctggagttgaaaaattcattcatgtttcacatctgaatgcgaatattaaaagctcttctagatatttgagaaataaggctgttggagagaaagtagtgagagatgcatttccggaagccattatcgtaaagccgtcggacatctttggaagagaggatagattccttaattcttttgcaagtatgcatcggtttggtcctataccccttggttccttgggctggaagacagttaaacaaccagtatatgtcgtagatgtatccaaaggaattgttaatgcagttaaggatcctgatgccaatgggaaatcctttgctttcgttggtcccagtcggtacctccttttccacctggtgaagtacatctttgctgtggctcacagattgttcctcccattccccttgccgctttttgcctatcgatgggtagcaagagtctttgaaataagcccatttgagccctggataacaagggataaagtggagcggatgcacatcacagacatgaaattgcctcacctgcctggcttagaagaccttggtattcaggcaacaccactggaactcaaggccattgaggtgctgcggcgtcatcgcacttaccgctggctgtctgctgaaattgaggatgtgaagccggccaagaccgtcaacatttagtgcctcctgagcagctcttggttttggcgtcttttgggtcggcccatgtggtttgagcacccagccaggcggtctctttagaggatcctgtacacagttccactattaaaacatttcaggttgaattctgcagtattttcttccttgatttacaaaatgagaaatgtagtcacttagaacttgagcatgatttttgttaaacatatttaataatgatatatatactatttattctctgaaatgccagagagtttgaattttcctatgacaaaccacttctagcatacgttctagaagacaaggaccctttttaatgtcaaagtattgtaaagaccccaagtgatatgtgattgttttttaatttccattaaatgagagagcatacagtatcccctaacctgaatgtgtttacactgaaggtgtttttaaaatttattttaataatgtccatatgccttttaaaaatagtagtacatatatagaaaaacattgtccatagattctcaaaccccttgcagtaattccacagtcttcttggatctgagctatctgaggccagcccgatgcccttagtaccacatctggattatttcagacacataggtggagatagattctcttcccatgcaaaggagatgcttcagcttctatgccagcagtgccagcacttaggaattatgaccttctaatgaagttcttaaaattgcagccaagacccagatgaacaattggtttagtgttggcaaatcccaccagtacagtgtgatttaaaactcccacaatttgtggtgaagccaacataccaccatcctaggtgacccagggttggtcattgtgtttcactggacttcagcctcctgatctatatttgggacagggatgtcagtaaaaacgctgtttgatgagggaatgcc

SEQ ID NO: 299700 - DNA, 1727 bp, Homo sapiens
  misc_feature (1588)..(1588): n is a, c, g, or t
  misc_feature (1590)..(1590): n is a, c, g, or t
cagcttagcagccgtagtcagccgggagtgctgtcgtgggggattgtgggaaaagatggcggctgccgcacaatcccgggttgtccgggtcctgtcaatgtcacgttctgccattactgcaatagccacatctgtgtgtcacggcccaccctgtcgccagcttcatcatgccctcatgcctcatgggaaaggtggacgttcctcagtcagtgggattgtggccactgtgtttggagcaacaggattcctggggcgatatgttgtcaaccaccttggacgcatggggtcacaggtaatcataccctatcggtgtgataaatatgacatcatgcaccttcgtcccatgggtgacctgggccagcttctgtttctggaatgggacgcgagagataaagattctatccgacgagtagtacaacacagcaatgtggtcatcaatcttattggacgagactgggaaaccaaaaactttgattttgaggatgtttttgtgaagattccccaagcaattgctcaactgtccaaggaagctggagttgaaaaattcattcatgtttcacatctgaatgcgaatattaaaagctcttctagatatttgagaaataaggctgttggagagaaagtagtgagagatgcatttccggaagccattatcgtaaagccgtcggacatctttggaagagaggatagattccttaattcttttgcaagtatgcatcggtttggtcctataccccttggttccttgggctggaagacagttaaacaaccagtatatgtcgtagatgtatccaaaggaattgttaatgcagttaaggatcctgatgccaatgggaaatcctttgctttcgttggtcccagtcggtacctccttttccacctggtgaagtacatctttgctgtggctcacagattgttcctcccattccccttgccgctttttgcctatcgatgggtagcaagagtctttgaaataagcccatttgagccctggataacaagggataaagtggagcggatgcacatcacagacatgaaattgcctcacctgcctggcttagaagaccttggtattcaggcaacaccactggaactcaaggccattgaggtgctgcggcgtcatcgcacttaccgctggctgtctgctgaaattgaggatgtgaagccggccaagaccgtcaacatttagtgcctcctgagcagctcttggttttggcgtcttttgggtcggcccatgtggtttgagcacccagccaggcggtctctttagaggatcctgtacacagttccactattaaaacatttcaggttgaattctgcagtattttcttccttgatttacaaaatgagaaatgtagtcacttagaacttgagcatgatttttgttaaacatatttaataatgatatatatactatttattctctgaaatgccagagagtttgaattttcctatgacaaaccacttctagcatacgttctagaagacaaggaccctttttaatgtcaaagtattgtaaagaccccaagtgatatgtgattgttttttaatttccattaaatgagagagcatacagtatcccctattntnaaataaatatttatatttatttttaataattctattaatttatattatttattataattttcccccggggggggcccgggtcccaaattccccctaaagggggtccttattaaaattccacgggccgtcgtttttaa

SEQ ID NO: 299701 - DNA, 1658 bp, Homo sapiens
cagcttagcagccgtagtcagccgggagtgctgtcgtgggggattgtgggaaaagatggcggctgccgcacaatcccgggttgtccgggtcctgtcaatgtcacgttctgccattactgcaatagccacatctgtgtgtcacggcccaccctgtcgccagcttcatcatgccctcatgcctcatgggaaaggtggacgttcctcagtcagtgggattgtggccactgtgtttggagcaacaggattcctggggcgatatgttgtcaaccaccttggacgcatggggtcacaggtaatcataccctatcggtgtgataaatatgacatcatgcaccttcgtcccatgggtgacctgggccagcttctgtttctggaatgggacgcgagagataaagattctatccgacgagtagtacaacacagcaatgtggtcatcaatcttattggacgagactgggaaaccaaaaactttgattttgaggatgtttttgtgaagattccccaagcaattgctcaactgtccaaggaagctggagttgaaaaattcattcatgtttcacatctgaatgcgaatattaaaagctcttctagatatttgagaaataaggctgttggagagaaagtagtgagagatgcatttccggaagccattatcgtaaagccgtcggacatctttggaagagaggatagattccttaattcttttgcaagtatgcatcggtttggtcctataccccttggttccttgggctggaagacagttaaacaaccagtatatgtcgtagatgtatccaaaggaattgttaatgcagttaaggatcctgatgccaatgggaaatcctttgctttcgttggtcccagtcggtacctccttttccacctggtgaagtacatctttgctgtggctcacagattgttcctcccattccccttgccgctttttgcctatcgatgggtagcaagagtctttgaaataagcccatttgagccctggataacaagggataaagtggagcggatgcacatcacagacatgaaattgcctcacctgcctggcttagaagaccttggtattcaggcaacaccactggaactcaaggccattgaggtgctgcggcgtcatcgcacttaccgctggctgtctgctgaaattgaggatgtgaagccggccaagaccgtcaacatttagtgcctcctgagcagctcttggttttggcgtcttttgggtcggcccatgtggtttgagcacccagccaggcggtctctttagaggatcctgtacacagttccactattaaaacatttcaggttgaattctgcagtattttcttccttgatttacaaaatgagaaatgtagtcacttagaacttgagcatgatttttgttaaacatatttaataatgatatatatactatttattctctgaaatgccagagagtttgaattttcctatgacaaaccacttctagcatacgttctagaagacaaggaccctttttaatgtcaaagtattgtaaagaccccaagtgatatgtgattgttttttaatttccattaaatgagagagcatacagtatcccctaaaaaaaaaaatataaatgatgatatattggttagtgtattttaattgaaaatataaataaatacctttggggg

SEQ ID NO: 299702 - DNA, 2026 bp, Homo sapiens
  misc_feature (2024)..(2024): n is a, c, g, or t
  misc_feature (2026)..(2026): n is a, c, g, or t
cagcttagcagccgtagtcagccgggagtgctgtcgtgggggattgtgggaaaagatggcggctgccgcacaatcccgggttgtccgggtcctgtcaatgtcacgttctgccattactgcaatagccacatctgtgtgtcacggcccaccctgtcgccagcttcatcatgccctcatgcctcatgggaaaggtggacgttcctcagtcagtgggattgtggccactgtgtttggagcaacaggattcctggggcgatatgttgtcaaccaccttggacgcatggggtcacaggtaatcataccctatcggtgtgataaatatgacatcatgcaccttcgtcccatgggtgacctgggccagcttctgtttctggaatgggacgcgagagataaagattctatccgacgagtagtacaacacagcaatgtggtcatcaatcttattggacgagactgggaaaccaaaaactttgattttgaggatgtttttgtgaagattccccaagcaattgctcaactgtccaaggaagctggagttgaaaaattcattcatgtttcacatctgaatgcgaatattaaaagctcttctagatatttgagaaataaggctgttggagagaaagtagtgagagatgcatttccggaagccattatcgtaaagccgtcggacatctttggaagagaggatagattccttaattcttttgcaagtatgcatcggtttggtcctataccccttggttccttgggctggaagacagttaaacaaccagtatatgtcgtagatgtatccaaaggaattgttaatgcagttaaggatcctgatgccaatgggaaatcctttgctttcgttggtcccagtcggtacctccttttccacctggtgaagtacatctttgctgtggctcacagattgttcctcccattccccttgccgctttttgcctatcgatgggtagcaagagtctttgaaataagcccatttgagccctggataacaagggataaagtggagcggatgcacatcacagacatgaaattgcctcacctgcctggcttagaagaccttggtattcaggcaacaccactggaactcaaggccattgaggtgctgcggcgtcatcgcacttaccgctggctgtctgctgaaattgaggatgtgaagccggccaagaccgtcaacatttagtgcctcctgagcagctcttggttttggcgtcttttgggtcggcccatgtggtttgagcacccagccaggcggtctctttagaggatcctgtacacagttccactattaaaacatttcaggttgaaaaaaaaaaaaaaaaaaaagaaaaaaaaaaaaaaaaaaaaaaaaaaaaaaaaaaaaaaaaaaaaaaaaaaaacaaaaagaaaaaaaaaaaaaaaaaaaaaaagaaacacaaagcacaaggaagacaacaagaacggaggaggagggcggaagagaaaggcgggaggcaccacacacagcgaagaggacacgaaggagacgaggagagacacaacgaaagaagagagcgcagaaagaagaaggagagcaggcaggagatgaagagaagagaggggacagcaaaaagagaggcgcgacaaagagaaaaccacaacgagggcagggacacaagagaaagagagaagagaaggagagagagaggcagcggaggagaaaaaaaacagccgccggaggagaggagaggcagcaagcccgaggggagagggagagaagaagaaagcgaagagagaagaagaatgaagaggagggagagagagggaggggtgccgggcacgcgcgcgagcgactagcaagagcaacacaagacacgatacacaaagaggaagcacaacagaagaagatactagtaacagggaaaacaacgaagacaaactaaaaacacagcagaagaacccgaccagcagaaacagaacacgagcaaccagagaagtaaaacaacagagcaaaagacaagaacaagagcaccatcgtacgataaactatcggccgttgnan

SEQ ID NO: 299703 - DNA, 1326 bp, Homo sapiens
cagcttagcagccgtagtcagccgggagtgctgtcgtgggggattgtgggaaaagatggcggctgccgcacaatcccgggttgtccgggtcctgtcaatgtcacgttctgccattactgcaatagccacatctgtgtgtcacggcccaccctgtcgccagcttcatcatgccctcatgcctcatgggaaaggtggacgttcctcagtcagtgggattgtggccactgtgtttggagcaacaggattcctggggcgatatgttgtcaaccaccttggacgcatggggtcacaggtaatcataccctatcggtgtgataaatatgacatcatgcaccttcgtcccatgggtgacctgggccagcttctgtttctggaatgggacgcgagagataaagattctatccgacgagtagtacaacacagcaatgtggtcatcaatcttattggacgagactgggaaaccaaaaactttgattttgaggatgtttttgtgaagattccccaagcaattgctcaactgtccaaggaagctggagttgaaaaattcattcatgtttcacatctgaatgcgaatattaaaagctcttctagatatttgagaaataaggctgttggagagaaagtagtgagagatgcatttccggaagccattatcgtaaagccgtcggacatctttggaagagaggatagattccttaattcttttgcaagtatgcatcggtttggtcctataccccttggttccttgggctggaagacagttaaacaaccagtatatgtcgtagatgtatccaaaggaattgttaatgcagttaaggatcctgatgccaatgggaaatcctttgctttcgttggtcccagtcggtacctccttttccacctggtgaagtacatctttgctgtggctcacagattgttcctcccattccccttgccgctttttgcctatcgatgggtagcaagagtctttgaaataagcccatttgagccctggataacaagggataaagtggagcggatgcacatcacagacatgaaattgcctcacctgcctggcttagaagaccttggtattcaggcaacaccactggaactcaaggccattgaggtgctgcggcgtcatcgcacttaccgctggctgtctgctgaaattgaggatgtgaagccggccaagaccgtcaacatttagtgcctcctgagcagctcttggttttggcgtcttttgggtcggcccatgtggtttgagcacccagccaggcggtctctttagatgtgcggtagggggtgtcgttggggagttccggctatttaaaacattttatgttg

SEQ ID NO: 299704 - DNA, 1096 bp, Homo sapiens
cagcttagcagccgtagtcagccgggagtgctgtcgtgggggattgtgggaaaagatggcggctgccgcacaatcccgggttgtccgggtcctgtcaatgtcacgttctgccattactgcaatagccacatctgtgtgtcacggcccaccctgtcgccagcttcatcatgccctcatgcctcatgggaaaggtggacgttcctcagtcagtgggattgtggccactgtgtttggagcaacaggattcctggggcgatatgttgtcaaccaccttggacgcatggggtcacaggtaatcataccctatcggtgtgataaatatgacatcatgcaccttcgtcccatgggtgacctgggccagcttctgtttctggaatgggacgcgagagataaagattctatccgacgagtagtacaacacagcaatgtggtcatcaatcttattggacgagactgggaaaccaaaaactttgattttgaggatgtttttgtgaagattccccaagcaattgctcaactgtccaaggaagctggagttgaaaaattcattcatgtttcacatctgaatgcgaatattaaaagctcttctagatatttgagaaataaggctgttggagagaaagtagtgagagatgcatttccggaagccattatcgtaaagccgtcggacatctttggaagagaggatagattccttaattcttttgcaagtatgcatcggtttggtcctataccccttggttccttgggctggaagacagttaaacaaccagtatatgtcgtagatgtatccaaaggaattgttaatgcagttaaggatcctgatgccaatgggaaatcctttgctttcgttggtcccagtcggtacctccttttccacctggtgaagtacatctttgctgtggctcacagattgttcctcccattccccttgccgctttttgcctatcgatgggtagcaagagtctttgaaataagcccatttgagccctggataacaagggataaagtggagcggattgagcttgagggagttcaaggtgcatatgctaagatactccagcacaaatcttactgggtggaaaggtgaggtaaa

SEQ ID NO: 299705 - DNA, 1247 bp, Homo sapiens
cagcttagcagccgtagtcagccgggagtgctgtcgtgggggattgtgggaaaagatggcggctgccgcacaatcccgggttgtccgggtcctgtcaatgtcacgttctgccattactgcaatagccacatctgtgtgtcacggcccaccctgtcgccagcttcatcatgccctcatgcctcatgggaaaggtggacgttcctcagtcagtgggattgtggccactgtgtttggagcaacaggattcctggggcgatatgttgtcaaccaccttggacgcatggggtcacaggtaatcataccctatcggtgtgataaatatgacatcatgcaccttcgtcccatgggtgacctgggccagcttctgtttctggaatgggacgcgagagataaagattctatccgacgagtagtacaacacagcaatgtggtcatcaatcttattggacgagactgggaaaccaaaaactttgattttgaggatgtttttgtgaagattccccaagcaattgctcaactgtccaaggaagctggagttgaaaaattcattcatgtttcacatctgaatgcgaatattaaaagctcttctagatatttgagaaataaggctgttggagagaaagtagtgagagatgcatttccggaagccattatcgtaaagccgtcggacatctttggaagagaggatagattccttaattcttttgcaagtatgcatcggtttggtcctataccccttggttccttgggctggaagacagttaaacaaccagtatatgtcgtagatgtatccaaaggaattgttaatgcagttaaggatcctgatgccaatgggaaatcctttgctttcgttggtcccagtcggtacctccttttccacctggtgaagtacatctttgctgtggctcacagattgttcctcccattccccttgccgctttttgcctatcgatgcacatcacagacatgaaattgcctcacctgcctggcttagaagaccttggtattcaggcaacaccactggaactcaaggccattgaggtgctgcggcgtcatcgcacttaccgctggctgtctgctgaaattgaggatgtgaagccggccaagaccgtcaacatttagtgcctcctgagcagctcttggttttggcgtcttttgggtcggcccatgtggtttgagcacccagccaggcggtctctttagaggatcctgtacacagttccactattaaaacatttcaggttgaa

SEQ ID NO: 299706 - DNA, 1117 bp, Homo sapiens
cagcttagcagccgtagtcagccgggagtgctgtcgtgggggattgtgggaaaagatggcggctgccgcacaatcccgggttgtccgggtcctgtcaatgtcacgttctgccattactgcaatagccacatctgtgtgtcacggcccaccctgtcgccagcttcatcatgccctcatgcctcatgggaaaggtggacgttcctcagtcagtgggattgtggccactgtgtttggagcaacaggattcctggggcgatatgttgtcaaccaccttggacgcatggggtcacaggtaatcataccctatcggtgtgataaatatgacatcatgcaccttcgtcccatgggtgacctgggccagcttctgtttctggaatgggacgcgagagataaagattctatccgacgagtagtacaacacagcaatgtggtcatcaatcttattggacgagactgggaaaccaaaaactttgattttgaggatgtttttgtgaagattccccaagcaattgctcaactgtccaaggaagctggagttgaaaaattcattcatgtttcacatctgaatgcgaatattaaaagctcttctagatatttgagaaataaggctgttggagagaaagtagtgagagatgcatttccggaagccattatcgtaaagccgtcggacatctttggaagagaggatagattccttaattcttttgcaagtatgcatcggtttggtcctataccccttggttccttgggctggaagacagttaaacaaccagtatatgtcgtagatgtatccaaaggaattgttaatgcagttaaggatcctgatgccaatgggaaatcctttgctttcgttggtcccagtcggtacctccttttccacctggtgaagtacatctttgctgtggctcacagattgttcctcccattccccttgccgctttttgcctatcggtaagtagagtgctccttttgtgtgacttctgaaaaagccagctccacacgcgtgttcctaatgttctcccttagggttatagggtgtgtgaagggctggtctccagatctacaaagtgttatgacattagcatagagaagaagcagaaatagattagtgttggtt

SEQ ID NO: 299707 - DNA, 1431 bp, Homo sapiens
agcacgaggggcgggtattcccgatctgccatgtattccagaaaggccatgtacaagaggaagtactcagccgctaaatccaaggttgaaaagaaaaagaaggagaaggttctcgcaactgttacaaaaccagttggtggtgacaagaacggcggtacccgggtaccgccagatggcggctgccgcacaatcccgggttgtccgggtcctgtcaatgtcacgttctgccattactgcaatagccacatctgtgtgtcacggcccaccctgtcgccagcttcatcatgccctcatgcctcatgggaaaggtggacgttcctcagtcagtgggattgtggccactgtgtttggagcaacaggattcctggggcgatatgttgtcaaccaccttggacgcatggggtcacaggtaatcataccctatcggtgtgataaatatgacatcatgcaccttcgtcccatgggtgacctgggccagcttctgtttctggaatgggacgcgagagataaagattctatccgacgagtagtacaacacagcaatgtggtcatcaatcttattggacgagactgggaaaccaaaaactttgattttgaggatgtttttgtgaagattccccaagcaattgctcaactgtccaaggaagctggagttgaaaaattcattcatgtttcacatctgaatgcgaatattaaaagctcttctagatatttgagaaataaggctgttggagagaaagtagtgagagatgcatttccggaagccattatcgtaaagccgtcggacatctttggaagagaggatagattccttaattcttttgcaagtatgcatcggtttggtcctataccccttggttccttgggctggaagacagttaaacaaccagtatatgtcgtagatgtatccaaaggaattgttaatgcagttaaggatcctgatgccaatgggaaatcctttgctttcgttggtcccagtcggtacctccttttccacctggtgaagtacatctttgctgtggctcacagattgttcctcccattccccttgccgctttttgcctatcgatgggtagcaagagtctttgaaataagcccatttgagccctggataacaagggataaagtggagcggatgcacatcacagacatgaaattgcctcacctgcctggcttagaagaccttggtattcaggcaacaccactggaactcaaggccattgaggtgctgcggcgtcatcgcacttaccgctggctgtctgctgaaattgaggatgtgaagccggccaagaccgtcaacatttagtgcctcctgagcagctcttggttttggcgtcttttgggtcggcccatgtggtttgagcacccagccaggcggtctctttagaggatcctgtacacagttccactattaaaacatttcaggttgaa

SEQ ID NO: 299708 - DNA, 1044 bp, Homo sapiens
cagcttagcagccgtagtcagccgggagtgctgtcgtgggggattgtgggaaaagatggcggctgccgcacaatcccgggttgtccgggtcctgtcaatgtcacgttctgccattactgcaatagccacatctgtgtgtcacggcccaccctgtcgccagcttcatcatgccctcatgcctcatgggaaaggtggacgttcctcagtcagtgggattgtggccactgtgtttggagcaacaggattcctggggcgatatgttgtcaaccaccttggacgcatggggtcacaggtaatcataccctatcggtgtgataaatatgacatcatgcaccttcgtcccatgggtgacctgggccagcttctgtttctggaatgggacgcgagagataaagattctatccgacgagtagtacaacacagcaatgtggtcatcaatcttattggacgagactgggaaaccaaaaactttgattttgaggatgtttttgtgaagattccccaagcaattgctcaactgtccaaggaagctggagttgaaaaattcattcatgtttcacatctgaatgcgaatattaaaagctcttctagatatttgagaaataaggctgttggagagaaagtagtgagagatgcatttccggaagccattatcgtaaagccgtcggacatctttggaagagaggatagattccttaattcttttgcaagtatgcatcggtttggtcctataccccttggttccttgggctggaagacagttaaacaaccagtatatgttcgtagatgttcccacggagtgtgagtgcgttaggttcctgatgcagtgggaactccttgttcgttggtccagtcggtacttcttcccggtgagtctcttggctggggcccgattgtctccatcctgccgtttgcttgtggtgcggttctgatagccttggccggatacaggtagggggtgcccagcatgtgcccgcgtaacctggtgcccggctgctgggggccctccgtgtgagggggcaccctctccctggtgggctaccg

SEQ ID NO: 299709 - DNA, 1432 bp, Homo sapiens
cagcttagcagccgtagtcagccgggagtgctgtcgtgggggattgtgggaaaagatggcggctgccgcacaatcccgggttgtccgggtcctgtcaatgtcacgttctgccattactgcaatagccacatctgtgtgtcacggcccaccctgtcgccagcttcatcatgccctcatgcctcatgggaaaggtggacgttcctcagtcagtgggattgtggccactgtgtttggagcaacaggattcctggggcgatatgttgtcaaccaccttggacgcatggggtcacaggtaatcataccctatcggtgtgataaatatgacatcatgcaccttcgtcccatgggtgacctgggccagcttctgtttctggaatgggacgcgagagataaagattctatccgacgagtagtacaacacagcaatgtggtcatcaatcttattggacgagactgggaaaccaaaaactttgattttgaggatgtttttgtgaagattccccaagcaattgctcaactgtccaaggaagctggagttgaaaaattcattcatgtttcacatctgaatgcgaatattaaaagctcttctagatatttgagaaataaggctgttggagagaaagtagtgagagatgcatttccggaagccattatcgtaaagccgtcggacatctttggaagagaggatagattccttaattcttttgcaaagtcgcactctgacacccaggctggagtgcggtggcgtgatctcggctcactgcaacctctgcctcccaggttcaagcgattctctggcctcagcctcccaagtagctgggactacaggtatgcatcggtttggtcctataccccttggttccttgggctggaagacagttaaacaaccagtatatgtcgtagatgtatccaaaggaattgttaatgcagttaaggatcctgatgccaatgggaaatcctttgctttcgttggtcccagtcggtacctccttttccacctggtgaagtacatctttgctgtggctcacagattgttcctcccattccccttgccgctttttgcctatcgatgggtagcaagagtctttgaaataagcccatttgagccctggataacaagggataaagtggagcggatgcacatcacagacatgaaattgcctcacctgcctggcttagaagaccttggtattcaggcaacaccactggaactcaaggccattgaggtgctgcggcgtcatcgcacttaccgctggctgtctgctgaaattgaggatgtgaagccggccaagaccgtcaacatttagtgcctcctgagcagctcttggttttggcgtcttttgggtcggcccatgtggtttgagcacccagccaggcggtctctttagaggatcctgtacacagttccactattaaaacatttcaggttgaa

SEQ ID NO: 299710 - DNA, 2391 bp, Homo sapiens
agagtcagtgtgagctgttgaaagcctgcagctaaacaccagtgttacttcactcccctttgtggacaccaaggggaagaagaatacggtaagcttcccacacattagcaagaaagtcctgctgaagtcatccctgctgtatcaggagaatcaagctcacaatcagatgccggcctcagagctcaaggcttcagaaatacctttccaccctagcattaaaacccaggatcccaaggcagaggagaagtcaccaaagaagcaaaaggtgactctgacagcggcagaggccctaaagctttttaagaaccagctgtctccatatgaacaaagtgaaatcctgggctacgcggagctgtggttcctgggtcttgaagccaagaagctcgacacggctcctgagaaatttagcaagacgagttttgatgatgagcatggcttctatctgaaggtcctgcatgatcacattgcctaccgctatgaagttctggagacaatcgggaaggggtcctttggacaggtggccaagtgcttggatcacaaaaacaatgagctggtggccctgaaaatcatcaggaacaagaagaggtttcaccagcaggccctgatggagctgaagatcctggaagctctcagaaagaaggacaaagacaacacctacaatgtggtgcatatgaaggactttttctactttcgcaatcacttctgcatcacctttgagctcctgggaatcaacttgtatgagttgatgaagaataacaactttcaaggcttcagtctgtccatagttcggcgcttcactctctctgttttgaagtgcttgcagatgctttcggtagagaaaatcattcactgtgatctcaagcccgaaaatatagtgctataccaaaagggccaagcctctgttaaagtcattgactttggatcaagctgttatgaacaccagaaagtatacacgtacatccaaagccggttctaccgatccccagaagtgatcctgggccacccctacgacgtggccattgacatgtggagcctgggctgcatcacggcggagttgtacacgggctaccccctgttccccggggagaatgaggtggagcagctggcctgcatcatggagctcaccaactaagacgtttgtgctcacatggaaggagaagtgctccttgatgtccggacaggttctgccattactgcaatagccacatctgtgtgtcacggcccaccctgtcgccagcttcatcatgccctcatgcctcatgggaaaggtggacgttcctcagtcagtgggattgtggccactgtgtttggagcaacaggattcctggggcgatatgttgtcaaccaccttggacgcatggggtcacaggtaatcataccctatcggtgtgataaatatgacatcatgcaccttcgtcccatgggtgacctgggccagcttctgtttctggaatgggacgcgagagataaagattctatccgacgagtagtacaacacagcaatgtggtcatcaatcttattggacgagactgggaaaccaaaaactttgattttgaggatgtttttgtgaagattccccaagcaattgctcaactgtccaaggaagctggagttgaaaaattcattcatgtttcacatctgaatgcgaatattaaaagctcttctagatatttgagaaataaggctgttggagagaaagtagtgagagatgcatttccggaagccattatcgtaaagccgtcggacatctttggaagagaggatagattccttaattcttttgcaagtatgcatcggtttggtcctataccccttggttccttgggctggaagacagttaaacaaccagtatatgtcgtagatgtatccaaaggaattgttaatgcagttaaggatcctgatgccaatgggaaatcctttgctttcgttggtcccagtcggtacctccttttccacctggtgaagtacatctttgctgtggctcacagattgttcctcccattccccttgccgctttttgcctatcgatgggtagcaagagtctttgaaataagcccatttgagccctggataacaagggataaagtggagcggatgcacatcacagacatgaaattgcctcacctgcctggcttagaagaccttggtattcaggcaacaccactggaactcaaggccattgaggtgctgcggcgtcatcgcacttaccgctggctgtctgctgaaattgaggatgtgaagccggccaagaccgtcaacatttagtgcctcctgagcagctcttggttttggcgtcttttgggtcggcccatgtggtttgagcacccagccaggcggtctctttagaggatcctgtacacagttccactattaaaacatttcaggttgaa

SEQ ID NO: 299711 - DNA, 1426 bp, Homo sapiens
cgggaacggcggcccctggtcgggattccgagacggggatttaaggttttggaagtggcaccgtgctgcagcggtcacgccaacttcctaggcacactctggtttctctaggtttggagctgcctcagtctggtttctcctttcgctttccgcttccccggctcacatattcaattgtgcaccaccttgggaggggacaaaagatcttaagcagctgttctgccattactgcaatagccacatctgtgtgtcacggcccaccctgtcgccagcttcatcatgccctcatgcctcatgggaaaggtggacgttcctcagtcagtgggattgtggccactgtgtttggagcaacaggattcctggggcgatatgttgtcaaccaccttggacgcatggggtcacaggtaatcataccctatcggtgtgataaatatgacatcatgcaccttcgtcccatgggtgacctgggccagcttctgtttctggaatgggacgcgagagataaagattctatccgacgagtagtacaacacagcaatgtggtcatcaatcttattggacgagactgggaaaccaaaaactttgattttgaggatgtttttgtgaagattccccaagcaattgctcaactgtccaaggaagctggagttgaaaaattcattcatgtttcacatctgaatgcgaatattaaaagctcttctagatatttgagaaataaggctgttggagagaaagtagtgagagatgcatttccggaagccattatcgtaaagccgtcggacatctttggaagagaggatagattccttaattcttttgcaagtatgcatcggtttggtcctataccccttggttccttgggctggaagacagttaaacaaccagtatatgtcgtagatgtatccaaaggaattgttaatgcagttaaggatcctgatgccaatgggaaatcctttgctttcgttggtcccagtcggtacctccttttccacctggtgaagtacatctttgctgtggctcacagattgttcctcccattccccttgccgctttttgcctatcgatgggtagcaagagtctttgaaataagcccatttgagccctggataacaagggataaagtggagcggatgcacatcacagacatgaaattgcctcacctgcctggcttagaagaccttggtattcaggcaacaccactggaactcaaggccattgaggtgctgcggcgtcatcgcacttaccgctggctgtctgctgaaattgaggatgtgaagccggccaagaccgtcaacatttagtgcctcctgagcagctcttggttttggcgtcttttgggtcggcccatgtggtttgagcacccagccaggcggtctctttagaggatcctgtacacagttccactattaaaacatttcaggttgaa

SEQ ID NO: 299712 - DNA, 1270 bp, Homo sapiens
  misc_feature (24)..(24): n is a, c, g, or t
gctaggtacgaggcggtgttaatnggcgaggccgggttgtccgggtcctgtcaatgtcacgttctgccattactgcaatagccacatctgtgtgtcacggcccaccctgtcgccagcttcatcatgccctcatgcctcatgggaaaggtggacgttcctcagtcagtgggattgtggccactgtgtttggagcaacaggattcctggggcgatatgttgtcaaccaccttggacgcatggggtcacaggtaatcataccctatcggtgtgataaatatgacatcatgcaccttcgtcccatgggtgacctgggccagcttctgtttctggaatgggacgcgagagataaagattctatccgacgagtagtacaacacagcaatgtggtcatcaatcttattggacgagactgggaaaccaaaaactttgattttgaggatgtttttgtgaagattccccaagcaattgctcaactgtccaaggaagctggagttgaaaaattcattcatgtttcacatctgaatgcgaatattaaaagctcttctagatatttgagaaataaggctgttggagagaaagtagtgagagatgcatttccggaagccattatcgtaaagccgtcggacatctttggaagagaggatagattccttaattcttttgcaagtatgcatcggtttggtcctataccccttggttccttgggctggaagacagttaaacaaccagtatatgtcgtagatgtatccaaaggaattgttaatgcagttaaggatcctgatgccaatgggaaatcctttgctttcgttggtcccagtcggtacctccttttccacctggtgaagtacatctttgctgtggctcacagattgttcctcccattccccttgccgctttttgcctatcgatgggtagcaagagtctttgaaataagcccatttgagccctggataacaagggataaagtggagcggatgcacatcacagacatgaaattgcctcacctgcctggcttagaagaccttggtattcaggcaacaccactggaactcaaggccattgaggtgctgcggcgtcatcgcacttaccgctggctgtctgctgaaattgaggatgtgaagccggccaagaccgtcaacatttagtgcctcctgagcagctcttggttttggcgtcttttgggtcggcccatgtggtttgagcacccagccaggcggtctctttagaggatcctgtacacagttccactattaaaacatttcaggttgaa

SEQ ID NO: 299713 - DNA, 1389 bp, Homo sapiens
agcattggtacatgaactttgagggttcattctagtaccaagaacctcagtcaatgaaaaagaaatggtggaatgtttgacaagtctcttgctgttaaactttctaaaagtcagaatatcttttctcaagcacttcactccttttatcattatttgtgatgttcttcagtggttttatagttctgccattactgcaatagccacatctgtgtgtcacggcccaccctgtcgccagcttcatcatgccctcatgcctcatgggaaaggtggacgttcctcagtcagtgggattgtggccactgtgtttggagcaacaggattcctggggcgatatgttgtcaaccaccttggacgcatggggtcacaggtaatcataccctatcggtgtgataaatatgacatcatgcaccttcgtcccatgggtgacctgggccagcttctgtttctggaatgggacgcgagagataaagattctatccgacgagtagtacaacacagcaatgtggtcatcaatcttattggacgagactgggaaaccaaaaactttgattttgaggatgtttttgtgaagattccccaagcaattgctcaactgtccaaggaagctggagttgaaaaattcattcatgtttcacatctgaatgcgaatattaaaagctcttctagatatttgagaaataaggctgttggagagaaagtagtgagagatgcatttccggaagccattatcgtaaagccgtcggacatctttggaagagaggatagattccttaattcttttgcaagtatgcatcggtttggtcctataccccttggttccttgggctggaagacagttaaacaaccagtatatgtcgtagatgtatccaaaggaattgttaatgcagttaaggatcctgatgccaatgggaaatcctttgctttcgttggtcccagtcggtacctccttttccacctggtgaagtacatctttgctgtggctcacagattgttcctcccattccccttgccgctttttgcctatcgatgggtagcaagagtctttgaaataagcccatttgagccctggataacaagggataaagtggagcggatgcacatcacagacatgaaattgcctcacctgcctggcttagaagaccttggtattcaggcaacaccactggaactcaaggccattgaggtgctgcggcgtcatcgcacttaccgctggctgtctgctgaaattgaggatgtgaagccggccaagaccgtcaacatttagtgcctcctgagcagctcttggttttggcgtcttttgggtcggcccatgtggtttgagcacccagccaggcggtctctttagaggatcctgtacacagttccactattaaaacatttcaggttgaa

SEQ ID NO: 299714 - DNA, 808 bp, Homo sapiens
  misc_feature (715)..(715): n is a, c, g, or t
  misc_feature (746)..(746): n is a, c, g, or t
cagcttagcagccgtagtcagccgggagtgctgtcgtgggggattgtgggaaaagatggcggctgccgcacaatcccgggttgtccgggtcctgtcaatgtcacgttctgccattactgcaatagccacatctgtgtgtcacggcccaccctgtcgccagcttcatcatgccctcatgcctcatgggaaaggtggacgttcctcagtcagtgggattgtggccactgtgtttggagcaacaggattcctggggcgatatgttgtcaaccaccttggacgcatggggtcacaggtaatcataccctatcggtgtgataaatatgacatcatgcaccttcgtcccatgggtgacctgggccagcttctgtttctggaatgggacgcgagagataaagattctatccgacgagtagtacaacacagcaatgtggtcatcaatcttattggacgagactgggaaaccaaaaactttgattttgaggatgtttttgtgaagattccccaagcaattgctcaactgtccaaggaagctggagttgaaaaattcattcatgtttcacatctgaatgcgaatattaaaagctcttctagatatttgagaaataaggctgttggagagaaagtagtgagagatgcatttccggaagccattatcgtaaagccgtcggacatctttggaagagaggatagattccttaattcttttgcaagatgnttcgggttggcctataccctgggtcctgggnggagacactctaacaccctttttcgcctttttccacggaggcaccagaacttgcccgggacc

SEQ ID NO: 299715 - DNA, 735 bp, Homo sapiens
cagcttagcagccgtagtcagccgggagtgctgtcgtgggggattgtgggaaaagatggcggctgccgcacaatcccgggttgtccgggtcctgtcaatgtcacgttctgccattactgcaatagccacatctgtgtgtcacggcccaccctgtcgccagcttcatcatgccctcatgcctcatgggaaaggtggacgttcctcagtcagtgggattgtggccactgtgtttggagcaacaggattcctggggcgatatgttgtcaaccaccttggacgcatggggtcacaggtaatcataccctatcggtgtgataaatatgacatcatgcaccttcgtcccatgggtgacctgggccagcttctgtttctggaatgggacgcgagagataaagattctatccgacgagtagtacaacacagcaatgtggtcatcaatcttattggacgagactgggaaaccaaaaactttgattttgaggatgtttttgtgaagattccccaagcaattgctcaactgtccaaggaagctggagttgaaaaattcattcatgtttcacatctgaatgcgaatattaaaagctcttctagatatttgagaaataaggctgttggagagaaagtagtgagagatgcatttccggaagccattatcgtaaagccgtcggacatctttggaagagaggatagattccttaattcttttgcaaagtacgtattctttcttaatggtag

SEQ ID NO: 299716 - DNA, 1216 bp, Homo sapiens
cagcttagcagccgtagtcagccgggagtgctgtcgtgggggattgtgggaaaagatggcggctgccgcacaatcccgggttgtccgggtcctgtcaatgtcacgttctgccattactgcaatagccacatctgtgtgtcacggcccaccctgtcgccagcttcatcatgccctcatgcctcatgggaaaggtggacgttcctcagtcagtgggattgtggccactgtgtttggagcaacaggattcctggggcgatatgttgtcaaccaccttggaatgggacgcgagagataaagattctatccgacgagtagtacaacacagcaatgtggtcatcaatcttattggacgagactgggaaaccaaaaactttgattttgaggatgtttttgtgaagattccccaagcaattgctcaactgtccaaggaagctggagttgaaaaattcattcatgtttcacatctgaatgcgaatattaaaagctcttctagatatttgagaaataaggctgttggagagaaagtagtgagagatgcatttccggaagccattatcgtaaagccgtcggacatctttggaagagaggatagattccttaattcttttgcaagtatgcatcggtttggtcctataccccttggttccttgggctggaagacagttaaacaaccagtatatgtcgtagatgtatccaaaggaattgttaatgcagttaaggatcctgatgccaatgggaaatcctttgctttcgttggtcccagtcggtacctccttttccacctggtgaagtacatctttgctgtggctcacagattgttcctcccattccccttgccgctttttgcctatcgatgggtagcaagagtctttgaaataagcccatttgagccctggataacaagggataaagtggagcggatgcacatcacagacatgaaattgcctcacctgcctggcttagaagaccttggtattcaggcaacaccactggaactcaaggccattgaggtgctgcggcgtcatcgcacttaccgctggctgtctgctgaaattgaggatgtgaagccggccaagaccgtcaacatttagtgcctcctgagcagctcttggttttggcgtcttttgggtcggcccatgtggtttgagcacccagccaggcggtctctttagaggatcctgtacacagttccactattaaaacatttcaggttgaa

SEQ ID NO: 299717 - DNA, 1851 bp, Homo sapiens
agagtcagtgtgagctgttgaaagcctgcagctaaacaccagtgttacttcactcccctttgtggacaccaaggggaagaagaatacggtaagcttcccacacattagcaagaaagtcctgctgaagtcatccctgctgtatcaggagaatcaagctcacaatcagatgccggcctcagagctcaaggcttcagaaatacctttccaccctagcattaaaacccaggatcccaaggcagaggagaagtcaccaaagaagcaaaaggtgactctgacagcggcagaggccctaaagctttttaagaaccagctgtctccatatgaacaaagtgaaatcctgggctacgcggagctgtggttcctgggtcttgaagccaagaagctcgacacggctcctgagaaatttagcaagacgagttttgatgatgagcatggcttctatctgaaggtcctgcatgatcacattgcctaccgctatgaagttctggagacaatcgggaaggggtcctttggacaggtggccaagtgcttggatcacaaaaacaatgagctggtggccctgaaaatcatcaggaacaagaagaggtttcaccagcaggccctgatggagctgaagatcctggaagctctcagaaagaaggacaaagacaacacctacaatgtggtgcatatgaaggactttttctactttcgcaatcacttctgcatcacctttgagctcctgggaatcaacttgtatgagttgatgaagaataacaactttcaaggcttcagtctgtccatagttcggcgcttcactctctctgttttgaagtgcttgcagatgctttcggtagagaaaatcattcactgtgatctcaagcccgaaaatatagtgctataccaaaagggccaagcctctgttaaagtcattgactttggatcaagctgttatgaacaccagaaagtatacacgtacatccaaagccggttctaccgatccccagaagtgatcctgggccacccctacgacgtggccattgacatgtggagcctgggctgcatcacggcggagttgtacacgggctaccccctgttccccggggagaatgaggtggagcagctggcctgcatcatggaggtgctgggtctgccgccagccggcttcattcagacagcctccaggagacagacattctttgattccaaaggttttcctaaaaatataaccaacaacagggggaaaaaaagatacccagattccaaggacctcacgatggtgctgaaaacctatgacaccagcttcctggactttctcagaaggtgtttggtatgggaaccttctcttcgcatgaccccggaccaggccctcaagcatgcttggattcatcagtctcggaacctcaagccacagcccaggccccagaccctgaggaaatccaattcctttttcccctctgagacaaggaaggacaaggttcaaggctgtcatcactcgagcagaaaagcagatgagatcaccaaagagactacagagaaaacaaaagatagccccacgaagcatgttcagcattcaggtgatcagcaggactgtctccagcacggagctgacactgttcagctgcctcaactggtagacgctcccaagaagtcagaggcagctgtcggggcggaggtgtccatgacctccccaggacagagcaaaaacttctccctcaagaacacaaacgttttaccccctattgtatgacctttgctgagggtatgtcctgctcctttccaccagtgatttgtattaagacagcacttatattgtacaatacttcagactgttttttttaaatacataaaactttatgttaaaaaactcta

SEQ ID NO: 299718 - DNA, 1790 bp, Homo sapiens
agagtcagtgtgagctgttgaaagcctgcagctaaacaccagtgttacttcactcccctttgtggacaccaaggggaagaagaatacggtaagcttcccacacattagcaagaaagtcctgctgaagtcatccctgctgtatcaggagaatcaagctcacaatcagatgccggcctcagagctcaaggcttcagaaatacctttccaccctagcattaaaacccaggatcccaaggcagaggagaagtcaccaaagaagcaaaaggtgactctgacagcggcagaggccctaaagctttttaagaaccagctgtctccatatgaacaaagtgaaatcctgggctacgcggagctgtggttcctgggtcttgaagccaagaagctcgacacggctcctgagaaatttagcaagacgagttttgatgatgagcatggcttctatctgaaggtcctgcatgatcacattgcctaccgctatgaagttctggagacaatcgggaaggggtcctttggacaggtggccaagtgcttggatcacaaaaacaatgagctggtggccctgaaaatcatcaggaacaagaagaggtttcaccagcaggccctgatggagctgaagatcctggaagctctcagaaagaaggacaaagacaacacctacaatgtggtgcatatgaaggactttttctactttcgcaatcacttctgcatcacctttgagctcctgggaatcaacttgtatgagttgatgaagaataacaactttcaaggcttcagtctgtccatagttcggcgcttcactctctctgttttgaagtgcttgcagatgctttcggtagagaaaatcattcactgtgatctcaagcccgaaaatatagtgctataccaaaagggccaagcctctgttaaagtcattgactttggatcaagctgttatgaacaccagaaagtatacacgtacatccaaagccggttctaccgatccccagaagtgatcctgggccacccctacgacgtggccattgacatgtggagcctgggctgcatcacggcggagttgtacacgggctaccccctgttccccggggagaatgaggtggagcagctggcctgcatcatggagattccaaaggttttcctaaaaatataaccaacaacagggggaaaaaaagatacccagattccaaggacctcacgatggtgctgaaaacctatgacaccagcttcctggactttctcagaaggtgtttggtatgggaaccttctcttcgcatgaccccggaccaggccctcaagcatgcttggattcatcagtctcggaacctcaagccacagcccaggccccagaccctgaggaaatccaattcctttttcccctctgagacaaggaaggacaaggttcaaggctgtcatcactcgagcagaaaagcagatgagatcaccaaagagactacagagaaaacaaaagatagccccacgaagcatgttcagcattcaggtgatcagcaggactgtctccagcacggagctgacactgttcagctgcctcaactggtagacgctcccaagaagtcagaggcagctgtcggggcggaggtgtccatgacctccccaggacagagcaaaaacttctccctcaagaacacaaacgttttaccccctattgtatgacctttgctgagggtatgtcctgctcctttccaccagtgatttgtattaagacagcacttatattgtacaatacttcagactgttttttttaaatacataaaactttatgttaaaaaactcta

SEQ ID NO: 299719 - DNA, 1063 bp, Homo sapiens
gatgaggagcatttaggtaagtagagggcctagggccgcattactgtagcttgacatatgtcttttcttctctctaggaaaatatagtgctataccaaaagggccaagcctctgttaaagtcattgactttggatcaagctgttatgaacaccagaaagtatacacgtacatccaaagccggttctaccgatccccagaagtgatcctgggccacccctacgacgtggccattgacatgtggagcctgggctgcatcacggcggagttgtacacgggctaccccctgttccccggggagaatgaggtggagcagctggcctgcatcatggaggtgctgggtctgccgccagccggcttcattcagacagcctccaggagacagacattctttgattccaaaggttttcctaaaaatataaccaacaacagggggaaaaaaagatacccagattccaaggacctcacgatggtgctgaaaacctatgacaccagcttcctggactttctcagaaggtgtttggtatgggaaccttctcttcgcatgaccccggaccaggccctcaagcatgcttggattcatcagtctcggaacctcaagccacagcccaggccccagaccctgaggaaatccaattcctttttcccctctgagacaaggaaggacaaggttcaaggctgtcatcactcgagcagaaaagcagatgagatcaccaaagagactacagagaaaacaaaagatagccccacgaagcatgttcagcattcaggtgatcagcaggactgtctccagcacggagctgacactgttcagctgcctcaactggtagacgctcccaagaagtcagaggcagctgtcggggcggaggtgtccatgacctccccaggacagagcaaaaacttctccctcaagaacacaaacgttttaccccctattgtatgacctttgctgagggtatgtcctgctcctttccaccagtgatttgtattaagacagcacttatattgtacaatacttcagactgttttttttaaatacataaaactttatgttaaaaaactcta

SEQ ID NO: 299720 - DNA, 1182 bp, Homo sapiens
acatgatcatgactttaggagctttgttattgataagactgtgagcttgattcttctttggtcattggtaaaaaggacaatgtaggatgaagtgggagggctaaggccatgatccaaaaggaaatggatatttgtacaatttcacaggaccttgtcacttaacatttactttaccattgtcattattatcattagcattattattttatcttggttggtgttaagccatttaaattatttctttgatttggagaggaggcagtgggaaggaagttcagaacatactgaatagtaggaaaaaatcaatttttaaagtaaattgcattccttgggtaatctacacatggttatttcaaactgagtgtgtgtgtgtgtgtttattggggtgtggcatgaggcgagtgtgtaagacagagagcaaaagagctacagaggccactctaagcagcagcatcatgtgaccactaaagatttacacctgaaactaaatacagaatgttctatctctacagattccaaaggttttcctaaaaatataaccaacaacagggggaaaaaaagatacccagattccaaggacctcacgatggtgctgaaaacctatgacaccagcttcctggactttctcagaaggtgtttggtatgggaaccttctcttcgcatgaccccggaccaggccctcaagcatgcttggattcatcagtctcggaacctcaagccacagcccaggccccagaccctgaggaaatccaattcctttttcccctctgagacaaggaaggacaaggttcaaggctgtcatcactcgagcagaaaagcagatgagatcaccaaagagactacagagaaaacaaaagatagccccacgaagcatgttcagcattcaggtgatcagcaggactgtctccagcacggagctgacactgttcagctgcctcaactggtagacgctcccaagaagtcagaggcagctgtcggggcggaggtgtccatgacctccccaggacagagcaaaaacttctccctcaagaacacaaacgttttaccccctattgtatgacctttgctgagggtatgtcctgctcctttccaccagtgatttgtattaagacagcacttatattgtacaatacttcagactgttttttttaaatacataaaactttatgttaaaaaactcta

SEQ ID NO: 299721 - DNA, 2231 bp, Homo sapiens
agagtcagtgtgagctgttgaaagcctgcagctaaacaccagtgttacttcactcccctttgtggacaccaaggggaagaagaatacggtaagcttcccacacattagcaagaaagtcctgctgaagtcatccctgctgtatcaggagaatcaagctcacaatcagatgccggcctcagagctcaaggcttcagaaatacctttccaccctagcattaaaacccaggatcccaaggcagaggagaagtcaccaaagaagcaaaaggtgactctgacagcggcagaggccctaaagctttttaagaaccagctgtctccatatgaacaaagtgaaatcctgggctacgcggagctgtggttcctgggtcttgaagccaagaagctcgacacggctcctgagaaatttagcaagacgagttttgatgatgagcatggcttctatctgaaggtcctgcatgatcacattgcctaccgctatgaagttctggagacaatcgggaaggggtcctttggacaggtggccaagtgcttggatcacaaaaacaatgagctggtggccctgaaaatcatcaggaacaagaagaggtttcaccagcaggccctgatggagctgaagatcctggaagctctcagaaagaaggacaaagacaacacctacaatgtggtgcatatgaaggactttttctactttcgcaatcacttctgcatcacctttgagctcctgggaatcaacttgtatgagttgatgaagaataacaactttcaaggcttcagtctgtccatagttcggcgcttcactctctctgttttgaagtgcttgcagatgctttcggtagagaaaatcattcactgtgatctcaagcccgaaaatatagtgctataccaaaagggccaagcctctgttaaagtcattgactttggatcaagctgttatgaacaccagaaagtatacacgtacatccaaagccggttctaccgatccccagaagtgatcctgggccacccctacgacgtggccattgacatgtggagcctgggctgcatcacggcggagttgtacacgggctaccccctgttccccggggagaatgaggtggagcagctggcctgcatcatggagattccaaaggttttcctaaaaatataaccaacaacagggggaaaaaaagatacccagattccaaggacctcacgatggtgctgaaaacctatgacaccagcttcctggactttctcagaaggtgtttggtatgggaaccttctcttcgcatgaccccggaccaggccctcaagcatgcttggattcatcagtctcggaacctcaagccacagcccaggccccagaccctgaggaaatccaattcctttttcccctctgagacaaggaaggacaaggttcaaggctgtcatcactcgagcagaaaagcagatgagatcaccaaagagactacagagaaaacaaaagatagccccacgaagcatgttcagcattcaggtgatcagcaggactgtctccagcacggagctgacactgttcagctgcctcaactggtagacgctcccaagaagtcagaggcagctgtcggggcggaggtgtccatgacctccccaggacagagcaaaaacttctccctcaagaacacaaacgttttaccccctattgtatgacctttgctgagggtatgtcctgctcctttccaccagtgatttgtattaagacagcacttatattgtacaatacttcagactgttttttttaaatacataaaactttatgttaaaaaactctattaacatggccaattggcatgactcctcttatgagggatgggggaggatgtccttgcacttaaactcattccatatgcatctgtgtgtgtagagggggcgggtagttttgaactctcagtgttacagcatcattaatggaactccaaacaaaagaaattttttttcttcttgcccatgactgccaacctatgtcaggatttttgtttgaaaatgatagaagctgaattcaaaagcagtttaaacaacggaagacacttattgacttacataattggggcatcagaaaaggtagatgtagtttcaggcgcagcaggatccaggaattcaaatgaggttgtagggctcagactccctcttcatctattagccttgcttctcactatggttaacttcatcctgatgtcaggccctgctcagaagttaaccgccaacatccagtc

SEQ ID NO: 299722 - DNA, 818 bp, Homo sapiens
  misc_feature (594)..(594): n is a, c, g, or t
cagcttagcagccgtagtcagccgggagtgctgtcgtgggggattgtgggaaaagatggcggctgccgcacaatcccgggttgtccgggtcctgtcaatgtcacgttctgccattactgcaatagccacatctgtgtgtcacggcccaccctgtcgccagcttcatcatgccctcatgcctcatgggaaaggtggacgttcctcagtcagtgggattgtggccactgtgtttggagcaacaggattcctggggcgatatgttgtcaaccaccttggacgcatggggtcacaggtaatcataccctatcggtgtgataaatatgacatcatgcaccttcgtcccatgggtgacctgggccagcttctgtttctggaatgggacgcgagagataaagattctatccgacgagtagtacaacacagcaatgtggtcatcttttcaatcttattgggaagggaagaaccttgggggaaaaaaaacccaaaaaaaaaaaaaacttttttgggaaatttttttcgggaacgggggcgggacacatgaggggtatcacatcaaccaacggcgggcggtcttcggcggcaaacacacgacangcgcgaacatttttttttcccccaccccgccacgaccccaaaaaagaaagggcgcggcccccacaacaaaacttttttgcttgggcgggcgccgtttttccccccaaaaaaaaacactgctgtctgtggggggtggctgttttctcccccacccccaaaaaaaagaccaggggggcgggggggccaacacaaacaagaacgcgggcgcccccctctttctggtg

SEQ ID NO: 299723 - DNA, 734 bp, Homo sapiens
gcttttatagtgatttgcatgaatcgaaaattgccacatattctttgaaagcaattaagtctcaataataggactcatgccagcttgaatgtttaagtgcctgctaggatagcactttgttctcagccagttttcagcattgtctgtggtcctttgtttatccaaagatgcacatcacagacatgaaattgcctcacctgcctggcttagaagaccttggtattcaggcaacaccactggaactcaaggccattgaggtgctgcggcgtcatcgcacttaccgctggctgtctgctgaaattgaggatgtgaagccggccaagaccgtcaacatttagtgcctcctgagcagctcttggttttggcgtcttttgggtcggcccatgtggtttgagcacccagccaggcggtctctttagaggatcctgtacacagttccactattaaaacatttcaggttgaattctgcagtattttcttccttgatttacaaaatgagaaatgtagtcacttagaacttgagcatgatttttgttaaacatatttaataatgatatatatactatttattctctgaaatgccagagagtttgaattttcctatgacaaaccacttctagcatacgttctagaagacaaggaccctttttaatgtcaaagtattgtaaagaccccaagtgatatgtgattgttttttaatttccattaaatgagagagcatacagtatccccta

SEQ ID NO: 299724 - DNA, 1654 bp, Homo sapiens
agagtcagtgtgagctgttgaaagcctgcagctaaacaccagtgttacttcactcccctttgtggacaccaaggggaagaagaatacggtaagcttcccacacattagcaagaaagtcctgctgaagtcatccctgctgtatcaggagaatcaagctcacaatcagatgccggcctcagagctcaaggcttcagaaatacctttccaccctagcattaaaacccaggatcccaaggcagaggagaagtcaccaaagaagcaaaaggtgactctgacagcggcagaggccctaaagctttttaagaaccagctgtctccatatgaacaaagtgaaatcctgggctacgcggagctgtggttcctgggtcttgaagccaagaagctcgacacggctcctgagaaatttagcaagacgagttttgatgatgagcatggcttctatctgaaggtcctgcatgatcacattgcctaccgctatgaagttctggagacaatcgggaaggggtcctttggacaggtggccaagtgcttggatcacaaaaacaatgagctggtggccctgaaaatcatcaggaacaagaagaggtttcaccagcaggccctgatggagctgaagatcctggaagctctcagaaagaaggacaaagacaacacctacaatgtggtgcatatgaaggactttttctactttcgcaatcacttctgcatcacctttgagctcctgggaatcaacttgtatgagttgatgaagaataacaactttcaaggcttcagtctgtccatagttcggcgcttcactctctctgttttgaagtgcttgcagatgctttcggtagagaaaatcattcactgtgatctcaagcccgaaaatatagtgctataccaaaagggccaagcctctgttaaagtcattgactttggatcaagctgttatgaacaccagaaagtatacacgtacatccaaagccggttctaccgatccccagaagtgatcctgggccacccctacgacgtggccattgacatgtggagcctgggctgcatcacggcggagttgtacacgggctaccccctgttccccggggagaatgaggtggagcagctggcctgcatcatggaggtgctgggtctgccgccagccggcttcattcagacagcctccaggagacagacattctttgattccaaaggttttcctaaaaatataaccaacaacagggggaaaaaaagatacccagattccaaggacctcacgatggtgctgaaaacctatgacaccagcttcctggactttctcagaaggtgtttggtatgggaaccttctcttcgcatgaccccggaccaggccctcaagcatgcttggattcatcagtctcggaacctcaagccacagcccaggccccagaccctgaggaaatccaattcctttttcccctctgagacaaggaaggacaaggttcaaggctgtcatcactcgagcagaaaagcaggtacagcctgtcaaataaccagtcctagtcccacagtccgggaattaatattctagaattctgtaaatctccttgtgatatttttgaagccccagttctgtagtctggaaattaaaatctttgtttttaatattctgtttaatatgctgtttaagcatttctga

SEQ ID NO: 299725 - DNA, 860 bp, Homo sapiens
cagcttagcagccgtagtcagccgggagtgctgtcgtgggggattgtgggaaaagatggcggctgccgcacaatcccgggttgtccgggtcctgtcaatgtcacgttctgccattactgcaatagccacatctgtgtgtcacggcccaccctgtcgccagcttcatcatgccctcatgcctcatgggaaaggtggacgttcctcagtcagtgggattgtggccactgtgtttggagcaacaggattcctggggcgatatgttgtcaaccaccttggacgcatggggtcacaggtaatcataccctatcggtgtgataaatatgacatcatgcaccttcgtcccatgggtgacctgggccagcttctgtttctggtaagggcctttatgactgaatgaagttgacaaatataaattactaaggtcatttttaggagtgataggcagtataataaagcagtaatttcttcccagaatggaccaaaggcatcctctgttcccaggtcattctttcagctaggttccggcatctcctttgtcatgcaagctctagattggcagttggcaaactttttctttgaagggacagagagtaaatacttctggctttgcaggtcgtagagtctttgtcataattactcagctctgcccttgtaactggaagtagccatagacaatatgtacacaaatgggcatggctgcatttcagtaaaattttatttacaaaatgaggctgcaggctgaatttggcctatggactatagtttatcaatccctgctctagacctgtgctgtccagtgtggtagccactggccacatgtggctactgagcacatgaaatgtggctagtctgaattgaga

SEQ ID NO: 299726 - DNA, 651 bp, Homo sapiens
tctggttctaccacttatcaggtgtggacttaacctctctgtagctcagtatctccatttatgagaatgagaataaagcctgttctccagggtcgctgaaatgatcagacgaattagtaaatgtacagtgcttagaataatgcccggcacattggaggtgctttacaaatgaactgtttttatatcatcacggtcatcgtttccactaagtgatgtacaacctaaaggacaattaacatataatccacatttgaatcttgttcccttctgtcttctctctcctttagcagatgagatcaccaaagagactacagagaaaacaaaagatagccccacgaagcatgttcagcattcaggtgatcagcaggactgtctccagcacggagctgacactgttcagctgcctcaactggtagacgctcccaagaagtcagaggcagctgtcggggcggaggtgtccatgacctccccaggacagagcaaaaacttctccctcaagaacacaaacgttttaccccctattgtatgacctttgctgagggtatgtcctgctcctttccaccagtgatttgtattaagacagcacttatattgtacaatacttcagactgttttttttaaatacataaaactttatgttaaaaaactcta

SEQ ID NO: 299727 - DNA, 1379 bp, Homo sapiens
agagtcagtgtgagctgttgaaagcctgcagctaaacaccagtgttacttcactcccctttgtggacaccaaggggaagaagaatacggtaagcttcccacacattagcaagaaagtcctgctgaagtcatccctgctgtatcaggagaatcaagctcacaatcagatgccggcctcagagctcaaggcttcagaaatacctttccaccctagcattaaaacccaggatcccaaggcagaggagaagtcaccaaagaagcaaaaggtgactctgacagcggcagaggccctaaagctttttaagaaccagctgtctccatatgaacaaagtgaaatcctgggctacgcggagctgtggttcctgggtcttgaagccaagaagctcgacacggctcctgagaaatttagcaagacgagttttgatgatgagcatggcttctatctgaaggtcctgcatgatcacattgcctaccgctatgaagttctggagacaatcgggaaggggtcctttggacaggtggccaagtgcttggatcacaaaaacaatgagctggtggccctgaaaatcatcaggaacaagaagaggtttcaccagcaggccctgatggagctgaagatcctggaagctctcagaaagaaggacaaagacaacacctacaatgtggtgcatatgaaggactttttctactttcgcaatcacttctgcatcacctttgagctcctgggaatcaacttgtatgagttgatgaagaataacaactttcaaggcttcagtctgtccatagttcggcgcttcactctctctgttttgaagtgcttgcagatgctttcggtagagaaaatcattcactgtgatctcaagcccgaaaatatagtgctataccaaaagggccaagcctctgttaaagtcattgactttggatcaagctgttatgaacaccagaaagtatacacgtacatccaaagccggttctaccgatccccagaagtgatcctgggccacccctacgacgtggccattgacatgtggagcctgggctgcatcacggcggagttgtacacgggctaccccctgttccccggggagaatgaggtggagcagctggcctgcatcatggagattccaaaggttttcctaaaaatataaccaacaacagggggaaaaaaagatacccagattccaaggacctcacgatggtgctgaaaacctatgacaccagcttcctggactttctcagaaggtgtttggtgtgagtttgttgggacatctctgcttctgggtttcctcttaaatgctgtactttgacacacgtttgctggtgaaagactaaggctgggagatagttataaaagtaacaagaaatgctaacaatagagct

SEQ ID NO: 299728 - DNA, 516 bp, Homo sapiens
cgaaaagggacttgcaaaggacacagagcaagcggtttcagctgtactctgctaatgtaacagggaatagactcaaatggatgctaaaaagccaaggaaatgtgatttgactcccttcctggttttgaaagcaagaaagaaacaaaagttcacctctgcgaagaaaggggcttcctgcaagagacgggcttatcagtgagtgtcacacagtggaagaggatatccgacggtcattcattgtctcatttccatgtctcatcagcacttcctatacgaaaagcaggaacaaaacaaaatcctgatccgaccatttggtgttgggcaaaggaatggaaatcagttcaagctgaagagacagcaaacagcagagatgtgaattgctagttctgtctaggtttttaggttggcacactattatttatggtaatgcattcacctgttaaatgcaaatggaagactcgaactagaagaacttgtaatgatcattgcaagttaacattaaaacgtttaaaatat

SEQ ID NO: 299729 - DNA, 710 bp, Homo sapiens
cgaaaagggacttgcaaaggacacagagcaagcggtttcagctgtactctgctaatgtaacagggaatagactcaaatggatgctaaaaagccaaggaaatgtgatttgactcccttcctggttttgaaagcaagaaagaaacaaaagttcacctctgcgaagggccccactctttctgagatctacatggttggaagtaaactttcggttcagatccagaagccaccttccaatatcaagaactccagaatgacccaagtctttcataagaacaccagtgttacttcactcccctttgtggacaccaaggggaagaagaatacggtaagcttcccacacattagcaagaaagtcctgctgaagtcatccctgctgtatcaggagaatcaagctcacaatcagatgccggcctcagagctcaaggcttcagaaatacctttccaccctagcattaaaacccaggatcccaaggcagaggagaagtcaccaaagaagcaaaaggtgactctgacagcggcaggtccttcctgatccagctgcagatttgagcgtgaagcctcctgggcctttaatgttgcctttatgttacctgtctggccctgcagacattacagttctcaaagcctctcaagacggactaattatagcttaattccacgttaacttgggcaacttgccacctaaactatatactattgtcgacactaat

SEQ ID NO: 299730 - DNA, 500 bp, Homo sapiens
ctctctagtgcttcagcagtttgtcaaataatatggtgccccctatcctaatcctagtttcttttctctgagaatgctctagttcatcagttactgtgaattttacccctgaccacgcacgagagcgccaatgtgatctggctggtgtagggaagtcctaactcataatctcttcttgcaatctgaggtccttcctgatccagctgcagatttgagcgtgaagcctcctgggcctttaatgttgcctttatgttacctgtctggccctgcagacattacagttctcaaagcctctcaagacggactaattatagcttaattccacgttaacttgggcaacttgccacctaaactatatactattgtcgacactaatttgactcctggaatttttacctgcgctgctctaacccccaggtgtttgggaactgagctctctgttcccctgtccttgtgttcctttctcgatttgttgaaataaatacaagaccttgacattt

SEQ ID NO: 299731 - DNA, 4668 bp, Homo sapiens
  misc_feature (93)..(93): n is a, c, g, or t
  misc_feature (307)..(307): n is a, c, g, or t
gaactctgcatcccctaagagtcctctgttcctcccatgtcaggtggctctcagagtacagggaccttggcaggtggagaggaggatggggancagcagctgggcagcccccagggctcctcctccagtgagctcacatcagagcacctcacagagcaatagccgtcctcagatgctcagcaaagttgtggcagtttgcatttctagggtaaactaactaggaaggatgtcgtgaaatggactatgcaagagtaagtttgtgtgtttcgccttaatctgaggcagagacacagcagaacctgagganaaaagcaggtggaaggtgacggttagatggtaagccatgggcttgtcctggaactgcttcaactcagtggcttaaaatgagaactgcccaggtgagcatggagcatctcctaggctcgaggacatctctggagaatcatctggaaggtttatactgtgccttcccctcgtagcaaaaaggaagattgttcatggcctttaaggaaggctgagatcactcacacacagcgcccccccaccccagagaaaccgagtcagcctacatgacttccaaggggacctggggccagataagccctgccccggtgagaccaaatgagctggagcatgtatggaggtgcggaccctgcagtcagtttgcgagtgtggaggacccgagacatcctgtaaaggcaacttggtctccctcccactcacctgccaacattgctgcaatacacatggtttatctgaaattccaaggccagagtgcacatcagctcacatgactggcaactctaaatagagagccctaatggactgaggcaggaaacgtctaaaagctcaatctgctgtatgtcatgaccccttaggttgggtttatgccacatcggtcattttgaagtaggtgtttgatgccagctcagagactgtctcaggagtgcctccctggcctgggtagctaccctggaggtcatctccctgttctctgttggataaaggaacctcccccatctgtgacattcccttgggcccaggcttatgacctgcaccttttctgacacctgcccccaaagcacaggatgtgaattggtctctctccagataccccacgaggaagcaccttggacattctgcacatgataataatgcaacagagtcccccattgctgagagatactaacccgtgagaaacaagtatgctctcagctggtattgaactggtgggagaaactgcctcctacttttataatactgaattattcacaaaaaacctggtctgctctccaaaatgagagcatgttcctgggagccacatggggaccatccccagctgcctgctcctggtacctcccccatgatcatgcacagaccgtagagtcgagtcatctcgcagatccagaccatctcctctcattctcactctaaaaatgctggtggcccgcacatgacagcaactccccgaagccttccctttggaatcccatagaatgttctgcaatgattgggtccatcttgctgctcagaagaatcccgtcctgctctctagtgtggtgggatgaacttcaggcaacaaacaactggcagggttcccagttcctggagttatggagcagaaacacccaggcctagcagaattgtggctgaaacctggtgcccaaattccacaccctggaaatgtgtcaactgcccgtcagcctggattcaattctgagggctaagccacgaccttatccatgagtggcgaagacacccctgaggaaaggattgcttgcacctcacatctgtcttcttctaagattactcggagattttcaaacaacatctgagaacagaagccccctcccctactcagagaggaacgagggtggcccacctctcaagggccttggattcctgggaccaccctttgctgggaggaagaatccacaccgaatccttctgtcttcatggcctgctgtgctgaaacagaacagcaggttccatctttcacatctttttttctcccccagatgaaagacgactcaggaacggtagggctgggcagaggtgtctctccttgagagacaacaaaagcttctaagggagggagcttaaaggctgctagaaacctagcccaaccatccactcctgatctgagacagaaccttctccgccactcttcctgcaatcagtgtgaaattccagcttctttgattcccacttagcagtatgctccaatcacgttgctggcaaggcattttagagtttggagctgaggttcaaagccccctgcatttctctactggcaggccctggtgaaggaagacactttcagggaagaggctcttacagtctatggtggtagccatcttcacatccagtcaccagttgcatctagggagctgctggctataaaagggatcatccagtggagttgtaaacaagggaaccatcttgcaagatctaggaagaggaaggggagggatgtggactgggtctgatcacagcccttggccctgcttcatactttggagcttattaagatcaattttgataaccatgtaatttcttagaaccatggcaggtagtattgtgctttaaaaaccagaggctcctgaaagtcgtttacaccaggtggattgataccatggctgtagctgatgcaactaacaagtactggggccagtgatcacaatccagggttggaaacaggagtgaagcccaccagcctgcctggttgatggacagcaggctctgccttctggaggcggcttatatcccaacagcctgaggcagggctctgtggcccaggccagcagtggctgcctctcttggttctgcatggtacattttgccaaccctgaggaccagttcttggggttccaggcctcggccttcctgctccacgtgctcaagcccccacatggggctgcgacaccatctggctcctcacagggaggtccagccatgttctctgggctcccagtgagccccctgccctccagctacccccagaatccatccttcattcctccaccaagctcctgtgtgagctgcagcacccacacgggggaagccctgcactccagcagcatcttccagccttggcacagaactgatggcaaaggaagggctgggttttcagcttctgggacccgaggaagaccccacctcactcctccttccccagtacatcagactggttaggaggcatcccagaaggggcagcctcatgcccaggtttcagccctaaaggtaatgattgtcttgactctgccttggcatttcgctcggaatcacggcagacttggagtgtttcttcaaggcaggcatctgcttatgagcaaggtcaaagatttttcaaaatattgtgcattaattcattaaagctactgttaaatatttgctgtttttagattggcgtccgtgctaattctgcagttgtagcactgtatattttatctcatttctgtgccaagaaagttcatctttatgtttttctaatacacaatcttgatcatgtttccaaaataaagcttcagctccttggtcaatagaagtaagggtgtagccatccagggtctcccggctctaggcagaccggatcccgcagttcatcccatggttgttgaaatgtacctcgatcagtcatctctggtattcctcactctagccatgagccattgccatcttatgggcccgatttgggtactctgaattatgtcatggagtagacagttacttctaaatcccagcaaccaagttgcgtatccttccttatagctagtttctatagagaagtgaaaaagaaatctggcttccttaataagatagttgagcctatgacattaaggagcagcgctgctggcggaagattctagattcactggtggtttaagaggcccagggatttagttcttactggtgcgtaagtgttttcccatcctaaccggaaaaccactcacccaggcttcccccacttcccctcaaattttctcagctctgccgctggtctccatgaacggcaaggggaaccaccactcattcactgtcagtgtaggtaagacagaggatgcccttgcaaaaattgggactgaggacagtagcacacggaatggtggatcgtacatttgcacccagagctactaaacgctcagtgaccccagagaccattaatttcccggagtgaaggggatgggggtagagctaattggaatttttattatccaggactcatcctaagaagaatgttggcctctcttcatccctggcttagccgtcaggtagaacgcttactcacctgacaccgacttcttagagaagcgagtcttttttgaatggaggagcgatggtaaccccactagggggcgcccatgatcggctcccagtgcacccccttaagggtaagcaggccacatatctagagtctgatagtctgtgtgtacataaggtctagaagtctgtggaaacgccctgaaacctgtagtattatcttaactaccctcttatgttaaggtttacataataggatttttaaacaaatgtgtttaattttttaagatctcttgtattaaaattttcttttggaataagctgtggaaattttgttacaacctggttgagatcaacctctttacaatgacacaaattgtgacattttataaattagatacttcagtg

SEQ ID NO: 299732 - DNA, 3822 bp, Homo sapiens
  misc_feature (93)..(93): n is a, c, g, or t
  misc_feature (307)..(307): n is a, c, g, or t
gaactctgcatcccctaagagtcctctgttcctcccatgtcaggtggctctcagagtacagggaccttggcaggtggagaggaggatggggancagcagctgggcagcccccagggctcctcctccagtgagctcacatcagagcacctcacagagcaatagccgtcctcagatgctcagcaaagttgtggcagtttgcatttctagggtaaactaactaggaaggatgtcgtgaaatggactatgcaagagtaagtttgtgtgtttcgccttaatctgaggcagagacacagcagaacctgagganaaaagcaggtggaaggtgacggttagatggtaagccatgggcttgtcctggaactgcttcaactcagtggcttaaaatgagaactgcccaggtgagcatggagcatctcctaggctcgaggacatctctggagaatcatctggaaggtttatactgtgccttcccctcgtagcaaaaaggaagattgttcatggcctttaaggaaggctgagatcactcacacacagcgcccccccaccccagagaaaccgagtcagcctacatgacttccaaggggacctggggccagataagccctgccccggtgagaccaaatgagctggagcatgtatggaggtgcggaccctgcagtcagtttgcgagtgtggaggacccgagacatcctgtaaaggcaacttggtctccctcccactcacctgccaacattgctgcaatacacatggtttatctgaaattccaaggccagagtgcacatcagctcacatgactggcaactctaaatagagagccctaatggactgaggcaggaaacgtctaaaagctcaatctgctgtatgtcatgaccccttaggttgggtttatgccacatcggtcattttgaagtaggtgtttgatgccagctcagagactgtctcaggagtgcctccctggcctgggtagctaccctggaggtcatctccctgttctctgttggataaaggaacctcccccatctgtgacattcccttgggcccaggcttatgacctgcaccttttctgacacctgcccccaaagcacaggatgtgaattggtctctctccagataccccacgaggaagcaccttggacattctgcacatgataataatgcaacagagtcccccattgctgagagatactaacccgtgagaaacaagtatgctctcagctggtattgaactggtgggagaaactgcctcctacttttataatactgaattattcacaaaaaacctggtctgctctccaaaatgagagcatgttcctgggagccacatggggaccatccccagctgcctgctcctggtacctcccccatgatcatgcacagaccgtagagtcgagtcatctcgcagatccagaccatctcctctcattctcactctaaaaatgctggtggcccgcacatgacagcaactccccgaagccttccctttggaatcccatagaatgttctgcaatgattgggtccatcttgctgctcagaagaatcccgtcctgctctctagtgtggtgggatgaacttcaggcaacaaacaactggcagggttcccagttcctggagttatggagcagaaacacccaggcctagcagaattgtggctgaaacctggtgcccaaattccacaccctggaaatgtgtcaactgcccgtcagcctggattcaattctgagggctaagccacgaccttatccatgagtggcgaagacacccctgaggaaaggattgcttgcacctcacatctgtcttcttctaagattactcggagattttcaaacaacatctgagaacagaagccccctcccctactcagagaggaacgagggtggcccacctctcaagggccttggattcctgggaccaccctttgctgggaggaagaatccacaccgaatccttctgtcttcatggcctgctgtgctgaaacagaacagcaggttccatctttcacatctttttttctcccccagatgaaagacgactcaggaacggtagggctgggcagaggtgtctctccttgagagacaacaaaagcttctaagggagggagcttaaaggctgctagaaacctagcccaaccatccactcctgatctgagacagaaccttctccgccactcttcctgcaatcagtgtgaaattccagcttctttgattcccacttagcagtatgctccaatcacgttgctggcaaggcattttagagtttggagctgaggttcaaagccccctgcatttctctactggcaggccctggtgaaggaagacactttcagggaagaggctcttacagtctatggtggtagccatcttcacatccagtcaccagttgcatctagggagctgctggctataaaagggatcatccagtggagttgtaaacaagggaaccatcttgcaagatctaggaagaggaaggggagggatgtggactgggtctgatcacagcccttggccctgcttcatactttggagcttattaagatcaattttgataaccatgtaatttcttagaaccatggcaggtagtattgtgctttaaaaaccagaggctcctgaaagtcgtttacaccaggtggattgataccatggctgtagctgatgcaactaacaagtactggggccagtgatcacaatccagggttggaaacaggagtgaagcccaccagcctgcctggttgatggacagcaggctctgccttctggaggcggcttatatcccaacagcctgaggcagggctctgtggcccaggccagcagtggctgcctctcttggttctgcatggtacattttgccaaccctgaggaccagttcttggggttccaggcctcggccttcctgctccacgtgctcaagcccccacatggggctgcgacaccatctggctcctcacagggaggtccagccatgttctctgggctcccagtgagccccctgccctccagctacccccagaatccatccttcattcctccaccaagctcctgtgtgagctgcagcacccacacgggggaagccctgcactccagcagcatcttccagccttggcacagaactgatggcaaaggaagggctgggttttcagcttctgggacccgaggaagaccccacctcactcctccttccccagtacatcagactggttaggaggcatcccagaaggggcagcctcatgcccaggtttcagccctaaaggtaatgattgtcttgactctgccttggcatttcgctcggaatcacggcagacttggagtgtttcttcaaggcaggcatctgcttatgagcaaggtcaaagatttttcaaaatattgtgcattaattcattaaagctactgttaaatatttgctgtttttagattggcgtccgtgctaattctgcagttgtagcactgtatattttatctcatttctgtgccaagaaagttcatctttatgtttttctaatacacaatcttgatcatgtttccaaaataaagcttcagctccttggtcaatagaagtaagggtgtagccatccagggtctcccggctctaggcagaccggatcccgcagttcatcccatggttgttgaaatgtacctcgatcagtcatctctggtattcctcactctagccatgagccattgccatcttatgggcccgatttgggtactctgaattatgtcatggagtagacagttacttctaaatcccagcaaccaagttgcgtatccttccttatagctatcctcttcaacaatatactctccggacaatgaactgcttgggctgttt

SEQ ID NO: 299733 - DNA, 3670 bp, Homo sapiens
aaagagtcaaggcttagtaatattcctgaattcctgaaggagttaagaaaggaaaaggacaagcgggggtctaaacgagagcacgaaccctcagcgtatgacggctccaggctccgggggaaagtcctttagccatccatcccaaaattaagcacgctgggagctggagtcacagcagtgataaaacgaacaatgattctggttcctactgactgacaggagaggtttaagggtctctcactctccggggagcccctttccttcctggctgcggagggcggagcccgagagaggcacgcatgcgcaatgcaacgtctgccttaggcccggaacttcggtgcctgggcgcagcggtgcacccggacccggaacattctcaggcgaaagtgtctcttgcgtgcgtgggccggaggttagtgtgcggggcccgccgggcggttgaaaagtccgagagaatcaggatggaggccgtggcgacggcgacggcggcgaaggaacccgataagggctgcatagagcctggacctgggcactggggtgagctgagccggacaccagtcccatctaaaccccaggacaaagtggaagcagctgaggcaacaccagtggccctggacagtgacacctccggggctgaaaatgcagcagtgagtgctatgctgcacgctgtagccgccagccgcctgcctgtttgcagccagcagcagggtgaacccgacttgacagagcatgagaaagtggccatcctggcccagctgtaccacgagaagccactggtgttcctggagcgcttccgcacaggcctccgtgaggagcatctggcctgctttggccacgtgcgtggcgaccaccgtgcagacttctactgtgctgaggtggcccggcagggcactgcccggccccgcaccctgcgtacccgcctgcgtaaccggcgctatgctgccctgcgagagctgatccaagggggcgagtacttcagtgatgagcagatgcggttccgggcccccctgctatatgagcagtacatcgggcagtatctcacccaggaggagctcagtgcccgcaccccaacccaccagccccccaagcccgggtcccccgggagacctgcttgcccgctctccaacttgctgctccagtcctacgaggagcgggagctacagcagcgtctgctccaacagcaggaggaggaggaggcctgcttggaggaagaggaagaggaggaggacagtgacgaggaagaccagaggtcaggcaaggactcggaggcctgggttcccgactcggaggagaggctgatcctgcgagaggagttcaccagccgcatgcaccagcgcttcctagatggcaaggacggggactttgactacagcacagtagacgacaaccccgacttcgacaacctcgacatcgtggcacgggatgaggaggagaggtactttgatgaggaagaacctgaggatgcgcccagcccagagctggatggggactgatggccgccacccttcccaccgcctgccccatccccatccccaacaaggcagctgattccaggcctgctcagtgaccctttctctagggggacatcagggcagtgccccacaacccacacacaccaccatctcactgggtctagtctcatctcagacaacccccacccccactgtttctggggttccctttctcatctctcccaccctgtctcctgcctctgtctttcttggtgtctgtctgggcttctttctgtctctttctgtctttctgtctctctccctacccccgctccctctttccagtgctctggctggctgtctctccctttctccccctctctctctgccttaggctctgtctccaccgcagggcccaaggtgaaagtcctccccttgccggaggccagctggcagggcctttcgtggctggaagtggccagtttggttccggtgctgacccctaggccccagcgcagctgcctcccgtgctgtctgtctccccctctctgtttatgtctgcgctgtgtctcacactcagagcctccttgcttctgttaggttcccatctctccttctgcctcactctgggcctcttctttctacttgtacatttccacctctctaggcctctgctctcactgtccctctctgtctgtctctcagcctttatctctgggttttgatcccccactccaggctctgggccccttcttcccccttccctcaaacctggctgctataggcagcagaaccctgaccactgagtaatacagccccaggggagggaggagaccccaggcagggaggatgggggcagctctcttctctccccaggacccaggctgtggatcacggggcctgccagcttgagtgtagagggaggggggactctacccttctcagccccaccagcccccctctgcccaaccacaattttcccttcctccgccttcctctccctctcctgtttacactccccaaatgcgcacaggctgttatcatgggtcctgagtcatcccacacacagcctgccccagcgtccctgcccccagctggccgcagggcccgccccatggagccccctgccgccctgggctaatgggagccagatggccgcctggtgactcagccaccgggcctgtgggaacccaggcgtcccgccttcccatgcccccacacccggctcctgctcccccagcagacacacacaggagggcctggccactgttgagggggcacacagggcaagggtcaccaagtcggggcctagggactcctcatgcctctgagatggaatggtggtatcctgccgtggccaagcctgaaggaccctcaaaactgcctcctggagtccacggttcctgacctccgagcctcagctatgccctctgggtcaaccagaattagagccagacagggaaagtgagagctggatggaggcagacaagatgctcagagcgactattaaagaacgaaagcctctgctacggagcgcttctgtcctctgtcaggcccgagcgaagtgcctgacaccgggttggatcctcagatggccccatgaactagtgaagtgggtcaaaggaggcctggaaagatgttgcttcctcaaggccactcggccatcagaggcagaaatgaaacaggaacccaggcctagaatcacaaaggtcctagaaaccacttggctgtctggcctctcaggtgtcagggccatccagagtgagacagcattggagggacaagtgtgcatgcagatgtcctcagacgggaaggtttgagaagggtcagatggtaggcgggcctaacaagggctccgtgctagccactgtcccgcacacagacaggatcaggtcatcttgatatggagatcagtccccaaatcactgaattgtcccagcagtgctatgccctaggtactaccaatatcactcctctatttcccagaggaggaagcagcagctagactccaggaccttggggtcatatctctcagaaagccaagagtgcaggatgagagctgtctgtctcttacctgcctgtatttgtgccccatttttaaagagcagagggcctgggccacaggaaaggtatcagcccttggtgataggcacattttttaccagtctatcatttggtcattaaatttgtttacaatatactttgctatacgtaaattt

SEQ ID NO: 299734 - DNA, 3409 bp, Homo sapiens
cttctacctgcctcatgcaaacttatcccaatctaacgattccttcatttcattgtaactcccgtttcccccaaagtccgaaatccagccaggctcctttcaaagtccttactcaatttctgtgctttcccacaaccttcaaagtaatccgacgtcgggtgaggtgtgattggaagcgtggctccaacaccactggccaagaattggtaattgtggaagccagatggagatgattggtatatggaggctgcatagagcctggacctgggcactggggtgagctgagccggacaccagtcccatctaaaccccaggacaaagtggaagcagctgaggcaacaccagtggccctggacagtgacacctccggggctgaaaatgcagcagtgagtgctatgctgcacgctgtagccgccagccgcctgcctgtttgcagccagcagcagggtgaacccgacttgacagagcatgagaaagtggccatcctggcccagctgtaccacgagaagccactggtgttcctggagcgcttccgcacaggcctccgtgaggagcatctggcctgctttggccacgtgcgtggcgaccaccgtgcagacttctactgtgctgaggtggcccggcagggcactgcccggccccgcaccctgcgtacccgcctgcgtaaccggcgctatgctgccctgcgagagctgatccaagggggcgagtacttcagtgatgagcagatgcggttccgggcccccctgctatatgagcagtacatcgggcagtatctcacccaggaggagctcagtgcccgcaccccaacccaccagccccccaagcccgggtcccccgggagacctgcttgcccgctctccaacttgctgctccagtcctacgaggagcgggagctacagcagcgtctgctccaacagcaggaggaggaggaggcctgcttggaggaagaggaagaggaggaggacagtgacgaggaagaccagaggtcaggcaaggactcggaggcctgggttcccgactcggaggagaggctgatcctgcgagaggagttcaccagccgcatgcaccagcgcttcctagatggcaaggacggggactttgactacagcacagtagacgacaaccccgacttcgacaacctcgacatcgtggcacgggatgaggaggagaggtactttgatgaggaagaacctgaggatgcgcccagcccagagctggatggggactgatggccgccacccttcccaccgcctgccccatccccatccccaacaaggcagctgattccaggcctgctcagtgaccctttctctagggggacatcagggcagtgccccacaacccacacacaccaccatctcactgggtctagtctcatctcagacaacccccacccccactgtttctggggttccctttctcatctctcccaccctgtctcctgcctctgtctttcttggtgtctgtctgggcttctttctgtctctttctgtctttctgtctctctccctacccccgctccctctttccagtgctctggctggctgtctctccctttctccccctctctctctgccttaggctctgtctccaccgcagggcccaaggtgaaagtcctccccttgccggaggccagctggcagggcctttcgtggctggaagtggccagtttggttccggtgctgacccctaggccccagcgcagctgcctcccgtgctgtctgtctccccctctctgtttatgtctgcgctgtgtctcacactcagagcctccttgcttctgttaggttcccatctctccttctgcctcactctgggcctcttctttctacttgtacatttccacctctctaggcctctgctctcactgtccctctctgtctgtctctcagcctttatctctgggttttgatcccccactccaggctctgggccccttcttcccccttccctcaaacctggctgctataggcagcagaaccctgaccactgagtaatacagccccaggggagggaggagaccccaggcagggaggatgggggcagctctcttctctccccaggacccaggctgtggatcacggggcctgccagcttgagtgtagagggaggggggactctacccttctcagccccaccagcccccctctgcccaaccacaattttcccttcctccgccttcctctccctctcctgtttacactccccaaatgcgcacaggctgttatcatgggtcctgagtcatcccacacacagcctgccccagcgtccctgcccccagctggccgcagggcccgccccatggagccccctgccgccctgggctaatgggagccagatggccgcctggtgactcagccaccgggcctgtgggaacccaggcgtcccgccttcccatgcccccacacccggctcctgctcccccagcagacacacacaggagggcctggccactgttgagggggcacacagggcaagggtcaccaagtcggggcctagggactcctcatgcctctgagatggaatggtggtatcctgccgtggccaagcctgaaggaccctcaaaactgcctcctggagtccacggttcctgacctccgagcctcagctatgccctctgggtcaaccagaattagagccagacagggaaagtgagagctggatggaggcagacaagatgctcagagcgactattaaagaacgaaagcctctgctacggagcgcttctgtcctctgtcaggcccgagcgaagtgcctgacaccgggttggatcctcagatggccccatgaactagtgaagtgggtcaaaggaggcctggaaagatgttgcttcctcaaggccactcggccatcagaggcagaaatgaaacaggaacccaggcctagaatcacaaaggtcctagaaaccacttggctgtctggcctctcaggtgtcagggccatccagagtgagacagcattggagggacaagtgtgcatgcagatgtcctcagacgggaaggtttgagaagggtcagatggtaggcgggcctaacaagggctccgtgctagccactgtcccgcacacagacaggatcaggtcatcttgatatggagatcagtccccaaatcactgaattgtcccagcagtgctatgccctaggtactaccaatatcactcctctatttcccagaggaggaagcagcagctagactccaggaccttggggtcatatctctcagaaagccaagagtgcaggatgagagctgtctgtctcttacctgcctgtatttgtgccccatttttaaagagcagagggcctgggccacaggaaaggtatcagcccttggtgataggcacattttttaccagtctatcatttggtcattaaatttgtttacaatatactttgctatacgtaaattt

SEQ ID NO: 299735 - DNA, 3649 bp, Homo sapiens
aaagagtcaaggcttagtaatattcctgaattcctgaaggagttaagaaaggaaaaggacaagcgggggtctaaacgagagcacgaaccctcagcgtatgacggctccaggctccgggggaaagtcctttagccatccatcccaaaattaagcacgctgggagctggagtcacagcagtgataaaacgaacaatgattctggttcctactgactgacaggagaggtttaagggtctctcactctccggggagcccctttccttcctggctgcggagggcggagcccgagagaggcacgcatgcgcaatgcaacgtctgccttaggcccggaacttcggtgcctgggcgcagcggtgcacccggacccggaacattctcaggcgaaagtgtctcttgcgtgcgtgggccggaggttagtgtgcggggcccgccgggcggttgaaaagtccgagagaatcaggatggaggccgtggcgacggcgacggcggcgaaggaacccgataagggctgcatagagcctggacctgggcactggggtgagctgagccggacaccagtcccatctaaaccccaggacaaagtggaagcagctgaggcaacaccagtggccctggacagtgacacctccggggctgaaaatgcagcagtgagtgctatgctgcacgctgtagccgccagccgcctgcctgtttgcagccagcagcagggtgaacccgacttgacagagcatgagaaagtggccatcctggcccagctgtaccacgagaagccactggtgttcctggagcgcttccgcacaggcctccgtgaggagcatctggcctgctttggccacgtgcgtggcgaccaccgtgcagacttctactgtgctgaggtggcccggcagggcactgcccggccccgcaccctgcgtacccgcctgcgtaaccggcgctatgctgccctgcgagagctgatccaagggggcgagtacttcagtgatgagcagatgcggttccgggcccccctgctatatgagcagtacatcgggcagtatctcacccaggaggagctcagtgcccgcaccccaacccaccagccccccaagcccgggtcccccgggagacctgcttgcccgctctccaacttgctgctccagtcctacgaggagcgggagctacagcagcgtctgctccaacagcaggaggaggaggaggcctgcttggaggaagaggaagaggaggaggacagtgacgaggaagaccagaggtcaggcaaggactcggaggcctgggttcccgactcggaggagaggctgatcctgcgagaggagttcaccagccgcatgcaccagcgcttcctagatggcaaggacggggactttgactacagcacagtagacgacaaccccgacttcgacaacctcgacatcgtggcacgggatgaggaggagaggtactttgatgaggaagaacctgaggatgcgcccagcccagagctggatggggactgatggccgccacccttcccaccgcctgccccatccccatccccaacaaggcagctgattccaggcctgctcagtgaccctttctctagggggacatcagggcagtgccccacaacccacacacaccaccatctcactgggtctagtctcatctcagacaacccccacccccactgtttctggggttccctttctcatctctcccaccctgtctcctgcctctgtctttcttggtgtctgtctgggcttctttctgtctctttctgtctttctgtctctctccctacccccgctccctctttccagtgctctggctggctgtctctccctttctccccctctctctctgccttaggctctgtctccaccgcagggcccaaggtgaaagtcctccccttgccggaggccagctggcagggcctttcgtggctggaagtggccagtttggttccggtgctgacccctaggccccagcgcagctgcctcccgtgctgtctgtctccccctctctgtttatgtctgcgctgtgtctcacactcagagcctccttgcttctgttaggttcccatctctccttctgcctcactctgggcctcttctttctacttgtacatttccacctctctaggcctctgctctcactgtccctctctgtctgtctctcagcctttatctctgggttttgatcccccactccaggctctgggccccttcttcccccttccctcaaacctggctgctataggcagcagaaccctgaccactgagtaatacagccccaggggagggaggagaccccaggcagggaggatgggggcagctctcttctctccccaggacccaggctgtggatcacggggcctgccagcttgagtgtagagggaggggggactctacccttctcagccccaccagcccccctctgcccaaccacaattttcccttcctccgccttcctctccctctcctgtttacactccccaaatgcgcacaggctgttatcatgggtcctgagtcatcccacacacagcctgccccagcgtccctgcccccagctggccgcagggcccgccccatggagccccctgccgccctgggctaatgggagccagatggccgcctggtgactcagccaccgggcctgtgggaacccaggcgtcccgccttcccatgcccccacacccggctcctgctcccccagcagacacacacaggagggcctggccactgttgagggggcacacagggcaagggtcaccaagtcggggcctagggactcctcatgcctctgagatggaatggtggtatcctgccgtggccaagcctgaaggaccctcaaaactgcctcctggagtccacggttcctgacctccgagcctcagctatgccctctgggtcaaccagaattagagccagacagggaaagtgagagctggatggaggcagacaagatgctcagagcgactattaaagaacgaaagcctctgctacggagcgcttctgtcctctgtcaggcccgagcgaagtgcctgacaccgggttggatcctcagatggccccatgaactagtgaagtgggtcaaaggaggcctggaaagatgttgcttcctcaaggccactcggccatcagaggcagaaatgaaacaggaacccaggcctagaatcacaaaggtcctagaaaccacttggctgtctggcctctcaggtgtcagggccatccagagtgagacagcattggagggacaagtgtgcatgcagatgtcctcagacgggaaggtttgagaagggtcagatggtaggcgggcctaacaagggctccgtgctagccactgtcccgcacacagacaggatcaggtcatcttgatatggagatcagtccccaaatcactgaattgtcccagcagtgctatgccctaggtactaccaatatcactcctctatttcccagaggaggaagcagcagctagactccaggaccttggggtcatatctctcagaaagccaagagtgcaggatgagagctgtctgtctcttacctgcctgtatttgtgccccatttttaaagagcagagggcctgggccacaggaaaggtatcagcccttggtgataggcacattttttaccagtctatcatttggtcattaaatttgtttacaata

SEQ ID NO: 299736 - DNA, 4002 bp, Homo sapiens
  misc_feature (3976)..(3976): n is a, c, g, or t
aaagagtcaaggcttagtaatattcctgaattcctgaaggagttaagaaaggaaaaggacaagcgggggtctaaacgagagcacgaaccctcagcgtatgacggctccaggctccgggggaaagtcctttagccatccatcccaaaattaagcacgctgggagctggagtcacagcagtgataaaacgaacaatgattctggttcctactgactgacaggagaggtttaagggtctctcactctccggggagcccctttccttcctggctgcggagggcggagcccgagagaggcacgcatgcgcaatgcaacgtctgccttaggcccggaacttcggtgcctgggcgcagcggtgcacccggacccggaacattctcaggcgaaagtgtctcttgcgtgcgtgggccggaggttagtgtgcggggcccgccgggcggttgaaaagtccgagagaatcaggatggaggccgtggcgacggcgacggcggcgaaggaacccgataagggctgcatagagcctggacctgggcactggggtgagctgagccggacaccagtcccatctaaaccccaggacaaagtggaagcagctgaggcaacaccagtggccctggacagtgacacctccggggctgaaaatgcagcagtgagtgctatgctgcacgctgtagccgccagccgcctgcctgtttgcagccagcagcagggtgaacccgacttgacagagcatgagaaagtggccatcctggcccagctgtaccacgagaagccactggtgttcctggagcgcttccgcacaggcctccgtgaggagcatctggcctgctttggccacgtgcgtggcgaccaccgtgcagacttctactgtgctgaggtggcccggcagggcactgcccggccccgcaccctgcgtacccgcctgcgtaaccggcgctatgctgccctgcgagagctgatccaagggggcgagtacttcagtgatgagcagatgcggttccgggcccccctgctatatgagcagtacatcgggcagtatctcacccaggaggagctcagtgcccgcaccccaacccaccagccccccaagcccgggtcccccgggagacctgcttgcccgctctccaacttgctgctccagtcctacgaggagcgggagctacagcagcgtctgctccaacagcaggaggaggaggaggcctgcttggaggaagaggaagaggaggaggacagtgacgaggaagaccagaggtcaggcaaggactcggaggcctgggttcccgactcggaggagaggctgatcctgcgagaggagttcaccagccgcatgcaccagcgcttcctagatggcaaggacggggactttgactacagcacagtagacgacaaccccgacttcgacaacctcgacatcgtggcacgggatgaggaggagaggtactttgatgaggaagaacctgaggatgcgcccagcccagagctggatggggactgatggccgccacccttcccaccgcctgccccatccccatccccaacaaggcagctgattccaggcctgctcagtgaccctttctctagggggacatcagggcagtgccccacaacccacacacaccaccatctcactgggtctagtctcatctcagacaacccccacccccactgtttctggggttccctttctcatctctcccaccctgtctcctgcctctgtctttcttggtgtctgtctgggcttctttctgtctctttctgtctttctgtctctctccctacccccgctccctctttccagtgctctggctggctgtctctccctttctccccctctctctctgccttaggctctgtctccaccgcagggcccaaggtgaaagtcctccccttgccggaggccagctggcagggcctttcgtggctggaagtggccagtttggttccggtgctgacccctaggccccagcgcagctgcctcccgtgctgtctgtctccccctctctgtttatgtctgcgctgtgtctcacactcagagcctccttgcttctgttaggttcccatctctccttctgcctcactctgggcctcttctttctacttgtacatttccacctctctaggcctctgctctcactgtccctctctgtctgtctctcagcctttatctctgggttttgatcccccactccaggctctgggccccttcttcccccttccctcaaacctggctgctataggcagcagaaccctgaccactgagtaatacagccccaggggagggaggagaccccaggcagggaggatgggggcagctctcttctctccccaggacccaggctgtggatcacggggcctgccagcttgagtgtagagggaggggggactctacccttctcagccccaccagcccccctctgcccaaccacaattttcccttcctccgccttcctctccctctcctgtttacactccccaaatgcgcacaggctgttatcatgggtcctgagtcatcccacacacagcctgccccagcgtccctgcccccagctggccgcagggcccgccccatggagccccctgccgccctgggctaatgggagccagatggccgcctggtgactcagccaccgggcctgtgggaacccaggcgtcccgccttcccatgcccccacacccggctcctgctcccccagcagacacacacaggagggcctggccactgttgagggggcacacagggcaagggtcaccaagtcggggcctagggactcctcatgcctctgagatggaatggtggtatcctgccgtggccaagcctgaaggaccctcaaaactgcctcctggagtccacggttcctgacctccgagcctcagctatgccctctgggtcaaccagaattagagccagacagggaaagtgagagctggatggaggcagacaagatgctcagagcgactattaaagaacgaaagcctctgctacggagcgcttctgtcctctgtcaggcccgagcgaagtgcctgacaccgggttggatcctcagatggccccatgaactagtgaagtgggtcaaaggaggcctggaaagatgttgcttcctcaaggccactcggccatcagaggcagaaatgaaacaggaacccaggcctagaatcacaaaggtcctagaaaccacttggctgtctggcctctcaggtgtcagggccatccagagtgagacagcattggagggacaagtgtgcatgcagatgtcctcagacgggaaggtttgagaagggtcagatggtaggcgggcctaacaagggctccgtgctagccactgtcccgcacacagacaggatcaggtcatcttgatatggagatcagtccccaaatcactgaattgtcccagcagtgctatgccctaggtactaccaatatcactcctctatttcccagaggaggaagcagcagctagactccaggaccttggggtcatatctctcagaaagccaagagtgcaggatgagagctgtctgtctcttacctgcctgtatttgtgccccatttttaaagagcagagggcctgggccacaggaaaggtatcagcccttggtgataggcacattttttaccagtctatcatttggtcattaaatttgtttacaataaaaaaaaaaaaaaaaaaaactcgagtttttttttttttttttttttccaaatgtacaattttattttaacagatttcaagagtccattttttaaaaaatgagcactaaagaacctctatcagtgagactcctcattttatagcaaatacatttttgcagcttaaatattcttgaaacatatacgcttctgtcatttaaacaaacttccagagaaaactgggctcttatatttaagaacaaatttgacaaatacatatttatcatatatagatctctatataaaattaaatttgatcaaatgtgaacagaaactgtgtacaggatatngattattatttatacacgtttgggtg

SEQ ID NO: 299737 - DNA, 1501 bp, Homo sapiens
cctcgcagcccacacacttacggctaagtcgcacgcctgcgctgtgtactcaggccgcaggtataggcagcagaaccctgaccactgagtaatacagccccaggggagggaggagaccccaggcagggaggatgggggcagctctcttctctccccaggacccaggctgtggatcacggggcctgccagcttgagtgtagagggaggggggactctacccttctcagccccaccagcccccctctgcccaaccacaattttcccttcctccgccttcctctccctctcctgtttacactccccaaatgcgcacaggctgttatcatgggtcctgagtcatcccacacacagcctgccccagcgtccctgcccccagctggccgcagggcccgccccatggagccccctgccgccctgggctaatgggagccagatggccgcctggtgactcagccaccgggcctgtgggaacccaggcgtcccgccttcccatgcccccacacccggctcctgctcccccagcagacacacacaggagggcctggccactgttgagggggcacacagggcaagggtcaccaagtcggggcctagggactcctcatgcctctgagatggaatggtggtatcctgccgtggccaagcctgaaggaccctcaaaactgcctcctggagtccacggttcctgacctccgagcctcagctatgccctctgggtcaaccagaattagagccagacagggaaagtgagagctggatggaggcagacaagatgctcagagcgactattaaagaacgaaagcctctgctacggagcgcttctgtcctctgtcaggcccgagcgaagtgcctgacaccgggttggatcctcagatggccccatgaactagtgaagtgggtcaaaggaggcctggaaagatgttgcttcctcaaggccactcggccatcagaggcagaaatgaaacaggaacccaggcctagaatcacaaaggtcctagaaaccacttggctgtctggcctctcaggtgtcagggccatccagagtgagacagcattggagggacaagtgtgcatgcagatgtcctcagacgggaaggtttgagaagggtcagatggtaggcgggcctaacaagggctccgtgctagccactgtcccgcacacagacaggatcaggtcatcttgatatggagatcagtccccaaatcactgaattgtcccagcagtgctatgccctaggtactaccaatatcactcctctatttcccagaggaggaagcagcagctagactccaggaccttggggtcatatctctcagaaagccaagagtgcaggatgagagctgtctgtctcttacctgcctgtatttgtgccccatttttaaagagcagagggcctgggccacaggaaaggtatcagcccttggtgataggcacattttttaccagtctatcatttggtcattaaatttgtttacaatatactttgctatacgtaaattt

SEQ ID NO: 299738 - DNA, 1927 bp, Homo sapiens
aaagagtcaaggcttagtaatattcctgaattcctgaaggagttaagaaaggaaaaggacaagcgggggtctaaacgagagcacgaaccctcagcgtatgacggctccaggctccgggggaaagtcctttagccatccatcccaaaattaagcacgctgggagctggagtcacagcagtgataaaacgaacaatgattctggttcctactgactgacaggagaggtttaagggtctctcactctccggggagcccctttccttcctggctgcggagggcggagcccgagagaggcacgcatgcgcaatgcaacgtctgccttaggcccggaacttcggtgcctgggcgcagcggtgcacccggacccggaacattctcaggcgaaagtgtctcttgcgtgcgtgggccggaggttagtgtgcggggcccgccgggcggttgaaaagtccgagagaatcaggatggaggccgtggcgacggcgacggcggcgaaggaacccgataagggctgcatagagcctggacctgggcactggggtgagctgagccggacaccagtcccatctaaaccccaggacaaagtggaagcagctgaggcaacaccagtggccctggacagtgacacctccggggctgaaaatgcagcagtgagtgctatgctgcacgctgtagccgccagccgcctgcctgtttgcagccagcagcagggtgaacccgacttgacagagcatgagaaagtggccatcctggcccagctgtaccacgagaagccactggtgttcctggagcgcttccgcacaggcctccgtgaggagcatctggcctgctttggccacgtgcgtggcgaccaccgtgcagacttctactgtgctgaggtggcccggcagggcactgcccggccccgcaccctgcgtacccgcctgcgtaaccggcgctatgctgccctgcgagagctgatccaagggggcgagtacttcagtgatgagcagatgcggttccgggcccccctgctatatgagcagtacatcgggcagtatctcacccaggaggagctcagtgcccgcaccccaacccaccagccccccaagcccgggtcccccgggagacctgcttgcccgctctccaacttgctgctccagtcctacgaggagcgggagctacagcagcgtctgctccaacagcaggaggaggaggaggcctgcttggaggaagaggaagaggaggaggacagtgacgaggaagaccagaggtcaggcaaggactcggaggcctgggttcccgactcggaggagaggctgatcctgcgagaggagttcaccagccgcatgcaccagcgcttcctagatggcaaggacggggactttgactacagcacagtagacgacaaccccgacttcgacaacctcgacatcgtggcacgggatgaggaggagaggtactttgatgaggaagaacctgaggatgcgcccagcccagagctggatggggactgatggccgccacccttcccaccgcctgccccatccccatccccaacaaggcagctgattccaggcctgctcagtgaccctttctctagggggacatcagggcagtgccccacaacccacacacaccaccatctcactgggtctagtctcatctcagacaacccccacccccactgtttctggggttccctttctcatctctcccaccctgtctcctgcctctgtctttcttggtgtctgtctgggcttctttctgtctctttctgtctctcagaaagccaagagtgcaggatgagagctgtctgtctcttacctgcctgtatttgtgccccatttttaaagagcagagggcctgggccacaggaaaggtatcagcccttggtgataggcacattttttaccagtctatcatttggtcattaaatttgtttacaata

SEQ ID NO: 299739 - DNA, 1835 bp, Homo sapiens
aaagagtcaaggcttagtaatattcctgaattcctgaaggagttaagaaaggaaaaggacaagcgggggtctaaacgagagcacgaaccctcagcgtatgacggctccaggctccgggggaaagtcctttagccatccatcccaaaattaagcacgctgggagctggagtcacagcagtgataaaacgaacaatgattctggttcctactgactgacaggagaggtttaagggtctctcactctccggggagcccctttccttcctggctgcggagggcggagcccgagagaggcacgcatgcgcaatgcaacgtctgccttaggcccggaacttcggtgcctgggcgcagcggtgcacccggacccggaacattctcaggcgaaagtgtctcttgcgtgcgtgggccggaggttagtgtgcggggcccgccgggcggttgaaaagtccgagagaatcaggatggaggccgtggcgacggcgacggcggcgaaggaacccgataagggctgcatagagcctggacctgggcactggggtgagctgagccggacaccagtcccatctaaaccccaggacaaagtggaagcagctgaggcaacaccagtggccctggacagtgacacctccggggctgaaaatgcagcagtgagtgctatgctgcacgctgtagccgccagccgcctgcctgtttgcagccagcagcagggtgaacccgacttgacagagcatgagaaagtggccatcctggcccagctgtaccacgagaagccactggtgttcctggagcgcttccgcacaggcctccgtgaggagcatctggcctgctttggccacgtgcgtggcgaccaccgtgcagacttctactgtgctgaggtggcccggcagggcactgcccggccccgcaccctgcgtacccgcctgcgtaaccggcgctatgctgccctgcgagagctgatccaagggggcgagtacttcagtgatgagcagatgcggttccgggcccccctgctatatgagcagtacatcgggcagtatctcacccaggaggagctcagtgcccgcaccccaacccaccagccccccaagcccgggtcccccgggagacctgcttgcccgctctccaacttgctgctccagtcctacgaggagcgggagctacagcagcgtctgctccaacagcaggaggaggaggaggcctgcttggaggaagaggaagaggaggaggacagtgacgaggaagaccagaggtcaggcaaggactcggaggcctgggttcccgactcggaggagaggctgatcctgcgagaggagttcaccagccgcatgcaccagcgcttcctagatggcaaggacggggactttgactacagcacagtagacgacaaccccgacttcgacaacctcgacatcgtggcacgggatgaggaggagatgtcctcagacgggaaggtttgagaagggtcagatggtaggcgggcctaacaagggctccgtgctagccactgtcccgcacacagacaggatcaggtcatcttgatatggagatcagtccccaaatcactgaattgtcccagcagtgctatgccctaggtactaccaatatcactcctctatttcccagaggaggaagcagcagctagactccaggaccttggggtcatatctctcagaaagccaagagtgcaggatgagagctgtctgtctcttacctgcctgtatttgtgccccatttttaaagagcagagggcctgggccacaggaaaggtatcagcccttggtgataggcacattttttaccagtctatcatttggtcattaaatttgtttacaata

SEQ ID NO: 299740 - DNA, 1819 bp, Homo sapiens
aaagagtcaaggcttagtaatattcctgaattcctgaaggagttaagaaaggaaaaggacaagcgggggtctaaacgagagcacgaaccctcagcgtatgacggctccaggctccgggggaaagtcctttagccatccatcccaaaattaagcacgctgggagctggagtcacagcagtgataaaacgaacaatgattctggttcctactgactgacaggagaggtttaagggtctctcactctccggggagcccctttccttcctggctgcggagggcggagcccgagagaggcacgcatgcgcaatgcaacgtctgccttaggcccggaacttcggtgcctgggcgcagcggtgcacccggacccggaacattctcaggcgaaagtgtctcttgcgtgcgtgggccggaggttagtgtgcggggcccgccgggcggttgaaaagtccgagagaatcaggatggaggccgtggcgacggcgacggcggcgaaggaacccgataagggctgcatagagcctggacctgggcactggggtgagctgagccggacaccagtcccatctaaaccccaggacaaagtggaagcagctgaggcaacaccagtggccctggacagtgacacctccggggctgaaaatgcagcagtgagtgctatgctgcacgctgtagccgccagccgcctgcctgtttgcagccagcagcagggtgaacccgacttgacagagcatgagaaagtggccatcctggcccagctgtaccacgagaagccactggtgttcctggagcgcttccgcacaggcctccgtgaggagcatctggcctgctttggccacgtgcgtggcgaccaccgtgcagacttctactgtgctgaggtggcccggcagggcactgcccggccccgcaccctgcgtacccgcctgcgtaaccggcgctatgctgccctgcgagagctgatccaagggggcgagtacttcagtgatgagcagatgcggttccgggcccccctgctatatgagcagtacatcgggcagtatctcacccaggaggagctcagtgcccgcaccccaacccaccagccccccaagcccgggtcccccgggagacctgcttgcccgctctccaacttgctgctccagtcctacgaggagcgggagctacagcagcgtctgctccaacagcaggaggaggaggaggcctgcttggaggaagaggaagaggaggaggacagtgacgaggaagaccagaggtcaggcaaggactcggaggcctgggttcccgactcggaggagaggctgatcctgcgagaggagttcaccagccgcatgcaccagcgcttcctagatggcaaggacggggactttgactacaggtgctcctgtgcctccacctccccatcccccagcccagcatcccacggcctttggtcacatgcagagcccttaacaagctgtgggggtctccctttgtggagctacaaggccccaaaacagttccaggatgtggggttgaacagccaaaggaagaggctgggtgacctcggactagccttgtccatctcagaccctcagtctcctcacctctaaggcaggggatggacagggatgacatatagctcagtatcaatgaaaccctgaaacacttccctcctggcaatggcagaggctactaccccaagccccccaagtctccctaggaagcccaacctcttccgcttcaccttggacctcctcatgctgcaggaagtaacccctggcaaagttcatgcccggcatggaggggcctgcactggctgcccccacagttacagttgttcatt

SEQ ID NO: 299741 - DNA, 762 bp, Homo sapiens
ccctctggctgcaacatggagtatattgtaggagggtaccattgcctgcagtgaggcgttaaggacgcagcatggatgagagatgaggaaagctgaaatgaaacagaggcaggagaaatggagaggaggacatggccttgaggaatttccaggacataaatttggcatcacttcttggaccatgagagggagagggagcaggaagaatcaaagatgaatccaagaatgaacaaatctaatttttgaaataatgcaatgaaaagtagaactggtctgttttcctaggagaggatggtgaaatagaggtagtttgtgtgatttgcccagagtcccatgaagaattcacagaagaattgagactacagtcagtatggccacattcccagagaactgctttttctgccataccctgtgaatccttcatctcaaggacaatatctaaggaattcactggtaaaacattttatgcttggtcacaagcagctagagaaagcaaactacttccggcctggtgcggtggctcatgtctgtaatctcagcactttgggaggccgaggtggtggatcacgaggacaggagttcaagaccagcctggccaacatggtgaaaccccgtctctactaaaaatacaaaatttggtcgggaggctggggcaggagacatgcttgaacccgggaggggaggttgcaatgagctgagattgcaccacctgcctccacgcctgggtgacaaacgattctctgtcttggaagggaggaagca

SEQ ID NO: 299742 - DNA, 470 bp, Homo sapiens
ccctctggctgcaacatggagtatattgtaggagggtaccattgcctgcagtgaggcgttaaggacgcagcatggatgagagatgaggaaagctgaaatgaaacagaggcaggagaaatggagaggaggacatggccttgaggaatttccaggacataaatttggcatcacttcttggaccatgagagggagagggagcaggaagaatcaaagatgaatccaagaatgaacaaatctaatttttgaaataatgcaatgaaaagtagaactggtctgttttcctaggagaggatggtgaaatagaggtagtttgtgtgatttgcccagagtcccatgaagaattcacagaagaattgagactacagtcagtatggccacattcccagagaactgctttttctgccataccctgtggtaataatattgtcacaagacaattggacagtgtttcacatattcagtgatggaag

SEQ ID NO: 299743 - DNA, 1348 bp, Homo sapiens
ataaacttcccaaatgtctgcaaaaacataaaaagctagttatgggtttttctgtaattttcaaataatttcttacagctaactttttcctttcgagggtttgtttcctttctcattctacagcccagtggccatgggctctttgggttcactgggccattcatgggccattggattcgctgtaacacctacatgtccttctccattttctttagctgatgactggagaatatattagttttcttatgactcaccctttttttgatctcctgttctattgtcctactgtccccagtatattttagataaagcataaggaatgatatagaaaagaacaccaaaatgagaattaggattgattctgattccaacttttctagtagttgaacatgtctttggacatcagattttttttatgtgtcaaatgaggaagttaacctggtaaaatccataaacaccctttaattctcaaaatcagtcattgttttatttctttcattgttatctctaatgcatttcaaaaataattgttgtctttcctctctttcattgtctcattcttaaatatatactttttttagttttaatactcaaatagatgtctgaagtagttaacttgaaaagaaatgacatttgcactgtattttcaaggatttttcagtcttattgaagaaatgtacatgaaacaatttaaaaagactaccactgaacaacttaggaaaaacaaagttataaactatatactaaagtttctgtaaaatttgagaaaagaaaaatctgcccaaggaggcagtatggggggagtagttagtaaagtattgattgtagagggacctcagccttagagcatgagtacctatggagagagaaactgaggcaacctgatatgtcagatagggtggcagcaggagcaaggacatccatgcgggcccggtatggtggagcatggggaggcttgtgcaggggaatgtggaagatcccgttagatggatgcaatggagctggttagtgagagtctgtgttaatggacttcatcctccagactacatcaagtctaaatcctctgaaagaatttaacgtgcactacatttggtgccactcacagaattttgagcagggctgacttatctaaaattagaatgcaagtagattgaactaaatttctaagaaatcagttaggaagacgcaaaagtagaaaactatagtattctagtaacaaataatccaggactggacttgaagggaaggagtcagggtaaagaagtagtgtagaaaatgttttgaaaatcccaagattccacatgtattccagaacttgaagtataataaaaaaaaaaaattggaaaaa

SEQ ID NO: 299744 - DNA, 1293 bp, Homo sapiens
ataaacttcccaaatgtctgcaaaaacataaaaagctagttatgggtttttctgtaattttcaaataatttcttacagctaactttttcctttcgagggtttgtttcctttctcattctacagcccagtggccatgggctctttgggttcactgggccattcatgggccattggattcgctgtaacacctacatgtccttctccattttctttagctgatgactggagaatatattagttttcttatgactcaccctttttttgatctcctgttctattgtcctactgtccccagtatattttagataaagcataaggaatgatatagaaaagaacaccaaaatgagaattaggattgattctgattccaacttttctagtagttgaacatgtctttggacatcagattttttttatgtgtcaaatgaggaagttaacctggtaaaatccataaacaccctttaattctcaaaatcagtcattgttttatttctttcattgttatctctaatgcatttcaaaaataattgttgtctttcctctctttcattgtctcattcttaaatatatactttttttagttttaatactcaaatagatgtctgaagtagttaacttgaaaagaaatgacatttgcactgtattttcaaggatttttcagtcttattgaagaaatgtacatgaaacaatttaaaaagactaccactgaacaacttaggaaaaacaaagttataaactatatactaaagtttctgtaaaatttgagaaaagaaagggacctcagccttagagcatgagtacctatggagagagaaactgaggcaacctgatatgtcagatagggtggcagcaggagcaaggacatccatgcgggcccggtatggtggagcatggggaggcttgtgcaggggaatgtggaagatcccgttagatggatgcaatggagctggttagtgagagtctgtgttaatggacttcatcctccagactacatcaagtctaaatcctctgaaagaatttaacgtgcactacatttggtgccactcacagaattttgagcagggctgacttatctaaaattagaatgcaagtagattgaactaaatttctaagaaatcagttaggaagacgcaaaagtagaaaactatagtattctagtaacaaataatccaggactggacttgaagggaaggagtcagggtaaagaagtagtgtagaaaatgttttgaaaatcccaagattccacatgtattccagaacttgaagtataataaaaaaaaaaaattggaaaaa

SEQ ID NO: 299745 - DNA, 772 bp, Homo sapiens
ctctctctctctctctctctctctctctctctctctctctctctctctctctctctctctcctcgtgccgaattcggcacgaggctgcccaccctctggacattcacccagccaggtggtctcgtcacctcagaggctccgccagactcctgcccaggccaggactgaggcaagcctcaaggcacttctaggacctgcctcttctcaccaagatgaactcactggtttcttggcagctactgcttttcctctgtgccacccactttggggagccattagaaaaggtggcctctgtggggaattctagacccacaggccagcagctagaatccctgggcctcctggcccccggggagcagagcctgccgtgcaccgagaggaagccagctgctactgccaggctgagccgtcgggggacctcgctgtccccgccccccgagagctccgggagcccccagcagccgggcctgtccgccccccacagccgccagatccccgcaccccagggcgcggtgctggtgcagcgggagaaggacctgccgaactacaactggaactccttcggcctgcgcttcggcaagcgggaggcggcaccagggaaccacggcagaagcgctgggcggggctgagggcgcaggtgcggggcagtgaacttcagaccccaaaggagtcagagcatgtggggcgggggcgggggggggcaacgtagggctaagggagggggcgctggagcttccaacccgaggcaataaaagaaatgttgcgtaactca

SEQ ID NO: 299746 - DNA, 870 bp, Homo sapiens
ttcctctcaagcaaccctgagattcagaatcctggccattctctgacccaagcagtcctgccccttccaccaaattgggtctttccttttttcctaactttactgtcctcacctcctccaggaagccctccctgatgaccctcacctagcatgaattcagctttaactacactgtgtaaagagtctcaatcccatttcactgatatatttgtttagactcatccctctaccaggagcctccaaaggcaagaacttgcccctctcttggaggactgtcccttttgcactgggctctgccctcagcacccagcccagatcctgtgcctgacctagtctttgttccctctctctgtctcagcctcaaggcacttctaggacctgcctcttctcaccaagatgaactcactggtttcttggcagctactgcttttcctctgtgccacccactttggggagccattagaaaaggtggcctctgtggggaattctagacccacaggtatgtatcctctggggaaaggagtgggagggagcaagtgggttgttgcaaaatgagctttcccgtattttccatctagtcgactggtgtgagtttaacattgcatttggtggaaatctaagactggcacacatgcaactcattgagggggtcctgttaaccctgcaagtgatggatgccttgcctctgtgatggcctcagtccgcccacctaggttccagggcttattaacccttgagctctttcatggtttcctcacactgtgttctctgctctacgtcagcaacctctctgtgccgatgttgagaagaaacttcatatgcaaccttgctttatcggtgacctcagattctttgtggagaatttggaaa

SEQ ID NO: 299747 - DNA, 815 bp, Homo sapiens
  misc_feature (741)..(742): n is a, c, g, or t
  misc_feature (744)..(746): n is a, c, g, or t
  misc_feature (787)..(787): n is a, c, g, or t
atgctctctctgctgggggagaactcttgagaccgggagcccagctgcccaccctctggacattcacccagccaggtggtctcgtcacctcagaggctccgccagactcctgcccaggccaggactgaggcaagcctcaaggcacttctaggacctgcctcttctcaccaagatgaactcactggtttcttggcagctactgcttttcctctgtgccacccactttggggagccattagaaaaggtggcctctgtggggaattctagacccacaggccagcagctagaatccctgggcctcctggcccccggggagcagagcctgccgtgcaccgagaggaagccagctgctactgccaggctgagccgtcgggggacctcgctgtccccgccccccgagagctccgggagcccccagcagccgggcctgtccgccccccacagccgccagatccccgcaccccagggcgcggtgctggtgcagcgggagaaggacctgccgaactacaactggaactccttcggcctgcgcttcggcaagcgggaggcggcaccagggaaccacggcagaagcgctgggcggggctgagggcgcaggtgcggggcagtgaacttcagaccccaaaggagtcagagcatgtggggcgggggcgggggggggcaacgtagggctaagggagggggcgctggagcttccaacccgaggcaataaaagaaatgttgcgtaactcaaaaaaaaanntnnnacccccccccccccccccccccccccccccccccccggggnggggggagcggcgggggggggggggggg

SEQ ID NO: 299748 - DNA, 819 bp, Homo sapiens
  misc_feature (16)..(16): n is a, c, g, or t
  misc_feature (745)..(746): n is a, c, g, or t
  misc_feature (748)..(750): n is a, c, g, or t
  misc_feature (791)..(791): n is a, c, g, or t
cctgtcagtcgcttcntggcctgtcaactcttgagaccgggagcccagctgcccaccctctggacattcacccagccaggtggtctcgtcacctcagaggctccgccagactcctgcccaggccaggactgaggcaagcctcaaggcacttctaggacctgcctcttctcaccaagatgaactcactggtttcttggcagctactgcttttcctctgtgccacccactttggggagccattagaaaaggtggcctctgtggggaattctagacccacaggccagcagctagaatccctgggcctcctggcccccggggagcagagcctgccgtgcaccgagaggaagccagctgctactgccaggctgagccgtcgggggacctcgctgtccccgccccccgagagctccgggagcccccagcagccgggcctgtccgccccccacagccgccagatccccgcaccccagggcgcggtgctggtgcagcgggagaaggacctgccgaactacaactggaactccttcggcctgcgcttcggcaagcgggaggcggcaccagggaaccacggcagaagcgctgggcggggctgagggcgcaggtgcggggcagtgaacttcagaccccaaaggagtcagagcatgtggggcgggggcgggggggggcaacgtagggctaagggagggggcgctggagcttccaacccgaggcaataaaagaaatgttgcgtaactcaaaaaaaaanntnnnacccccccccccccccccccccccccccccccccccggggnggggggagcggcgggggggggggggggg

SEQ ID NO: 299749 - DNA, 732 bp, Homo sapiens
atgctctctctgctgggggagaactcttgagaccgggagcccagctgcccaccctctggacattcacccagccaggtggtctcgtcacctcagaggctccgccagactcctgcccaggccaggactgaggcaagcctcaaggcacttctaggacctgcctcttctcaccaagatgaactcactggtttcttggcagctactgcttttcctctgtgccacccactttggggagccattagaaaaggtggcctctgtggggaattctagacccacaggccagcagctagaatccctgggcctcctggcccccggggagcagagcctgccgtgcaccgagaggaagccagctgctactgccaggctgagccgtcgggggacctcgctgtccccgccccccgagagctccgggagcccccagcagccgggcctgtccgccccccacagccgccagatccccgcaccccagggcgcggtgctggtgcagcgggagaaggacctgccgaactacaactggaactccttcggcctgcgcttcggcaagcgggaggcggcaccagggaaccacggcagaagcgctgggcggggctgagggcgcaggtgcggggcagtgaacttcagaccccaaaggagtcagagcatgtggggcgggggcgggggggggcaacgtagggctaagggagggggcgctggagcttccaacccgaggcaataaaagaaatgttgcgtaactca

SEQ ID NO: 299750 - DNA, 1039 bp, Homo sapiens
  misc_feature (965)..(966): n is a, c, g, or t
  misc_feature (968)..(970): n is a, c, g, or t
  misc_feature (1011)..(1011): n is a, c, g, or t
ttcctctcaagcaaccctgagattcagaatcctggccattctctgacccaagcagtcctgccccttccaccaaattgggtctttccttttttcctaactttactgtcctcacctcctccaggaagccctccctgatgaccctcacctagcatgaattcagctttaactacactgtgtaaagagtctcaatcccatttcactgatatatttgtttagactcatccctctaccaggagcctccaaaggcaagaacttgcccctctcttggaggactgtcccttttgcactgggctctgccctcagcacccagcccagatcctgtgcctgacctagtctttgttccctctctctgtctcagcctcaaggcacttctaggacctgcctcttctcaccaagatgaactcactggtttcttggcagctactgcttttcctctgtgccacccactttggggagccattagaaaaggtggcctctgtggggaattctagacccacaggccagcagctagaatccctgggcctcctggcccccggggagcagagcctgccgtgcaccgagaggaagccagctgctactgccaggctgagccgtcgggggacctcgctgtccccgccccccgagagctccgggagcccccagcagccgggcctgtccgccccccacagccgccagatccccgcaccccagggcgcggtgctggtgcagcgggagaaggacctgccgaactacaactggaactccttcggcctgcgcttcggcaagcgggaggcggcaccagggaaccacggcagaagcgctgggcggggctgagggcgcaggtgcggggcagtgaacttcagaccccaaaggagtcagagcatgtggggcgggggcgggggggggcaacgtagggctaagggagggggcgctggagcttccaacccgaggcaataaaagaaatgttgcgtaactcaaaaaaaaanntnnnacccccccccccccccccccccccccccccccccccggggnggggggagcggcgggggggggggggggg

SEQ ID NO: 299751 - DNA, 1197 bp, Homo sapiens
atgctctctctgctgggggagaactcttgagaccgggagcccagctgcccaccctctggacattcacccagccaggtggtctcgtcacctcagaggctccgccagactcctgcccaggccaggactgaggcaagcctcaaggcacttctaggacctgcctcttctcaccaagatgaactcactggtttcttggcagctactgcttttcctctgtgccacccactttggggagccattagaaaaggtggcctctgtggggaattctagacccacaggccagcagctagaatccctgggcctcctggcccccggggagcagagcctgccgtgcaccgagaggaagccagctgctactgccaggctgagccgtcgggggacctcgctgtccccgccccccgagagctccgggagcccccagcagccgggcctgtccgccccccacagccgccagatccccgcaccccagggcgcggtgctggtgcagcgggagaaggacctgccgaactacaactggaactccttcggcctgcgcttcggcaagcgggaggcggcaccagggaaccacggcagaagcgctgggcggggctgagggcgcaggtgcggggcagtgaacttcagaccccaaaggagtcagagcatgtggggcgggggcgggggggggcaacgtagggctaagggagggggcgctggagcttccaacccgaggcaataaaagaaatgttgcgtaactcaaaaaaaaaaaaaaaaaaaaaaaaaaaaaaaaaaaaaaaaaaaaaaattttggggggcagctagcgagcgcgccacagaagaaaaacttttatagaagaacaccttagtggtgaggcgcgcgcgaggggccccaaaagaagaggaagaagagagaaaggaggagcacaacaagagtggactactctagaagagaacacccgggagaaagaaacacaaagggcgtagagatcccgcgcgcaaataaagaaaaaacgccgcgcgggggggggacaacaccggcgcgagcggatctagaaagagaaaacaaacgctccccaagagagagggcgcgatctatagagagggggagtatataaagaggggggggctatcaataaaaaacacggagggagcgcccacagaaggagagagagcgagcagaagaatacaaaatattaaagacgccgcgggctcggtgtggggaga

SEQ ID NO: 299752 - DNA, 693 bp, Homo sapiens
  misc_feature (599)..(599): n is a, c, g, or t
  misc_feature (603)..(603): n is a, c, g, or t
  misc_feature (613)..(614): n is a, c, g, or t
  misc_feature (617)..(617): n is a, c, g, or t
  misc_feature (668)..(668): n is a, c, g, or t
atgctctctctgctgggggagaactcttgagaccgggagcccagctgcccaccctctggacattcacccagccaggtggtctcgtcacctcagaggctccgccagactcctgcccaggccaggactgaggcaagcctcaaggcacttctaggacctgcctcttctcaccaagatgaactcactggtttcttggcagctactgcttttcctctgtgccacccactttggggagccattagaaaaggtggcctctgtggggaattctagacccacaggccagcagctagaatccctgggcctcctggcccccggggagcagagcctgccgtgcaccgagaggaagccagctgctactgccaggctgagccgtcgggggacctcgctgtccccgccccccgagagctccgggagcccccagcagccgggcctgtccgccccccacagccgccagatccccgcaccccagggcgcggtgctggtgcagcgggagaaggacctgccgaactacaactggaactccttcggcctgcgcttcggcaagcgggaggcggcaccagggaaccacggcagaagacgactagagagcaggaggctggganacangatagcaggnncantgaactatacaaacacacacaaagagagatacaagaagaaatagacgagancgggggacggggatagagagagaga

SEQ ID NO: 299753 - DNA, 642 bp, Homo sapiens
atgctctctctgctgggggagaactcttgagaccgggagcccagctgcccaccctctggacattcacccagccaggtggtctcgtcacctcagaggctccgccagactcctgcccaggccaggactgaggcaagcctcaaggcacttctaggacctgcctcttctcaccaagatgaactcactggtttcttggcagctactgcttttcctctgtgccacccactttggggagccattagaaaaggtggcctctgtggggaattctagacccacaggccagcagctagaatccctgggcctcctggcccccggggagcagagcctgccgtgcaccgagaggaagccagctgctactgccaggctgagccgtcgggggacctcgctgtccccgccccccgagagctccgggagcccccagcagccgggcctgtccgccccccacagccgccagatccccgcaccccagggcgcggtgctggtgcacgctgggcggggctgagggcgcaggtgcggggcagtgaacttcagaccccaaaggagtcagagcatgtggggcgggggcgggggggggcaacgtagggctaagggagggggcgctggagcttccaacccgaggcaataaaagaaatgttgcgtaactca

SEQ ID NO: 299754 - DNA, 599 bp, Homo sapiens
  misc_feature (16)..(16): n is a, c, g, or t
cctgtcagtcgcttcntggcctgtcaactcttgagaccgggagcccagctgcccaccctctggacattcacccagccaggtggtctcgtcacctcagaggctccgccagactcctgcccaggccaggactgaggcaagcctcaaggcacttctaggacctgcctcttctcaccaagatgaactcactggtttcttggcagctactgcttttcctctgtgccacccactttggggagccattagaaaaggtggcctctgtggggaattctagacccacaggccagcagctagaatccctgggcctcctggcccccggggagcagagcctgccgtgcaccgagaggaagccagctgctactgccaggctgagccgtcgggggacctcgctgtccccgccccccgagagctccgggagcccccacagggaaccacggcagaagcgctgggcggggctgagggcgcaggtgcggggcagtgaacttcagaccccaaaggagtcagagcatgtggggcgggggcgggggggggcaacgtagggctaagggagggggcgctggagcttccaacccgaggcaataaaagaaatgttgcgtaactca

SEQ ID NO: 299755 - DNA, 449 bp, Homo sapiens
  misc_feature (16)..(16): n is a, c, g, or t
cctgtcagtcgcttcntggcctgtcaactcttgagaccgggagcccagctgcccaccctctggacattcacccagccaggtggtctcgtcacctcagaggctccgccagactcctgcccaggccaggactgaggcaagcctcaaggcacttctaggacctgcctcttctcaccaagatgaactcactggtttcttggcagctactgcttttcctctgtgccacccactttggggagccattagaaaaggtggcctctgtggggaattctagacccacaggccagcagctagaatccctgggcctcctggcccccggggagcagagcctgccgtgcaccgagaggaagccagctgctactgccaggctgagccgtcgggggacgtagggctaagggagggggcgctggagcttccaacccgaggcaataaaagaaatgttgcgtaactca

SEQ ID NO: 299756 - DNA, 333 bp, Homo sapiens
  misc_feature (16)..(16): n is a, c, g, or t
  misc_feature (325)..(325): n is a, c, g, or t
cctgtcagtcgcttcntggcctgtcaactcttgagaccgggagcccagctgcccaccctctggacattcacccagccaggtggtctcgtcacctcagaggctccgccagactcctgcccaggccaggactgaggcaagcctcaaggcacttctaggacctgcctcttctcaccaagatgaactcactggtttcttggcagctactgcttttcctctgtgccacccactttggggagccattagaaaaggtggcctctgtggggaattctagacccacaggccagcagctagatcactggcctcctgcccccgacgaacctgcctnccggaccg

SEQ ID NO: 299757 - DNA, 650 bp, Homo sapiens
  misc_feature (16)..(16): n is a, c, g, or t
cctgtcagtcgcttcntggcctgtcaactcttgagaccgggagcccagctgcccaccctctggacattcacccagccaggtggtctcgtcacctcagaggctccgccagactcctgcccaggccaggactgaggcaagcctcaaggcacttctaggacctgcctcttctcaccaagatgaactcactggtttcttggcagctactgcttttcctctgtgccacccactttggggagccattagaaaaggtggcctctgtggggaattctagacccacaggtatgtatcctctggggaaaggagtgggagggagcaagtgggttgttgcaaaatgagctttcccgtattttccatctagtcgactggtgtgagtttaacattgcatttggtggaaatctaagactggcacacatgcaactcattgagggggtcctgttaaccctgcaagtgatggatgccttgcctctgtgatggcctcagtccgcccacctaggttccagggcttattaacccttgagctctttcatggtttcctcacactgtgttctctgctctacgtcagcaacctctctgtgccgatgttgagaagaaacttcatatgcaaccttgctttatcggtgacctcagattctttgtggagaatttggaaa

SEQ ID NO: 299758 - DNA, 807 bp, Homo sapiens
  misc_feature (733)..(734): n is a, c, g, or t
  misc_feature (736)..(738): n is a, c, g, or t
  misc_feature (779)..(779): n is a, c, g, or t
tcggacctgattgactacgcggctcgatctgactacgcggctcgatctgacacgcggctccagccaggtggtctcgtcacctcagaggctccgccagactcctgcccaggccaggactgaggcaagcctcaaggcacttctaggacctgcctcttctcaccaagatgaactcactggtttcttggcagctactgcttttcctctgtgccacccactttggggagccattagaaaaggtggcctctgtggggaattctagacccacaggccagcagctagaatccctgggcctcctggcccccggggagcagagcctgccgtgcaccgagaggaagccagctgctactgccaggctgagccgtcgggggacctcgctgtccccgccccccgagagctccgggagcccccagcagccgggcctgtccgccccccacagccgccagatccccgcaccccagggcgcggtgctggtgcagcgggagaaggacctgccgaactacaactggaactccttcggcctgcgcttcggcaagcgggaggcggcaccagggaaccacggcagaagcgctgggcggggctgagggcgcaggtgcggggcagtgaacttcagaccccaaaggagtcagagcatgtggggcgggggcgggggggggcaacgtagggctaagggagggggcgctggagcttccaacccgaggcaataaaagaaatgttgcgtaactcaaaaaaaaanntnnnacccccccccccccccccccccccccccccccccccggggnggggggagcggcgggggggggggggggg

SEQ ID NO: 299759 - DNA, 529 bp, Homo sapiens
atttggtaatatggcaaattttctagtgacagaggtttggaatactttttcctattttcttaaggaatgacagtgttttcagttttgaaacagactaacccaaggaagagagattcttgtgctaagcacataccagctacctacttctcaaacccattcctaaatttgaatactttcagtgaggctgggctctcctaggcccatttcagggcaataccaggagcaggagaagccaccatagggaatactgagaccacaataattatgtgttcacaaggcagtgaaactggcgacttataactaatttattggcaaccactttctaaataaaatatccaagtacctgtcaacagaaattagttaacaggaagctaaccactgagtctgtagattgaacagtgtattttacaaagagtgtgttaacctaagttatgttaacttaaaaacaaatcttgagaattgaggaagaataagggataaactgggataaactgggatctttctttttttttttttttttgagatggag

SEQ ID NO: 299760 - DNA, 582 bp, Homo sapiens
atttggtaatatggcaaattttctagtgacagaggtttggaatactttttcctattttcttaaggaatgacagtgttttcagttttgaaacagactaacccaaggaagagagattcttgtgctaagcacataccagctacctacttctcaaacccattcctaaatttgaatactttcagtgaggctgggctctcctaggtggtacctggacaatgttctataacctgagtattggggagccacggcttttggcccatttcagggcaataccaggagcaggagaagccaccatagggaatactgagaccacaataattatgtgttcacaaggcagtgaaactggcgacttataactaatttattggcaaccactttctaaataaaatatccaagtacctgtcaacagaaattagttaacaggaagctaaccactgagtctgtagattgaacagtgtattttacaaagagtgtgttaacctaagttatgttaacttaaaaacaaatcttgagaattgaggaagaataagggataaactgggataaactgggatctttctttttttttttttttttgagatggag

SEQ ID NO: 299761 - DNA, 390 bp, Homo sapiens
agtttaccagaaactgggactttctcatttcctgagaggtttttgagatttggtaatatggcaaattttctagtgacagaggtttggaatactttttcctattttcttaaggaatgacagtgttttcagttttgaaacagactaacccaaggaagagagattcttgtgctaagcacataccagctacctacttctcaaacccattcctaaatttgaatactttcagtgaggctgggctctcctaggtggtacctggacaatgttctataacctgagtattggggagccacggcttttggcccatttcagggcaataccaggagcaggagaagccaccatagggaatactgagaccacaataattatgtgttcacaaggcagtgaaactgg

SEQ ID NO: 299762 - DNA, 4547 bp, Homo sapiens
cgagctcggtaccccatcctgtgcggccctccgatgggctggatgaccaaagcattgtaacagggctggaagccaaggaagacctctatcttgaaccccaagttggccatgaccccgccggccctgctgcctcgcctgtcctggcagatggactgtccgtgtcccaggcccctgccattattgcccgtctccaagaacactgtaaagctgttggagtcccctgttccagcagcacaagtattaagtacagtgccattgggctgtgtccccagggtcgtcttcgtcggggcccttagctagctctcccagatgtgtcatcccatttctgagcagaaaaccagttcttcctccccattgtcctctccttctaagtctcccatcctctcatccagtgcctcaagctccaccctttccagtgcaaaaaccttcatgagccttgtgaagtccctgtcgaccgaggtggagccaaaagaatccccacaccccgcaaggcacaggcacttgatgaagacattagtcaagtctctgtccacggacacttcccggcaggagtcggatacagtgtcctataagccacctgattccaaactgaacttacacctgttcaagcagttcacacagccccgaaacacaggtggagattccaaaactgcaccttcttccccactgacttctccctctgatactcgttccttttttaaagtgcccgaaatggaggctaaaattgaagatactaaacgacgcctttcagaagtcatctatgagccttttcagctccttagtaaaattataggggaagaaagtggcagccataggcccaaagccttatcttcaagtgcttcagaactctccaatctgtccagcttgaatgggcacttggaaagcaataacaactacagcatcaaggaggaggagtgtgattctgagggggatggctacggaagtgattccaacatccccagaagtgaccacccaaagtccactggtgagcccacaagagagatagaactgaaaagttcccaggggagcagtctgaaggatttaggcctgaagacaagttctctagttctggagaaatgttctttgtctgccttagtgagcaaagaagatgaagagttttgtgaactgtacactgaggacttcgatttggaaacggagggggagagtaaagttgataagctctcagatattcctctcaagccagaggtgctcgcggaagatggtgtggtccttgacagtgaggacgaggtggactcggccgtgcagcacccggaattgccagtgaagacgttgggcttctttataatgtgtgtctatgtgtacctcatcctccccctcccccactatgtgagtggactctttctgggaattggccttggattcatgactgcagtttgcgtgatttggttttttacaccaccaagtgctcataaatatcacaagttacacaaaaatctgcgacactggaacacaagatctctggatatcaaagaacctgaaatactgaagggatggatgaatgagatttacaactatgatccagaaacctaccatgcgactttgacacattcagtctttgttcgacttgagggtggaaccttaagactttcaaagcccaataaaaatatatccaggagggccagctacaatgaacccaagccagaggtcacctacatcagccagaaaatctatgacctctcagacagcaagatttatcttgtacctaaaactttggctcgaaagcgaatctggaataaaaagtaccccatttgtatcgagcttggtcagcaagatgactttatgtctaaagctcagactgataaggagacttcagaagagaagccgccagctgagggaagtgaggaccctaagaagccaccccgccctcaggagggaacaagatctagccagcgagatcagatactctatctctttgggagaactggccgagaaaaagaggaatggtttaggagatttattctggcatctaagctaaagtcggaaatcaagaagtcatcgggtgtctctggaggtaaaccagggcttttgcctgcacacagcagacacaacagtccgtccgggcacctgacccacagccgcagcagcagcaaaggcagtgtggaggagatcatgtcacagccaaagcagaaggagctggcaggcagcgtgcggcagaagatgcttctcgactacagcgtgtacatgggcaggtgtgtcccccaggaaagccgaagcccccagaggagccccctgcagagtgcggagagcagccccacagctgggaagaagttgccagaggttccaccctctgaggaggaagaacaggaagcctgggtgaatgccttgcttggaagaatattttgggacttcttaggagagaaatactggtctgatctggtgtctaagaagatccaaatgaaactcagcaaaataaagctcccctactttatgaatgagctcactctgacggaacttgacatgggcgtggctgtgccaaaaatcctccaggccttcaagccttacgttgatcaccaaggactctggattgatttggaaatgtcctacaatgggtcctttctgatgactctcgagaccaaaatgaatttgaccaaactaggtaaagagcctcttgttgaagccctgaaggttggagaaattggcaaagaaggttgcaggccccgggcattctgtctggcggacagcgatgaggaatcctccagcgctggctcctccgaggaagacgatgccccagagcccagcgggggagacaaacagctcctcccaggggctgaagggtacgttggaggtcatcgaacaagtaagattatgaggtttgttgataaaattaccaagtcaaaatatttccaaaaagcaacagagacagagtttattaaaaagaagatcgaagaagtctccaacacacccctgctgctcactgttgaagtacaagaatgtagaggaaccttggcggtcaacattccaccacccccgactgaccgagtatggtatggtttccgaaagccaccacatgtggagctgaaagctcggccaaaacttggagagagagaagtgactttagttcatgtgacagactggatagagaagaaactggagcaagagtttcagaaagtttttgtcatgccaaacatggatgatgtttatatcactataatgcactcagccatggaccctcgctctacttcctgcctcctgaaagacccacctgtggaggctgctgatcagccatgatgggtgatgtcagatgttccccatattgtgacatcgagctggatgtgtggggttcttggccgccatctgtactgtagcactggcctctgtgccacagctactgtttcttaaaggactgcttctgccctctgcctgccagtgcccattccactgtgaggtgtcattccctgcatctagtgacaactgtctggattgcctgctgcaaagctttgatttggcaaaggagaccatggaagaatcatggtggatccagaagttatacgtgacccacaccatggcttttaaaagtctacccatgtttgtggcagcaaatgagcacagtaagagcaaagctgaacaacttgcctcctctactcctccaaagcttttcttcaggcagccggtgcacagtggactttttcacttctatactttgtatgcggccttccacacttccagagaatgtcagtgtgcaatgtgtctggagggtggggagaggaattctgtgagccttttcatttcggtgacagaagagatgggcagagcaacttattttccacattaaattgtgcatttgggaagcaagtagccatagtacacacacaacacgctatcagcttgggtaaggacagtgggatttatgtgaacatcaggcaaagccatgagatcaaaccatcccaagcctttcaccaatgaggtacaaccacctgggggctagctaatcttgaatgttttcctgagacaggagcgtatgtgaaaacatcaaacactgcacatgacaggatgggtcctctcatacagatgggatggggttagaaagccagagccagtttttccatctggcgtttcctgtgtcctccaggtttatatgggaatcgaaacagtttgttaatctgattgggagagttccatgggcagatttcccttcctgaaggccaaaacggagaactgctctctttaattatttcaagagtcaagaccaaaagtttgctcagcatcacactacatctcaaaattaatgttgccaacttaattttgtgcatttgtgtcagaatgtttagtttacaaggttgggggctctctttgcttcgagaagtaaacctaataccatttttttattgtttaaagctgcattcaacgtcaaaattaccttgggtaacttttgataacttacatgtgtggacaaagctaatagtggttttttaaacagcaccttgcctgaacatgactttaaagaaattaatatattgaaaacatgtttgaacccttattttaattgcaccattaaaacatttgacttaaattgtttgaccattcca

SEQ ID NO: 299763 - DNA, 5243 bp, Homo sapiens
cggggcggcgtgtgcccgggggcgggcgggcggcagggcagcaggaccgcggccggtgccccagccgaagccggagtcgcgcggccgggagcacgggcgccggcatagtacaatgaggcagccagcggatcttggagcctgagcccttgtgaagccggcaatgacaagtctgtatggtcgccatgccgagaaaaccactgacatgccaaaaccatcagcccctaaagtgcacgtgcagaggtccgtgtcccgagataccatcgccattcacttctcggcatccggcgaggaggaggaggaagaggaggaggagttcagggagtactttgaggaggggctggatgaccaaagcattgtaacagggctggaagccaaggaagacctctatcttgaaccccaagttggccatgaccccgccggccctgctgcctcgcctgtcctggcagatggactgtccgtgtcccaggcccctgccattattgcccgtctccaagaacactgtaaagctgttggagtcccctgttccagcagcacaagtattaagtacagtgccattgggctgtgtccccagggtcgtcttcgtcggggcccttagctagctctcccagatgtgtcatcccatttctgagcagaaaaccagttcttcctccccattgtcctctccttctaagtctcccatcctctcatccagtgcctcaagctccaccctttccagtgcaaaaaccttcatgagccttgtgaagtccctgtcgaccgaggtggagccaaaagaatccccacaccccgcaaggcacaggcacttgatgaagacattagtcaagtctctgtccacggacacttcccggcaggagtcggatacagtgtcctataagccacctgattccaaactgaacttacacctgttcaagcagttcacacagccccgaaacacaggtggagattccaaaactgcaccttcttccccactgacttctccctctgatactcgttccttttttaaagtgcccgaaatggaggctaaaattgaagatactaaacgacgcctttcagaagtcatctatgagccttttcagctccttagtaaaattataggggaagaaagtggcagccataggcccaaagccttatcttcaagtgcttcagaactctccaatctgtccagcttgaatgggcacttggaaagcaataacaactacagcatcaaggaggaggagtgtgattctgagggggatggctacggaagtgattccaacatccccagaagtgaccacccaaagtccactggtgagcccacaagagagatagaactgaaaagttcccaggggagcagtctgaaggatttaggcctgaagacaagttctctagttctggagaaatgttctttgtctgccttagtgagcaaagaagatgaagagttttgtgaactgtacactgaggacttcgatttggaaacggagggggagagtaaagttgataagctctcagatattcctctcaagccagaggtgctcgcggaagatggtgtggtccttgacagtgaggacgaggtggactcggccgtgcagcacccggaattgccagtgaagacgttgggcttctttataatgtgtgtctatgtgtacctcatcctccccctcccccactatgtgagtggactctttctgggaattggccttggattcatgactgcagtttgcgtgatttggttttttacaccaccaagtgctcataaatatcacaagttacacaaaaatctgcgacactggaacacaagatctctggatatcaaagaacctgaaatactgaagggatggatgaatgagatttacaactatgatccagaaacctaccatgcgactttgacacattcagtctttgttcgacttgagggtggaaccttaagactttcaaagcccaataaaaatatatccaggagggccagctacaatgaacccaagccagaggtcacctacatcagccagaaaatctatgacctctcagacagcaagatttatcttgtacctaaaactttggctcgaaagcgaatctggaataaaaagtaccccatttgtatcgagcttggtcagcaagatgactttatgtctaaagctcagactgataaggagacttcagaagagaagccgccagctgagggaagtgaggaccctaagaagccaccccgccctcaggagggaacaagatctagccagcgagatcagatactctatctctttgggagaactggccgagaaaaagaggaatggtttaggagatttattctggcatctaagctaaagtcggaaatcaagaagtcatcgggtgtctctggaggtaaaccagggcttttgcctgcacacagcagacacaacagtccgtccgggcacctgacccacagccgcagcagcagcaaaggcagtgtggaggagatcatgtcacagccaaagcagaaggagctggcaggcagcgtgcggcagaagatgcttctcgactacagcgtgtacatgggcaggtgtgtcccccaggaaagccgaagcccccagaggagccccctgcagagtgcggagagcagccccacagctgggaagaagttgccagaggttccaccctctgaggaggaagaacaggaagcctgggtgaatgccttgcttggaagaatattttgggacttcttaggagagaaatactggtctgatctggtgtctaagaagatccaaatgaaactcagcaaaataaagctcccctactttatgaatgagctcactctgacggaacttgacatgggcgtggctgtgccaaaaatcctccaggccttcaagccttacgttgatcaccaaggactctggattgatttggaaatgtcctacaatgggtcctttctgatgactctcgagaccaaaatgaatttgaccaaactaggtaaagagcctcttgttgaagccctgaaggttggagaaattggcaaagaaggttgcaggccccgggcattctgtctggcggacagcgatgaggaatcctccagcgctggctcctccgaggaagacgatgccccagagcccagcgggggagacaaacagctcctcccaggggctgaagggtacgttggaggtcatcgaacaagtaagattatgaggtttgttgataaaattaccaagtcaaaatatttccaaaaagcaacagagacagagtttattaaaaagaagatcgaagaagtctccaacacacccctgctgctcactgttgaagtacaagaatgtagaggaaccttggcggtcaacattccaccacccccgactgaccgagtatggtatggtttccgaaagccaccacatgtggagctgaaagctcggccaaaacttggagagagagaagtgactttagttcatgtgacagactggatagagaagaaactggagcaagagtttcagaaagtttttgtcatgccaaacatggatgatgtttatatcactataatgcactcagccatggaccctcgctctacttcctgcctcctgaaagacccacctgtggaggctgctgatcagccatgatgggtgatgtcagatgttccccatattgtgacatcgagctggatgtgtggggttcttggccgccatctgtactgtagcactggcctctgtgccacagctactgtttcttaaaggactgcttctgccctctgcctgccagtgcccattccactgtgaggtgtcattccctgcatctagtgacaactgtctggattgcctgctgcaaagctttgatttggcaaaggagaccatggaagaatcatggtggatccagaagttatacgtgacccacaccatggcttttaaaagtctacccatgtttgtggcagcaaatgagcacagtaagagcaaagctgaacaacttgcctcctctactcctccaaagcttttcttcaggcagccggtgcacagtggactttttcacttctatactttgtatgcggccttccacacttccagagaatgtcagtgtgcaatgtgtctggagggtggggagaggaattctgtgagccttttcatttcggtgacagaagagatgggcagagcaacttattttccacattaaattgtgcatttgggaagcaagtagccatagtacacacacaacacgctatcagcttgggtaaggacagtgggatttatgtgaacatcaggcaaagccatgagatcaaaccatcccaagcctttcaccaatgaggtacaaccacctgggggctagctaatcttgaatgttttcctgagacaggagcgtatgtgaaaacatcaaacactgcacatgacaggatgggtcctctcatacagatgggatggggttagaaagccagagccagtttttccatctggcgtttcctgtgtcctccaggtttatatgggaatcgaaacagtttgttaatctgattgggagagttccatgggcagatttcccttcctgaaggccaaaacggagaactgctctctttaattatttcaagagtcaagaccaaaagtttgctcagcatcacactacatctcaaaattaatgttgccaacttaattttgtgcatttgtgtcagaatgtttagtttacaaggttgggggctctctttgcttcgagaagtaaacctaataccatttttttattgtttaaagctgcattcaacgtcaaaattaccttgggtaacttttgataacttacatgtgtggacaaagctaatagtggttttttaaacagcaccttgcctgaacatgactttaaagaaattaatatattgaaaacatgtttgaacccttattttaattgcaccattaaaacatttgacttaaattgtttgaccattccagttggtgtactgttctgatttttcgttgtgtaggccgatctgcctgtcagagtccacgtgtcctggtcactggtctttataattgttgtgcaataactaaaggctaaggactagatgcactatcgtgtaaagagattacacatgactgtaccatgttgcacttaatcaaatagtatgtggggatttaaaatcgcttgcattgtttcacaaaataaatatctcaatgtcaaatactagataagcatctaagtcatttctacggaatcctgttcagataggggcacaataaaatgagtacagagcaccggggccctcacctggcaatcgcagctttcatttactgcgttgatcactgcccagtcctaaggctacaaagccatcctcactacatccttca

SEQ ID NO: 299764 - DNA, 5565 bp, Homo sapiens
cggggcggcgtgtgcccgggggcgggcgggcggcagggcagcaggaccgcggccggtgccccagccgaagccggagtcgcgcggccgggagcacgggcgccggcatagtacaatgaggcagccagcggatcttggagcctgagcccttgtgaagccggcaatgacaagtctgtatggtcgccatgccgagaaaaccactgacatgccaaaaccatcagcccctaaagtgcacgtgcagaggtccgtgtcccgagataccatcgccattcacttctcggcatccggcgaggaggaggaggaagaggaggaggagttcagggagtactttgaggaggggctggatgaccaaagcattgtaacagggctggaagccaaggaagacctctatcttgaaccccaagttggccatgaccccgccggccctgctgcctcgcctgtcctggcagatggactgtccgtgtcccaggcccctgccattattgcccgtctccaagaacactgtaaagctgttggagtcccctgttccagcagcacaagtattaagtacagtgccattgggctgtgtccccagggtcgtcttcgtcggggcccttagctagctctcccagatgtgtcatcccatttctgagcagaaaaccagttcttcctccccattgtcctctccttctaagtctcccatcctctcatccagtgcctcaagctccaccctttccagtgcaaaaaccttcatgagccttgtgaagtccctgtcgaccgaggtggagccaaaagaatccccacaccccgcaaggcacaggcacttgatgaagacattagtcaagtctctgtccacggacacttcccggcaggagtcggatacagtgtcctataagccacctgattccaaactgaacttacacctgttcaagcagttcacacagccccgaaacacaggtggagattccaaaactgcaccttcttccccactgacttctccctctgatactcgttccttttttaaagtgcccgaaatggaggctaaaattgaagatactaaacgacgcctttcagaagtcatctatgagccttttcagctccttagtaaaattataggggaagaaagtggcagccataggcccaaagccttatcttcaagtgcttcagaactctccaatctgtccagcttgaatgggcacttggaaagcaataacaactacagcatcaaggaggaggagtgtgattctgagggggatggctacggaagtgattccaacatccccagaagtgaccacccaaagtccactggtgagcccacaagagagatagaactgaaaagttcccaggggagcagtctgaaggatttaggcctgaagacaagttctctagttctggagaaatgttctttgtctgccttagtgagcaaagaagatgaagagttttgtgaactgtacactgaggacttcgatttggaaacggagggggagagtaaagttgataagctctcagatattcctctcaagccagaggtgctcgcggaagatggtgtggtccttgacagtgaggacgaggtggactcggccgtgcagcacccggaattgccagtgaagacgttgggcttctttataatgtgtgtctatgtgtacctcatcctccccctcccccactatgtgagtggactctttctgggaattggccttggattcatgactgcagtttgcgtgatttggttttttacaccaccaagtgctcataaatatcacaagttacacaaaaatctgcgacactggaacacaagatctctggatatcaaagaacctgaaatactgaagggatggatgaatgagatttacaactatgatccagaaacctaccatgcgactttgacacattcagtctttgttcgacttgagggtggaaccttaagactttcaaagcccaataaaaatatatccaggagggccagctacaatgaacccaagccagaggtcacctacatcagccagaaaatctatgacctctcagacagcaagatttatcttgtacctaaaactttggctcgaaagcgaatctggaataaaaagtaccccatttgtatcgagcttggtcagcaagatgactttatgtctaaagctcagactgataaggagacttcagaagagaagccgccagctgagggaagtgaggaccctaagaagccaccccgccctcaggagggaacaagatctagccagcgagatcagatactctatctctttgggagaactggccgagaaaaagaggaatggtttaggagatttattctggcatctaagctaaagtcggaaatcaagaagtcatcgggtgtctctggaggtaaaccagggcttttgcctgcacacagcagacacaacagtccgtccgggcacctgacccacagccgcagcagcagcaaaggcagtgtggaggagatcatgtcacagccaaagcagaaggagctggcaggcagcgtgcggcagaagatgcttctcgactacagcgtgtacatgggcaggtgtgtcccccaggaaagccgaagcccccagaggagccccctgcagagtgcggagagcagccccacagctgggaagaagttgccagaggttccaccctctgaggaggaagaacaggaagcctgggtgaatgccttgcttggaagaatattttgggacttcttaggagagaaatactggtctgatctggtgtctaagaagatccaaatgaaactcagcaaaataaagctcccctactttatgaatgagctcactctgacggaacttgacatgggcgtggctgtgccaaaaatcctccaggccttcaagccttacgttgatcaccaaggactctggattgatttggaaatgtcctacaatgggtcctttctgatgactctcgagaccaaaatgaatttgaccaaactaggtaaagagcctcttgttgaagccctgaaggttggagaaattggcaaagaaggttgcaggccccgggcattctgtctggcggacagcgatgaggaatcctccagcgctggctcctccgaggaagacgatgccccagagcccagcgggggagacaaacagctcctcccaggggctgaagggtacgttggaggtcatcgaacaagtaagattatgaggtttgttgataaaattaccaagtcaaaatatttccaaaaagcaacagagacagagtttattaaaaagaagatcgaagaagtctccaacacacccctgctgctcactgttgaagtacaagaatgtagaggaaccttggcggtcaacattccaccacccccgactgaccgagtatggtatggtttccgaaagccaccacatgtggagctgaaagctcggccaaaacttggagagagagaagtgactttagttcatgtgacagactggatagagaagaaactggagcaagagtttcagaaagtttttgtcatgccaaacatggatgatgtttatatcactataatgcactcagccatggaccctcgctctacttcctgcctcctgaaagacccacctgtggaggctgctgatcagccatgatgggtgatgtcagatgttccccatattgtgacatcgagctggatgtgtggggttcttggccgccatctgtactgtagcactggcctctgtgccacagctactgtttcttaaaggactgcttctgccctctgcctgccagtgcccattccactgtgaggtgtcattccctgcatctagtgacaactgtctggattgcctgctgcaaagctttgatttggcaaaggagaccatggaagaatcatggtggatccagaagttatacgtgacccacaccatggcttttaaaagtctacccatgtttgtggcagcaaatgagcacagtaagagcaaagctgaacaacttgcctcctctactcctccaaagcttttcttcaggcagccggtgcacagtggactttttcacttctatactttgtatgcggccttccacacttccagagaatgtcagtgtgcaatgtgtctggagggtggggagaggaattctgtgagccttttcatttcggtgacagaagagatgggcagagcaacttattttccacattaaattgtgcatttgggaagcaagtagccatagtacacacacaacacgctatcagcttgggtaaggacagtgggatttatgtgaacatcaggcaaagccatgagatcaaaccatcccaagcctttcaccaatgaggtacaaccacctgggggctagctaatcttgaatgttttcctgagacaggagcgtatgtgaaaacatcaaacactgcacatgacaggatgggtcctctcatacagatgggatggggttagaaagccagagccagtttttccatctggcgtttcctgtgtcctccaggtttatatgggaatcgaaacagtttgttaatctgattgggagagttccatgggcagatttcccttcctgaaggccaaaacggagaactgctctctttaattatttcaagagtcaagaccaaaagtttgctcagcatcacactacatctcaaaattaatgttgccaacttaattttgtgcatttgtgtcagaatgtttagtttacaaggttgggggctctctttgcttcgagaagtaaacctaataccatttttttattgtttaaagctgcattcaacgtcaaaattaccttgggtaacttttgataacttacatgtgtggacaaagctaatagtggttttttaaacagcaccttgcctgaacatgactttaaagaaattaatatattgaaaacatgtttgaacccttattttaattgcaccattaaaacatttgacttaaattgtttgaccattccagttggtgtactgttctgatttttcgttgtgtaggccgatctgcctgtcagagtccacgtgtcctggtcactggtctttataattgttgtgcaataactaaaggctaaggactagatgcactatcgtgtaaagagattacacatgactgtaccatgttgcacttaatcaaatagtatgtggggatttaaaatcgcttgcattgtttcacaaaataaatatctcaatgtcaaataaaaaaaaaaaaaaaaaaaaacaaaaaaaaaaaaagaaaaaaaaaaaaaaaaaaaaaaaaaaaaaaaagaaaaaaaaaaaaaaaaaaaaacaaaacaaaacacaaaaaaaaaaacaaaaaaaagagaggaggggggggcgggccaaaaaaaatttaccccgcgggggggccccccctagccccacccccccttttgtgctgacagagagcggtcgcccccaaagtagagggatctgatcataaaagaagggacgaccacgacgtcacgcttcaaacaaaccatggtggtcgaagaaacacacaagatagtcgggtcgattatcgtatcgaagaaacccacccactcgcggtgaggcaatacaatgtgaagagacccaccccccagaacaagacgagccggcggaagaaaaaaaacaagggacggtgatcaattcaaccaccacgaatccgcgcggaagagggagccgagagtataaataaaacgcgc

SEQ ID NO: 299765 - DNA, 5186 bp, Homo sapiens
cggggcggcgtgtgcccgggggcgggcgggcggcagggcagcaggaccgcggccggtgccccagccgaagccggagtcgcgcggccgggagcacgggcgccggcatagtacaatgaggcagccagcggatcttggagcctgagcccttgtgaagccggcaatgacaagtctgtatggtcgccatgccgagaaaaccactgacatgccaaaaccatcagcccctaaagtgcacgtgcagaggtccgtgtcccgagataccatcgccattcacttctcggcatccggcgaggaggaggaggaagaggaggaggagttcagggagtactttgaggaggggctggatgaccaaagcattgtaacagggctggaagccaaggaagacctctatcttgaaccccaagttggccatgaccccgccggccctgctgcctcgcctgtcctggcagatggactgtccgtgtcccaggcccctgccattattgcccgtctccaagaacactgtaaagctgttggagtcccctgttccagcagcacaagtattaagtacagtgccattgggctgtgtccccagggtcgtcttcgtcggggcccttagctagctctcccagatgtgtcatcccatttctgagcagaaaaccagttcttcctccccattgtcctctccttctaagtctcccatcctctcatccagtgcctcaagctccaccctttccagtgcaaaaaccttcatgagccttgtgaagtccctgtcgaccgaggtggagccaaaagaatccccacaccccgcaaggcacaggcacttgatgaagacattagtcaagtctctgtccacggacacttcccggcaggagtcggatacagtgtcctataagccacctgattccaaactgaacttacacctgttcaagcagttcacacagccccgaaacacaggtggagattccaaaactgcaccttcttccccactgacttctccctctgatactcgttccttttttaaagtgcccgaaatggaggctaaaattgaagatactaaacgacgcctttcagaagtcatctatgagccttttcagctccttagtaaaattataggggaagaaagtggcagccataggcccaaagccttatcttcaagtgcttcagaactctccaatctgtccagcttgaatgggcacttggaaagcaataacaactacagcatcaaggaggaggagtgtgattctgagggggatggctacggaagtgattccaacatccccagaagtgaccacccaaagtccactggtgagcccacaagagagatagaactgaaaagttcccaggggagcagtctgaaggatttaggcctgaagacaagttctctagttctggagaaatgttctttgtctgccttagtgagcaaagaagatgaagagttttgtgaactgtacactgaggacttcgatttggaaacggagggggagagtaaagttgataagctctcagatattcctctcaagccagaggtgctcgcggaagatggtgtggtccttgacagtgaggacgaggtggactcggccgtgcagcacccggaattgccagtgaagacgttgggcttctttataatgtgtgtctatgtgtacctcatcctccccctcccccactatgtgagtggactctttctgggaattggccttggattcatgactgcagtttgcgtgatttggttttttacaccaccaagtgctcataaatatcacaagttacacaaaaatctgcgacactggaacacaagatctctggatatcaaagaacctgaaatactgaagggatggatgaatgagatttacaactatgatccagaaacctaccatgcgactttgacacattcagtctttgttcgacttgagggtggaaccttaagactttcaaagcccaataaaaatatatccaggagggccagctacaatgaacccaagccagaggtcacctacatcagccagaaaatctatgacctctcagacagcaagatttatcttgtacctaaaactttggctcgaaagcgaatctggaataaaaagtaccccatttgtatcgagcttggtcagcaagatgactttatgtctaaagctcagactgataaggagacttcagaagagaagccgccagctgagggaagtgaggaccctaagaagccaccccgccctcaggagggaacaagatctagccagcgagatcagatactctatctctttgggagaactggccgagaaaaagaggaatggtttaggagatttattctggcatctaagctaaagtcggaaatcaagaagtcatcgggtgtctctggaggtaaaccagggcttttgcctgcacacagcagacacaacagtccgtccgggcacctgacccacagccgcagcagcagcaaaggcagtgtggaggagatcatgtcacagccaaagcagaaggagctggcaggcagcgtgcggcagaagatgcttctcgactacagcgtgtacatgggcaggtgtgtcccccaggaaagccgaagcccccagaggagccccctgcagagtgcggagagcagccccacagctgggaagaagttgccagaggttccaccctctgaggaggaagaacaggaagcctgggtgaatgccttgcttggaagaatattttgggacttcttaggagagaaatactggtctgatctggtgtctaagaagatccaaatgaaactcagcaaaataaagctcccctactttatgaatgagctcactctgacggaacttgacatgggcgtggctgtgccaaaaatcctccaggccttcaagccttacgttgatcaccaaggactctggattgatttggaaatgtcctacaatgggtcctttctgatgactctcgagaccaaaatgaatttgaccaaactaggtaaagagcctcttgttgaagccctgaaggttggagaaattggcaaagaaggttgcaggccccgggcattctgtctggcggacagcgatgaggaatcctccagcgctggctcctccgaggaagacgatgccccagagcccagcgggggagacaaacagctcctcccaggggctgaagggtacgttggaggtcatcgaacaagtaagattatgaggtttgttgataaaattaccaagtcaaaatatttccaaaaagcaacagagacagagtttattaaaaagaagatcgaagaagtctccaacacacccctgctgctcactgttgaagtacaagaatgtagaggaaccttggcggtcaacattccaccacccccgactgaccgagtatggtatggtttccgaaagccaccacatgtggagctgaaagctcggccaaaacttggagagagagaaaaagtttttgtcatgccaaacatggatgatgtttatatcactataatgcactcagccatggaccctcgctctacttcctgcctcctgaaagacccacctgtggaggctgctgatcagccatgatgggtgatgtcagatgttccccatattgtgacatcgagctggatgtgtggggttcttggccgccatctgtactgtagcactggcctctgtgccacagctactgtttcttaaaggactgcttctgccctctgcctgccagtgcccattccactgtgaggtgtcattccctgcatctagtgacaactgtctggattgcctgctgcaaagctttgatttggcaaaggagaccatggaagaatcatggtggatccagaagttatacgtgacccacaccatggcttttaaaagtctacccatgtttgtggcagcaaatgagcacagtaagagcaaagctgaacaacttgcctcctctactcctccaaagcttttcttcaggcagccggtgcacagtggactttttcacttctatactttgtatgcggccttccacacttccagagaatgtcagtgtgcaatgtgtctggagggtggggagaggaattctgtgagccttttcatttcggtgacagaagagatgggcagagcaacttattttccacattaaattgtgcatttgggaagcaagtagccatagtacacacacaacacgctatcagcttgggtaaggacagtgggatttatgtgaacatcaggcaaagccatgagatcaaaccatcccaagcctttcaccaatgaggtacaaccacctgggggctagctaatcttgaatgttttcctgagacaggagcgtatgtgaaaacatcaaacactgcacatgacaggatgggtcctctcatacagatgggatggggttagaaagccagagccagtttttccatctggcgtttcctgtgtcctccaggtttatatgggaatcgaaacagtttgttaatctgattgggagagttccatgggcagatttcccttcctgaaggccaaaacggagaactgctctctttaattatttcaagagtcaagaccaaaagtttgctcagcatcacactacatctcaaaattaatgttgccaacttaattttgtgcatttgtgtcagaatgtttagtttacaaggttgggggctctctttgcttcgagaagtaaacctaataccatttttttattgtttaaagctgcattcaacgtcaaaattaccttgggtaacttttgataacttacatgtgtggacaaagctaatagtggttttttaaacagcaccttgcctgaacatgactttaaagaaattaatatattgaaaacatgtttgaacccttattttaattgcaccattaaaacatttgacttaaattgtttgaccattccagttggtgtactgttctgatttttcgttgtgtaggccgatctgcctgtcagagtccacgtgtcctggtcactggtctttataattgttgtgcaataactaaaggctaaggactagatgcactatcgtgtaaagagattacacatgactgtaccatgttgcacttaatcaaatagtatgtggggatttaaaatcgcttgcattgtttcacaaaataaatatctcaatgtcaaatactagataagcatctaagtcatttctacggaatcctgttcagataggggcacaataaaatgagtacagagcaccggggccctcacctggcaatcgcagctttcatttactgcgttgatcactgcccagtcctaaggctacaaagccatcctcactacatccttca

SEQ ID NO: 299766 - DNA, 5190 bp, Homo sapiens
cggggcggcgtgtgcccgggggcgggcgggcggcagggcagcaggaccgcggccggtgccccagccgaagccggagtcgcgcggccgggagcacgggcgccggcatagtacaatgaggcagccagcggatcttggagcctgagcccttgtgaagccggcaatgacaagtctgtatggtcgccatgccgagaaaaccactgacatgccaaaaccatcagcccctaaagtgcacgtgcagaggtccgtgtcccgagataccatcgccattcacttctcggcatccggcgaggaggaggaggaagaggaggaggagttcagggagtactttgaggaggggctggatgaccaaagcattgtaacagggctggaagccaaggaagacctctatcttgaaccccaagttggccatgaccccgccggccctgctgcctcgcctgtcctggcagatggactgtccgtgtcccaggcccctgccattattgcccgtctccaagaacactgtaaagctgttggagtcccctgttccagcagcacaagtattaagtacagtgccattgggctgtgtccccagggtcgtcttcgtcggggcccttagctagctctcccagatgtgtcatcccatttctgagcagaaaaccagttcttcctccccattgtcctctccttctaagtctcccatcctctcatccagtgcctcaagctccaccctttccagtgcaaaaaccttcatgagccttgtgaagtccctgtcgaccgaggtggagccaaaagaatccccacaccccgcaaggcacaggcacttgatgaagacattagtcaagtctctgtccacggacacttcccggcaggagtcggatacagtgtcctataagccacctgattccaaactgaacttacacctgttcaagcagttcacacagccccgaaacacaggtggagattccaaaactgcaccttcttccccactgacttctccctctgatactcgttccttttttaaagtgcccgaaatggaggctaaaattgaagatactaaacgacgcctttcagaagtcatctatgagccttttcagctccttagtaaaattataggggaagaaagtggcagccataggcccaaagccttatcttcaagtgcttcagaactctccaatctgtccagcttgaatgggcacttggaaagcaataacaactacagcatcaaggaggaggagtgtgattctgagggggatggctacggaagtgattccaacatccccagaagtgaccacccaaagtccactggtgagcccacaagagagatagaactgaaaagttcccaggggagcagtctgaaggatttaggcctgaagacaagttctctagttctggagaaatgttctttgtctgccttagtgagcaaagaagatgaagagttttgtgaactgtacactgaggacttcgatttggaaacggagggggagagtaaagttgataagctctcagatattcctctcaagccagaggtgctcgcggaagatggtgtggtccttgacagtgaggacgaggtggactcggccgtgcagcacccggaattgccagtgaagacgttgggcttctttataatgtgtgtctatgtgtacctcatcctccccctcccccactatgtgagtggactctttctgggaattggccttggattcatgactgcagtttgcgtgatttggttttttacaccaccaagtgctcataaatatcacaagttacacaaaaatctgcgacactggaacacaagatctctggatatcaaagaacctgaaatactgaagggatggatgaatgagatttacaactatgatccagaaacctaccatgcgactttgacacattcagtctttgttcgacttgagggtggaaccttaagactttcaaagcccaataaaaatatatccaggagggccagctacaatgaacccaagccagaggtcacctacatcagccagaaaatctatgacctctcagacagcaagatttatcttgtacctaaaactttggctcgaaagcgaatctggaataaaaagtaccccatttgtatcgagcttggtcagcaagatgactttatgtctaaagctcagactgataaggagacttcagaagagaagccgccagctgagggaagtgaggaccctaagaagccaccccgccctcaggagggaacaagatctagccagcgagatcagatactctatctctttgggagaactggccgagaaaaagaggaatggtttaggagatttattctggcatctaagctaaagtcggaaatcaagaagtcatcgggtgtctctggaggtaaaccagggcttttgcctgcacacagcagacacaacagtccgtccgggcacctgacccacagccgcagcagcagcaaaggcagtgtggaggagatcatgtcacagccaaagcagaaggagctggcaggcagcgtgcggcagaagatgcttctcgactacagcgtgtacatgggcaggtgtgtcccccaggaaagccgaagcccccagaggagccccctgcagagtgcggagagcagccccacagctgggaagaagttgccagaggttccaccctctgaggaggaagaacaggaagcctgggtgaatgccttgcttggaagaatattttgggacttcttaggagagaaatactggtctgatctggtgtctaagaagatccaaatgaaactcagcaaaataaagctcccctactttatgaatgagctcactctgacggaacttgacatgggcgtggctgtgccaaaaatcctccaggccttcaagccttacgttgatcaccaaggactctggattgatttggaaatgtcctacaatgggtcctttctgatgactctcgagaccaaaatgaatttgaccaaactaggtaaagagcctcttgttgaagccctgaaggttggagaaattggcaaagaaggttgcaggccccgggcattctgtctggcggacagcgatgaggaatcctccagcgctggctcctccgaggaagacgatgccccagagcccagcgggggagacaaacagctcctcccaggggctgaagggtacgttggaggtcatcgaacaagtaagattatgaggtttgttgataaaattaccaagtcaaaatatttccaaaaagcaacagagacagagtttattaaaaagaagatcgaagaagtctccaacacacccctgctgctcactgttgaagtacaagaatgtagaggaaccttggcggtcaacattccaccacccccgactgaccgagtatggtatggtttccgaaagccaccacatgtggagctgaaagctcggccaaaacttggagagagagaagtgactttagttcatgtgacagactggatagagaagaaactggagcaagagtttcagaaagtttttgtcatgccaaacatggatgatgtttatatcactataatgcactcagccatggaccctcgctctacttcctgcctcctgaaagacccacctgtggaggctgctgatcagccatgatgggtgatgtcagatgttccccatattgtgacatcgagctggatgtgtggggttcttggccgccatctgtactgtagcactggcctctgtgccacagctactgtttcttaaaggactgcttctgccctctgcctgccagtgcccattccactgtgaggtgtcattccctgcatctagtgacaactgtctggattgcctgctgcaaagctttgatttggcaaaggagaccatggaagaatcatggtggatccagaagttatacgtgacccacaccatggcttttaaaagtctacccatgtttgtggcagcaaatgagcacagtaagagcaaagctgaacaacttgcctcctctactcctccaaagcttttcttcaggcagccggtgcacagtggactttttcacttctatactttgtatgcggccttccacacttccagagaatgtcagtgtgcaatgtgtctggagggtggggagaggaattctgtgagccttttcatttcggtgacagaagagatgggcagagcaacttattttccacattaaattgtgcatttgggaagcaagtagccatagtacacacacaacacgctatcagcttgggtaaggacagtgggatttatgtgaacatcaggcaaagccatgagatcaaaccatcccaagcctttcaccaatgaggtacaaccacctgggggctagctaatcttgaatgttttcctgagacaggagcgtatgtggggttagaaagccagagccagtttttccatctggcgtttcctgtgtcctccaggtttatatgggaatcgaaacagtttgttaatctgattgggagagttccatgggcagatttcccttcctgaaggccaaaacggagaactgctctctttaattatttcaagagtcaagaccaaaagtttgctcagcatcacactacatctcaaaattaatgttgccaacttaattttgtgcatttgtgtcagaatgtttagtttacaaggttgggggctctctttgcttcgagaagtaaacctaataccatttttttattgtttaaagctgcattcaacgtcaaaattaccttgggtaacttttgataacttacatgtgtggacaaagctaatagtggttttttaaacagcaccttgcctgaacatgactttaaagaaattaatatattgaaaacatgtttgaacccttattttaattgcaccattaaaacatttgacttaaattgtttgaccattccagttggtgtactgttctgatttttcgttgtgtaggccgatctgcctgtcagagtccacgtgtcctggtcactggtctttataattgttgtgcaataactaaaggctaaggactagatgcactatcgtgtaaagagattacacatgactgtaccatgttgcacttaatcaaatagtatgtggggatttaaaatcgcttgcattgtttcacaaaataaatatctcaatgtcaaatactagataagcatctaagtcatttctacggaatcctgttcagataggggcacaataaaatgagtacagagcaccggggccctcacctggcaatcgcagctttcatttactgcgttgatcactgcccagtcctaaggctacaaagccatcctcactacatccttca

SEQ ID NO: 299767 - DNA, 5227 bp, Homo sapiens
cggggcggcgtgtgcccgggggcgggcgggcggcagggcagcaggaccgcggccggtgccccagccgaagccggagtcgcgcggccgggagcacgggcgccggcatagtacaatgaggcagccagcggatcttggagcctgagcccttgtgaagccggcaatgacaagtctgtatggtcgccatgccgagaaaaccactgacatgccaaaaccatcagcccctaaagtgcacgtgcagaggtccgtgtcccgagataccatcgccattcacttctcggcatccggcgaggaggaggaggaagaggaggaggagttcagggagtactttgaggaggggctggatgaccaaagcattgtaacagggctggaagccaaggaagacctctatcttgaaccccaagttggccatgaccccgccggccctgctgcctcgcctgtcctggcagatggactgtccgtgtcccaggcccctgccattattgcccgtctccaagaacactgtaaagctgttggagtcccctgttccagcagcacaagtattaagtacagtgccattgggctgtgtccccagggtcgtcttcgtcggggcccttagctagctctcccagatgtgtcatcccatttctgagcagaaaaccagttcttcctccccattgtcctctccttctaagtctcccatcctctcatccagtgcctcaagctccaccctttccagtgcaaaaaccttcatgagccttgtgaagtccctgtcgaccgaggtggagccaaaagaatccccacaccccgcaaggcacaggcacttgatgaagacattagtcaagtctctgtccacggacacttcccggcaggagtcggatacagtgtcctataagccacctgattccaaactgaacttacacctgttcaagcagttcacacagccccgaaacacaggtggagattccaaaactgcaccttcttccccactgacttctccctctgatactcgttccttttttaaagtgcccgaaatggaggctaaaattgaagatactaaacgacgcctttcagaagtcatctatgagccttttcagctccttagtaaaattataggggaagaaagtggcagccataggcccaaagccttatcttcaagtgcttcagaactctccaatctgtccagcttgaatgggcacttggaaagcaataacaactacagcatcaaggaggaggagtgtgattctgagggggatggctacggaagtgattccaacatccccagaagtgaccacccaaagtccactggtgagcccacaagagagatagaactgaaaagttcccaggggagcagtctgaaggatttaggcctgaagacaagttctctagttctggagaaatgttctttgtctgccttagtgagcaaagaagatgaagagttttgtgaactgtacactgaggacttcgatttggaaacggagggggagagtaaagttgataagctctcagatattcctctcaagccagaggtgctcgcggaagatggtgtggtccttgacagtgaggacgaggtggactcggccgtgcagcacccggaattgccagtgaagacgttgggcttctttataatgtgtgtctatgtgtacctcatcctccccctcccccactatgtgagtggactctttctgggaattggccttggattcatgactgcagtttgcgtgatttggttttttacaccaccaagtgctcataaatatcacaagttacacaaaaatctgcgacactggaacacaagatctctggatatcaaagaacctgaaatactgaagggatggatgaatgagatttacaactatgatccagaaacctaccatgcgactttgacacattcagtctttgttcgacttgagggtggaaccttaagactttcaaagcccaataaaaatatatccaggagggccagctacaatgaacccaagccagaggtcacctacatcagccagaaaatctatgacctctcagacagcaagatttatcttgtacctaaaactttggctcgaaagcgaatctggaataaaaagtaccccatttgtatcgagcttggtcagcaagatgactttatgtctaaagctcagactgataaggagacttcagaagagaagccgccagctgagggaagtgaggaccctaagaagccaccccgccctcaggagggaacaagatctagccagcgagatcagatactctatctctttgggagaactggccgagaaaaagaggaatggtttaggagatttattctggcatctaagctaaagtcggaaatcaagaagtcatcgggtgtctctggaggtaaaccagggcttttgcctgcacacagcagacacaacagtccgtccgggcacctgacccacagccgcagcagcagcaaaggcagtgtggaggagatcatgtcacagccaaagcagaaggagctggcaggcagcgtgcggcagaagatgcttctcgactacagcgtgtacatgggcaggtgtgtcccccaggaaagccgaagcccccagaggagccccctgcagagtgcggagagcagccccacagctgggaagaagttgccagaggttccaccctctgaggaggaagaacaggaagcctgggtgaatgccttgcttggaagaatattttgggacttcttaggagagaaatactggtctgatctggtgtctaagaagatccaaatgaaactcagcaaaataaagctcccctactttatgaatgagctcactctgacggaacttgacatgggcgtggctgtgccaaaaatcctccaggccttcaagccttacgttgatcaccaaggactctggattgatttggaaatgtcctacaatgggtcctttctgatgactctcgagaccaaaatgaatttgaccaaactaggtaaagagcctcttgttgaagccctgaaggttggagaaattggcaaagaaggttgcaggccccgggcattctgtctggcggacagcgatgaggaatcctccagcgctggctcctccgaggaagacgatgccccagagcccagcgggggagacaaacagctcctcccaggggctgaagggtacgttggaggtcatcgaacaagtaagattatgaggtttgttgataaaattaccaagtcaaaatatttccaaaaagcaacagagacagagtttattaaaaagaagatcgaagaagtctccaacacacccctgctgctcactgttgaagtacaagaatgtagaggaaccttggcggtcaacattccaccacccccgactgaccgagtatggtatggtttccgaaagccaccacatgtggagctgaaagctcggccaaaacttggagagagagaagtgactttagttcatgtgacagactggatagagaagaaactggagcaagagtttcagaaagtttttgtcatgccaaacatggatgatgtttatatcactataatgcactcagccatggaccctcgctctacttcctgcctcctgaaagacccacctgtggaggctgctgatcagccatgatgggtgatgtcagatgttccccatattgtgacatcgagctggatgtgtggggttcttggccgccatctgtactgtagcactggcctctgtgccacagctactgtttcttaaaggactgcttctgccctctgcctgccagtgcccattccactgtgaggtgtcattccctgcatctagtgacaactgtctggattgcctgctgcaaagctttgatttggcaaaggagaccatggaagaatcatggtggatccagaagttatacgtgacccacaccatggcttttaaaagtctacccatgtttgtggcagcaaatgagcacagtaagagcaaagctgaacaacttgcctcctctactcctccaaagcttttcttcaggcagccggtgcacagtggactttttcacttctatactttgtatgcggccttccacacttccagagaatgtcagtgtgcaatgtgtctggagggtggggagaggaattctgtgagccttttcatttcggtgacagaagagatgggcagagcaacttattttccacattaaattgtgcatttgggaagcaagtagccatagtacacacacaacacgctatcagcttgggtaaggacagtgggatttatgtgaacatcaggcaaagccatgagatcaaaccatcccaagcctttcaccaatgaggtacaaccacctgggggctagctaatcttgaatgttttcctgagacaggagcgtatgtgaaaacatcaaacactgcacatgacaggatgggtcctctcatacagatgggatggggttagaaagccagagccagtttttccatctggcgtttcctgtgtcctccaggtttatatgggaatcgaaacagtttgttaatctgattgggagagttccatgggcagatttcccttcctgaaggccaaaacggagaactgctctctttaattatttcaagagtcaagaccaaaagtttgctcagcatcacactacatctcaaaattaatgttgccaacttaattttgtgcatttgtgtcagaatgtttagtttacaaggttgggggctctctttgcttcgagaagtaaacctaataccatttttttattgtttaaagctgcattcaacgtcaaaattaccttgggtaacttttgataacttacatgtgtggacaaagctaatagtggttttttaaacagcaccttgcctgaacatgactttaaagaaattaatatattgaaaacatgtttgaacccttattttaattgcaccattaaaacatttgacttaaattgtttgaccattccagttggtgtactgttctgatttttcgttgtgtaggccgatctgcctgtcagagtccacgtgtcctggtcactggtctttataattgttgtgcaataactaaaggctaaggactagatgcactatcgtgtaaagagacatgttgcacttaatcaaatagtatgtggggatttaaaatcgcttgcattgtttcacaaaataaatatctcaatgtcaaatactagataagcatctaagtcatttctacggaatcctgttcagataggggcacaataaaatgagtacagagcaccggggccctcacctggcaatcgcagctttcatttactgcgttgatcactgcccagtcctaaggctacaaagccatcctcactacatccttca

SEQ ID NO: 299768 - DNA, 4799 bp, Homo sapiens
cggggcggcgtgtgcccgggggcgggcgggcggcagggcagcaggaccgcggccggtgccccagccgaagccggagtcgcgcggccgggagcacgggcgccggcatagtacaatgaggcagccagcggatcttggagcctgagcccttgtgaagccggcaatgacaagtctgtatggtcgccatgccgagaaaaccactgacatgccaaaaccatcagcccctaaagtgcacgtgcagaggtccgtgtcccgagataccatcgccattcacttctcggcatccggcgaggaggaggaggaagaggaggaggagttcagggagtactttgaggaggggctggatgaccaaagcattgtaacagggctggaagccaaggaagacctctatcttgaaccccaagttggccatgaccccgccggccctgctgcctcgcctgtcctggcagatggactgtccgtgtcccaggcccctgccattattgcccgtctccaagaacactgtaaagctgttggagtcccctgttccagcagcacaagtattaagtacagtgccattgggctgtgtccccagggtcgtcttcgtcggggcccttagctagctctcccagatgtgtcatcccatttctgagcagaaaaccagttcttcctccccattgtcctctccttctaagtctcccatcctctcatccagtgcctcaagctccaccctttccagtgcaaaaaccttcatgagccttgtgaagtccctgtcgaccgaggtggagccaaaagaatccccacaccccgcaaggcacaggcacttgatgaagacattagtcaagtctctgtccacggacacttcccggcaggagtcggatacagtgtcctataagccacctgattccaaactgaacttacacctgttcaagcagttcacacagccccgaaacacaggtggagattccaaaactgcaccttcttccccactgacttctccctctgatactcgttccttttttaaagtgcccgaaatggaggctaaaattgaagatactaaacgacgcctttcagaagtcatctatgagccttttcagctccttagtaaaattataggggaagaaagtggcagccataggcccaaagccttatcttcaagtgcttcagaactctccaatctgtccagcttgaatgggcacttggaaagcaataacaactacagcatcaaggaggaggagtgtgattctgagggggatggctacggaagtgattccaacatccccagaagtgaccacccaaagtccactggtgagcccacaagagagatagaactgaaaagttcccaggggagcagtctgaaggatttaggcctgaagacaagttctctagttctggagaaatgttctttgtctgccttagtgagcaaagaagatgaagagttttgtgaactgtacactgaggacttcgatttggaaacggagggggagagtaaagttgataagctctcagatattcctctcaagccagaggtgctcgcggaagatggtgtggtccttgacagtgaggacgaggtggactcggccgtgcagcacccggaattgccagtgaagacgttgggcttctttataatgtgtgtctatgtgtacctcatcctccccctcccccactatgtgagtggactctttctgggaattggccttggattcatgactgcagtttgcgtgatttggttttttacaccaccaagtgctcataaatatcacaagttacacaaaaatctgcgacactggaacacaagatctctggatatcaaagaacctgaaatactgaagggatggatgaatgagatttacaactatgatccagaaacctaccatgcgactttgacacattcagtctttgttcgacttgagggtggaaccttaagactttcaaagcccaataaaaatatatccaggagggccagctacaatgaacccaagccagaggtcacctacatcagccagaaaatctatgacctctcagacagcaagatttatcttgtacctaaaactttggctcgaaagcgaatctggaataaaaagtaccccatttgtatcgagcttggtcagcaagatgactttatgtctaaagctcagactgataaggagacttcagaagagaagccgccagctgagggaagtgaggaccctaagaagccaccccgccctcaggagggaacaagatctagccagcgagatcagatactctatctctttgggagaactggccgagaaaaagaggaatggtttaggagatttattctggcatctaagctaaagtcggaaatcaagaagtcatcgggtgtctctggaggtaaaccagggcttttgcctgcacacagcagacacaacagtccgtccgggcacctgacccacagccgcagcagcagcaaaggcagtgtggaggagatcatgtcacagccaaagcagaaggagctggcaggcagcgtgcggcagaagatgcttctcgactacagcgtgtacatgggcaggtgtgtcccccaggaaagccgaagcccccagaggagccccctgcagagtgcggagagcagccccacagctgggaagaagttgccagaggttccaccctctgaggaggaagaacaggaagcctgggtgaatgccttgcttggaagaatattttgggacttcttaggagagaaatactggtctgatctggtgtctaagaagatccaaatgaaactcagcaaaataaagctcccctactttatgaatgagctcactctgacggaacttgacatgggcgtggctgtgccaaaaatcctccaggccttcaagccttacgttgatcaccaaggactctggattgatttggaaatgtcctacaatgggtcctttctgatgactctcgagaccaaaatgaatttgaccaaactaggtaaagagcctcttgttgaagccctgaaggttggagaaattggcaaagaaggttgcaggccccgggcattctgtctggcggacagcgatgaggaatcctccagcgctggctcctccgaggaagacgatgccccagagcccagcgggggagacaaacagctcctcccaggggctgaagggtacgttggaggtcatcgaacaagtaagattatgaggtttgttgataaaattaccaagtcaaaatatttccaaaaagcaacagagacagagtttattaaaaagaagatcgaagaagtctccaacacacccctgctgctcactgttgaagtacaagaatgtagaggaaccttggcggtcaacattccaccacccccgactgaccgagtatggtatggtttccgaaagccaccacatgtggagctgaaagctcggccaaaacttggagagagagaagtgactttagttcatgtgacagactggatagagaagaaactggagcaagagtttcagaaagtttttgtcatgccaaacatggatgatgtttatatcactataatgcactcagccatggaccctcgctctacttcctgcctcctgaaagacccacctgtggaggctgctgatcagccatgatgggtgatgtcagatgttccccatattgtgacatcgagctggatgtgtggggttcttggccgccatctgtactgtagcactggcctctgtgccacagctactgtttcttaaaggactgcttctgccctctgcctgccagtgcccattccactgtgaggtgtcattccctgcatctagtgacaactgtctggattgcctgctgcaaagctttgatttggcaaaggagaccatggaagaatcatggtggatccagaagttatacgtgacccacaccatggcttttaaaagtctacccatgtttgtggcagcaaatgagcacagtaagagcaaagctgaacaacttgcctcctctactcctccaaagcttttcttcaggcagccggtgcacagtggactttttcacttctatactttgtatgcggccttccacacttccagagaatgtcagtgtgcaatgtgtctggagggtggggagaggaattctgtgagccttttcatttcggtgacagaagagatgggcagagcaacttattttccacattaaattgtgcatttgggaagcaagtagccatagtacacacacaacacgctatcagcttgggtaaggacagtgggatttatgtgaacatcaggcaaagccatgagatcaaaccatcccaagcctttcaccaatgaggtacaaccacctgggggctagctaatcttgaatgttttcctgagacaggagcgtatgtgaaaacatcaaacactgcacatgacaggatgggtcctctcatacagatgggatggggttagaaagccagagccagtttttccatctggcgtttcctgtgtcctccaggtttatatgggaatcgaaacagtttgttaatctgattgggagagttccatgggcagatttcccttcctgaaggccaaaacggagaactgctctctttaattatttcaagagtcaagaccaaaagtttgctcagcatcacactacatctcaaaattaatgttgccaacttaattttgtgcatttgtgtcagaatgtttagtttacaaggttgggggctctctttgcttcgagaagtaaacctaataccatttttttattgtttaaagctgcattcaacgtcaaaattaccttgggtaacttttgataacttacatgtgtggtgcttcggcgtgtgcagtggagactcggcgtggcaacaacttcgtccactgagatttcttcaagaagtgtctggagtctcggcgtgtgca

SEQ ID NO: 299769 - DNA, 1165 bp, Homo sapiens
gagatcaaaccatcccaagcctttcaccaatgaggtacaaccacctggggctagctaatctatcagcttgggtaaggacagtgggatttatgtgaacatcaggcaaagccatgagatcaaaccatcccaagcctttcaccaatgaggtacaaccacctgggggctagctaatcttgaatgttttcctgagacaggagcgtatgtgaaaacatcaaacactgcacatgacaggatgggtcctctcatacagatgggatggggttagaaagccagagccagtttttccatctggcgtttcctgtgtcctccaggtttatatgggaatcgaaacagtttgttaatctgattgggagagttccatgggcagatttcccttcctgaaggccaaaacggagaactgctctctttaattatttcaagagtcaagaccaaaagtttgctcagcatcacactacatctcaaaattaatgttgccaacttaattttgtgcatttgtgtcagaatgtttagtttacaaggttgggggctctctttgcttcgagaagtaaacctaataccatttttttattgtttaaagctgcattcaacgtcaaaattaccttgggtaacttttgataacttacatgtgtggacaaagctaatagtggttttttaaacagcaccttgcctgaacatgactttaaagaaattaatatattgaaaacatgtttgaacccttattttaattgcaccattaaaacatttgacttaaattgtttgaccattccagttggtgtactgttctgatttttcgttgtgtaggccgatctgcctgtcagagtccacgtgtcctggtcactggtctttataattgttgtgcaataactaaaggctaaggactagatgcactatcgtgtaaagagattacacatgactgtaccatgttgcacttaatcaaatagtatgtggggatttaaaatcgcttgcattgtttcacaaaataaatatctcaatgtcaaatactagataagcatctaagtcatttctacggaatcctgttcagataggggcacaataaaatgagtacagagcaccggggccctcacctggcaatcgcagctttcatttactgcgttgatcactgcccagtcctaaggctacaaagccatcctcactacatccttca

SEQ ID NO: 299770 - DNA, 3421 bp, Homo sapiens
  misc_feature (3262)..(3262): n is a, c, g, or t
cggggcggcgtgtgcccgggggcgggcgggcggcagggcagcaggaccgcggccggtgccccagccgaagccggagtcgcgcggccgggagcacgggcgccggcatagtacaatgaggcagccagcggatcttggagcctgagcccttgtgaagccggcaatgacaagtctgtatggtcgccatgccgagaaaaccactgacatgccaaaaccatcagcccctaaagtgcacgtgcagaggtccgtgtcccgagataccatcgccattcacttctcggcatccggcgaggaggaggaggaagaggaggaggagttcagggagtactttgaggaggggctggatgaccaaagcattgtaacagggctggaagccaaggaagacctctatcttgaaccccaagttggccatgaccccgccggccctgctgcctcgcctgtcctggcagatggactgtccgtgtcccaggcccctgccattattgcccgtctccaagaacactgtaaagctgttggagtcccctgttccagcagcacaagtattaagtacagtgccattgggctgtgtccccagggtcgtcttcgtcggggcccttagctagctctcccagatgtgtcatcccatttctgagcagaaaaccagttcttcctccccattgtcctctccttctaagtctcccatcctctcatccagtgcctcaagctccaccctttccagtgcaaaaaccttcatgagccttgtgaagtccctgtcgaccgaggtggagccaaaagaatccccacaccccgcaaggcacaggcacttgatgaagacattagtcaagtctctgtccacggacacttcccggcaggagtcggatacagtgtcctataagccacctgattccaaactgaacttacacctgttcaagcagttcacacagccccgaaacacaggtggagattccaaaactgcaccttcttccccactgacttctccctctgatactcgttccttttttaaagtgcccgaaatggaggctaaaattgaagatactaaacgacgcctttcagaagtcatctatgagccttttcagctccttagtaaaattataggggaagaaagtggcagccataggcccaaagccttatcttcaagtgcttcagaactctccaatctgtccagcttgaatgggcacttggaaagcaataacaactacagcatcaaggaggaggagtgtgattctgagggggatggctacggaagtgattccaacatccccagaagtgaccacccaaagtccactggtgagcccacaagagagatagaactgaaaagttcccaggggagcagtctgaaggatttaggcctgaagacaagttctctagttctggagaaatgttctttgtctgccttagtgagcaaagaagatgaagagttttgtgaactgtacactgaggacttcgatttggaaacggagggggagagtaaagttgataagctctcagatattcctctcaagccagaggtgctcgcggaagatggtgtggtccttgacagtgaggacgaggtggactcggccgtgcagcacccggaattgccagtgaagacgttgggcttctttataatgtgtgtctatgtgtacctcatcctccccctcccccactatgtgagtggactctttctgggaattggccttggattcatgactgcagtttgcgtgatttggttttttacaccaccaagtgctcataaatatcacaagttacacaaaaatctgcgacactggaacacaagatctctggatatcaaagaacctgaaatactgaagggatggatgaatgagatttacaactatgatccagaaacctaccatgcgactttgacacattcagtctttgttcgacttgagggtggaaccttaagactttcaaagcccaataaaaatatatccaggagggccagctacaatgaacccaagccagaggtcacctacatcagccagaaaatctatgacctctcagacagcaagatttatcttgtacctaaaactttggctcgaaagcgaatctggaataaaaagtaccccatttgtatcgagcttggtcagcaagatgactttatgtctaaagctcagactgataaggagacttcagaagagaagccgccagctgagggaagtgaggaccctaagaagccaccccgccctcaggagggaacaagatctagccagcgagatcagatactctatctctttgggagaactggccgagaaaaagaggaatggtttaggagatttattctggcatctaagctaaagtcggaaatcaagaagtcatcgggtgtctctggaggtaaaccagggcttttgcctgcacacagcagacacaacagtccgtccgggcacctgacccacagccgcagcagcagcaaaggcagtgtggaggagatcatgtcacagccaaagcagaaggagctggcaggcagcgtgcggcagaagatgcttctcgactacagcgtgtacatgggcaggtgtgtcccccaggaaagccgaagcccccagaggagccccctgcagagtgcggagagcagccccacagctgggaagaagttgccagaggttccaccctctgaggaggaagaacaggaagcctgggtgaatgccttgcttggaagaatattttgggacttcttaggagagaaatactggtctgatctggtgtctaagaagatccaaatgaaactcagcaaaataaagctcccctactttatgaatgagctcactctgacggaacttgacatgggcgtggctgtgccaaaaatcctccaggccttcaagccttacgttgatcaccaaggactctggattgatttggaaatgtcctacaatgggtcctttctgatgactctcgagaccaaaatgaatttgaccaaactaggtaaagagcctcttgttgaagccctgaaggttggagaaattggcaaagaaggttgcaggccccgggcattctgtctggcggacagcgatgaggaatcctccagcgctggctcctccgaggaagacgatgccccagagcccagcgggggagacaaacagctcctcccaggggctgaagggtacgttggaggtcatcgaacaagtaagattatgaggtttgttgataaaattaccaagtcaaaatatttccaaaaagcaacagagacagagtttattaaaaagaagatcgaagaagtctccaacgcagatgctccgtctttagcagacatagcaggagaagaagcttnccacttcagatctaactctgggctacacattccacctaaacatcttgagacagagtggccatgatgggcatgcatatacactctacagtgctggtagaccctttgggtggaagttcatggtaggggcctacagtgggaatgaacgtgcgcaactctacc

SEQ ID NO: 299771 - DNA, 2783 bp, Homo sapiens
cggggcggcgtgtgcccgggggcgggcgggcggcagggcagcaggaccgcggccggtgccccagccgaagccggagtcgcgcggccgggagcacgggcgccggcatagtacaatgaggcagccagcggatcttggagcctgagcccttgtgaagccggcaatgacaagtctgtatggtcgccatgccgagaaaaccactgacatgccaaaaccatcagcccctaaagtgcacgtgcagaggtccgtgtcccgagataccatcgccattcacttctcggcatccggcgaggaggaggaggaagaggaggaggagttcagggagtactttgaggaggggctggatgaccaaagcattgtaacagggctggaagccaaggaagacctctatcttgaaccccaagttggccatgaccccgccggccctgctgcctcgcctgtcctggcagatggactgtccgtgtcccaggcccctgccattattgcccgtctccaagaacactgtaaagctgttggagtcccctgttccagcagcacaagtattaagtacagtgccattgggctgtgtccccagggtcgtcttcgtcggggcccttagctagctctcccagatgtgtcatcccatttctgagcagaaaaccagttcttcctccccattgtcctctccttctaagtctcccatcctctcatccagtgcctcaagctccaccctttccagtgcaaaaaccttcatgagccttgtgaagtccctgtcgaccgaggtggagccaaaagaatccccacaccccgcaaggcacaggcacttgatgaagacattagtcaagtctctgtccacggacacttcccggcaggagtcggatacagtgtcctataagccacctgattccaaactgaacttacacctgttcaagcagttcacacagccccgaaacacaggtggagattccaaaactgcaccttcttccccactgacttctccctctgatactcgttccttttttaaagtgcccgaaatggaggctaaaattgaagatactaaacgacgcctttcagaagtcatctatgagccttttcagctccttagtaaaattataggggaagaaagtggcagccataggcccaaagccttatcttcaagtgcttcagaactctccaatctgtccagcttgaatgggcacttggaaagcaataacaactacagcatcaaggaggaggagtgtgattctgagggggatggctacggaagtgattccaacatccccagaagtgaccacccaaagtccactggtgagcccacaagagagatagaactgaaaagttcccaggggagcagtctgaaggatttaggcctgaagacaagttctctagttctggagaaatgttctttgtctgccttagtgagcaaagaagatgaagagttttgtgaactgtacactgaggacttcgatttggaaacggagggggagagtaaagttgataagctctcagatattcctctcaagccagaggtgctcgcggaagatggtgtggtccttgacagtgaggacgaggtggactcggccgtgcagcacccggaattgccagtgaagacgttgggcttctttataatgtgtgtctatgtgtacctcatcctccccctcccccactatgtgagtggactctttctgggaattggccttggattcatgactgcagtttgcgtgatttggttttttacaccaccaagtgctcataaatatcacaagttacacaaaaatctgcgacactggaacacaagatctctggatatcaaagaacctgaaatactgaagggatggatgaatgagatttacaactatgatccagaaacctaccatgcgactttgacacattcagtctttgttcgacttgagggtggaaccttaagactttcaaagcccaataaaaatatatccaggagggccagctacaatgaacccaagccagaggtcacctacatcagccagaaaatctatgacctctcagacagcaagatttatcttgtacctaaaactttggctcgaaagcgaatctggaataaaaagtaccccatttgtatcgagcttggtcagcaagatgactttatgtctaaagctcagactgataaggagacttcagaagagaagccgccagctgagggaagtgaggaccctaagaagccaccccgccctcaggagggaacaagatctagccagcgagatcagatactctatctctttgggagaactggccgagaaaaagaggaatggtttaggagatttattctggcatctaagctaaagtcggaaatcaagaagtcatcgggtgtctctggaggtaaaccagggcttttgcctgcacacagcagacacaacagtccgtccgggcacctgacccacagccgcagcagcagcaaaggcagtgtggaggagatcatgtcagagtccacgtgtcctggtcactggtctttataattgttgtgcaataactaaaggctaaggactagatgcactatcgtgtaaagagattacacatgactgtaccatgttgcacttaatcaaatagtatgtggggatttaaaatcgcttgcattgtttcacaaaataaatatctcaatgtcaaatactagataagcatctaagtcatttctacggaatcctgttcagataggggcacaataaaatgagtacagagcaccggggccctcacctggcaatcgcagctttcatttactgcgttgatcactgcccagtcctaaggctacaaagccatcctcactacatccttca

SEQ ID NO: 299772 - DNA, 4846 bp, Homo sapiens
cggggcggcgtgtgcccgggggcgggcgggcggcagggcagcaggaccgcggccggtgccccagccgaagccggagtcgcgcggccgggagcacgggcgccggcatagtacaatgaggcagccagcggatcttggagcctgagcccttgtgaagccggcaatgacaagtctgtatggtcgccatgccgagaaaaccactgacatgccaaaaccatcagcccctaaagtgcacgtgcagaggtccgtgtcccgagataccatcgccattcacttctcggcatccggcgaggaggaggaggaagaggaggaggagttcagggagtactttgaggaggggctggatgaccaaagcattgtaacagggctggaagccaaggaagacctctatcttgaaccccaagttggccatgaccccgccggccctgctgcctcgcctgtcctggcagatggactgtccgtgtcccaggcccctgccattattgcccgtctccaagaacactgtaaagctgttggagtcccctgttccagcagcacaagtattaagtacagtgccattgggctgtgtccccagggtcgtcttcgtcggggcccttagctagctctcccagatgtgtcatcccatttctgagcagaaaaccagttcttcctccccattgtcctctccttctaagtctcccatcctctcatccagtgcctcaagctccaccctttccagtgcaaaaaccttcatgagccttgtgaagtccctgtcgaccgaggtggagccaaaagaatccccacaccccgcaaggcacaggcacttgatgaagacattagtcaagtctctgtccacggacacttcccggcaggagtcggatacagtgtcctataagccacctgattccaaactgaacttacacctgttcaagcagttcacacagccccgaaacacaggtggagattccaaaactgcaccttcttccccactgacttctccctctgatactcgttccttttttaaagtgcccgaaatggaggctaaaattgaagatactaaacgacgcctttcagaagtcatctatgagccttttcagctccttagtaaaattataggggaagaaagtggcagccataggcccaaagccttatcttcaagtgcttcagaactctccaatctgtccagcttgaatgggcacttggaaagcaataacaactacagcatcaaggaggaggagtgtgattctgagggggatggctacggaagtgattccaacatccccagaagtgaccacccaaagtccactggtgagcccacaagagagatagaactgaaaagttcccaggggagcagtctgaaggatttaggcctgaagacaagttctctagttctggagaaatgttctttgtctgccttagtgagcaaagaagatgaagagttttgtgaactgtacactgaggacttcgatttggaaacggagggggagagtaaagttgataagctctcagatattcctctcaagccagaggtgctcgcggaagatggtgtggtccttgacagtgaggacgaggtggactcggccgtgcagcacccggaattgccagtgaagacgttgggcttctttataatgtgtgtctatgtgtacctcatcctccccctcccccactatgtgagtggactctttctgggaattggccttggattcatgactgcagtttgcgtgatttggttttttacaccaccaagtgctcataaatatcacaagttacacaaaaatctgcgacactggaacacaagatctctggatatcaaagaacctgaaatactgaagggatggatgaatgagatttacaactatgatccagaaacctaccatgcgactttgacacattcagtctttgttcgacttgagggtggaaccttaagactttcaaagcccaataaaaatatatccaggagggccagctacaatgaacccaagccagaggtcacctacatcagccagaaaatctatgacctctcagacagcaagatttatcttgtacctaaaactttggctcgaaagcgaatctggaataaaaagtaccccatttgtatcgagcttggtcagcaagatgactttatgtctaaagctcagactgataaggagacttcagaagagaagccgccagctgagggaagtgaggaccctaagaagccaccccgccctcaggagggaacaagatctagccagcgagatcagatactctatctctttgggagaactggccgagaaaaagaggaatggtttaggagatttattctggcatctaagctaaagtcggaaatcaagaagtcatcgggtgtctctggaggtaaaccagggcttttgcctgcacacagcagacacaacagtccgtccgggcacctgacccacagccgcagcagcagcaaaggcagtgtggaggagatcatgtcacagccaaagcagaaggagctggcaggcagcgtgcggcagaagatgcttctcgactacagcgtgtacatgggcaggtgtgtcccccaggaaagccgaagcccccagaggagccccctgcagagtgcggagagcagccccacagctgggaagaagttgccagaggttccaccctctgaggaggaagaacaggaagcctgggtgaatgccttgcttggaagaatattttgggacttcttaggagagaaatactggtctgatctggtgtctaagaagatccaaatgaaactcagcaaaataaagctcccctactttatgaatgagctcactctgacggaacttgacatgggcgtggctgtgccaaaaatcctccaggccttcaagccttacgttgatcaccaaggactctggattgatttggaaatgtcctacaatgggtcctttctgatgactctcgagaccaaaatgaatttgaccaaactaggtaaagagcctcttgttgaagccctgaaggttggagaaattggcaaagaaggttgcaggccccgggcattctgtctggcggacagcgatgaggaatcctccagcgctggctcctccgaggaagacgatgccccagagcccagcgggggagacaaacagctcctcccaggggctgaagggtacgttggaggtcatcgaacaagtaagattatgaggtttgttgataaaattaccaagtcaaaatatttccaaaaagcaacagagacagagtttattaaaaagaagatcgaagaagtctccaacacacccctgctgctcactgttgaagtacaagaatgtagaggaaccttggcggtcaacattccaccacccccgactgaccgagtatggtatggtttccgaaagccaccacatgtggagctgaaagctcggccaaaacttggagagagagaagtgactttagttcatgtgacagactggatagagaagaaactggagcaagagtttcagaaagtttttgtcatgccaaacatggatgatgtttatatcactataatgcactcagccatggaccctcgctctacttcctgcctcctgaaagacccacctgtggaggctgctgatcagccatgatgggtgatgtcagatgttccccatattgtgacatcgagctggatgtgtggggttcttggccgccatctgtactgtagcactggcctctgtgccacagctactgtttcttaaaggactgcttctgccctctgcctgccagtgcccattccactgtgaggtgtcattccctgcatctagtgacaactgtctggattgcctgctgcaaagctttgatttggcaaaggagaccatggaagaatcatggtggatccagaagttatacgtgacccacaccatggcttttaaaagtctacccatgtttgtggcagcaaatgagcacagtaagagcaaagctgaacaacttgcctcctctactcctccaaagcttttcttcaggcagccggtgcacagtggactttttcacttctatactttgtatgcggccttccacacttccagagaatgtcagtgtgcaatgtgtctggagggtggggagaggaattctgtgagccttttcatttcggtgacagaagagatgggcagagcaacttattttccacattaaattgtgcatttgggaagcaagtagccatagtacacacacaacacgctatcagcttgggtaaggacagtgggatttatgtgaacatcaggcaaagccatgagatcaaaccatcccaagcctttcaccaatgaggtacaaccacctgggggctagctaatcttgaatgttttcctgagacaggagcgtatgtgaaaacatcaaacactgcacatgacaggatgggtcctctcatacagatgggatggggttagaaagccagagccagtttttccatctggcgtttcctgtgtcctccaggtttatatgggaatcgaaacagtttgttaatctgattgggagagttccatgggcagatttcccttcctgaaggccaaaacggagaactgctctctttaattatttcaagagtcaagaccaaaagtttgctcagcatcacactacatctcaaaattaatgttgccaacttaattttgtgcatttgtgtcagaatgtttagtttacaaggttgggggctctctttgcttcgagaagtaaacctaataccatttttttattgtttaaagctgcattcaacgtcaaaattaccttgggtaacttttgataacttacatgtgtggacaaagctaatagtggttttttaaacagcaccttgcctgaacatgactttaaagaaattaatatattgaaaacatgtttgaacccttattttaattgcaccattaaaacatttgacttaaattgtttgaccattcca

SEQ ID NO: 299773 - DNA, 4086 bp, Homo sapiens
ggagaatgtatgagggcggtccctgttttaatttcaggtaccgggactggcgtttcacttgtctttgctcggccgtcgttgccaacataagtcggatacagtgtcctataagccacctgattccaaactgaacttacacctgttcaagcagttcacacagccccgaaacacaggtggagattccaaaactgcaccttcttccccactgacttctccctctgatactcgttccttttttaaagtgcccgaaatggaggctaaaattgaagatactaaacgacgcctttcagaagtcatctatgagccttttcagctccttagtaaaattataggggaagaaagtggcagccataggcccaaagccttatcttcaagtgcttcagaactctccaatctgtccagcttgaatgggcacttggaaagcaataacaactacagcatcaaggaggaggagtgtgattctgagggggatggctacggaagtgattccaacatccccagaagtgaccacccaaagtccactggtgagcccacaagagagatagaactgaaaagttcccaggggagcagtctgaaggatttaggcctgaagacaagttctctagttctggagaaatgttctttgtctgccttagtgagcaaagaagatgaagagttttgtgaactgtacactgaggacttcgatttggaaacggagggggagagtaaagttgataagctctcagatattcctctcaagccagaggtgctcgcggaagatggtgtggtccttgacagtgaggacgaggtggactcggccgtgcagcacccggaattgccagtgaagacgttgggcttctttataatgtgtgtctatgtgtacctcatcctccccctcccccactatgtgagtggactctttctgggaattggccttggattcatgactgcagtttgcgtgatttggttttttacaccaccaagtgctcataaatatcacaagttacacaaaaatctgcgacactggaacacaagatctctggatatcaaagaacctgaaatactgaagggatggatgaatgagatttacaactatgatccagaaacctaccatgcgactttgacacattcagtctttgttcgacttgagggtggaaccttaagactttcaaagcccaataaaaatatatccaggagggccagctacaatgaacccaagccagaggtcacctacatcagccagaaaatctatgacctctcagacagcaagatttatcttgtacctaaaactttggctcgaaagcgaatctggaataaaaagtaccccatttgtatcgagcttggtcagcaagatgactttatgtctaaagctcagactgataaggagacttcagaagagaagccgccagctgagggaagtgaggaccctaagaagccaccccgccctcaggagggaacaagatctagccagcgagatcagatactctatctctttgggagaactggccgagaaaaagaggaatggtttaggagatttattctggcatctaagctaaagtcggaaatcaagaagtcatcgggtgtctctggaggtaaaccagggcttttgcctgcacacagcagacacaacagtccgtccgggcacctgacccacagccgcagcagcagcaaaggcagtgtggaggagatcatgtcacagccaaagcagaaggagctggcaggcagcgtgcggcagaagatgcttctcgactacagcgtgtacatgggcaggtgtgtcccccaggaaagccgaagcccccagaggagccccctgcagagtgcggagagcagccccacagctgggaagaagttgccagaggttccaccctctgaggaggaagaacaggaagcctgggtgaatgccttgcttggaagaatattttgggacttcttaggagagaaatactggtctgatctggtgtctaagaagatccaaatgaaactcagcaaaataaagctcccctactttatgaatgagctcactctgacggaacttgacatgggcgtggctgtgccaaaaatcctccaggccttcaagccttacgttgatcaccaaggactctggattgatttggaaatgtcctacaatgggtcctttctgatgactctcgagaccaaaatgaatttgaccaaactaggtaaagagcctcttgttgaagccctgaaggttggagaaattggcaaagaaggttgcaggccccgggcattctgtctggcggacagcgatgaggaatcctccagcgctggctcctccgaggaagacgatgccccagagcccagcgggggagacaaacagctcctcccaggggctgaagggtacgttggaggtcatcgaacaagtaagattatgaggtttgttgataaaattaccaagtcaaaatatttccaaaaagcaacagagacagagtttattaaaaagaagatcgaagaagtctccaacacacccctgctgctcactgttgaagtacaagaatgtagaggaaccttggcggtcaacattccaccacccccgactgaccgagtatggtatggtttccgaaagccaccacatgtggagctgaaagctcggccaaaacttggagagagagaagtgactttagttcatgtgacagactggatagagaagaaactggagcaagagtttcagaaagtttttgtcatgccaaacatggatgatgtttatatcactataatgcactcagccatggaccctcgctctacttcctgcctcctgaaagacccacctgtggaggctgctgatcagccatgatgggtgatgtcagatgttccccatattgtgacatcgagctggatgtgtggggttcttggccgccatctgtactgtagcactggcctctgtgccacagctactgtttcttaaaggactgcttctgccctctgcctgccagtgcccattccactgtgaggtgtcattccctgcatctagtgacaactgtctggattgcctgctgcaaagctttgatttggcaaaggagaccatggaagaatcatggtggatccagaagttatacgtgacccacaccatggcttttaaaagtctacccatgtttgtggcagcaaatgagcacagtaagagcaaagctgaacaacttgcctcctctactcctccaaagcttttcttcaggcagccggtgcacagtggactttttcacttctatactttgtatgcggccttccacacttccagagaatgtcagtgtgcaatgtgtctggagggtggggagaggaattctgtgagccttttcatttcggtgacagaagagatgggcagagcaacttattttccacattaaattgtgcatttgggaagcaagtagccatagtacacacacaacacgctatcagcttgggtaaggacagtgggatttatgtgaacatcaggcaaagccatgagatcaaaccatcccaagcctttcaccaatgaggtacaaccacctgggggctagctaatcttgaatgttttcctgagacaggagcgtatgtgaaaacatcaaacactgcacatgacaggatgggtcctctcatacagatgggatggggttagaaagccagagccagtttttccatctggcgtttcctgtgtcctccaggtttatatgggaatcgaaacagtttgttaatctgattgggagagttccatgggcagatttcccttcctgaaggccaaaacggagaactgctctctttaattatttcaagagtcaagaccaaaagtttgctcagcatcacactacatctcaaaattaatgttgccaacttaattttgtgcatttgtgtcagaatgtttagtttacaaggttgggggctctctttgcttcgagaagtaaacctaataccatttttttattgtttaaagctgcattcaacgtcaaaattaccttgggtaacttttgataacttacatgtgtggacaaagctaatagtggttttttaaacagcaccttgcctgaacatgactttaaagaaattaatatattgaaaacatgtttgaacccttattttaattgcaccattaaaacatttgacttaaattgtttgaccattcca

SEQ ID NO: 299774 - DNA, 5548 bp, Homo sapiens
cggggcggcgtgtgcccgggggcgggcgggcggcagggcagcaggaccgcggccggtgccccagccgaagccggagtcgcgcggccgggagcacgggcgccggcatagtacaatgaggcagccagcggatcttggagcctgagcccttgtgaagccggcaatgacaagtctgtatggtcgccatgccgagaaaaccactgacatgccaaaaccatcagcccctaaagtgcacgtgcagaggtccgtgtcccgagataccatcgccattcacttctcggcatccggcgaggaggaggaggaagaggaggaggagttcagggagtactttgaggaggggctggatgaccaaagcattgtaacagggctggaagccaaggaagacctctatcttgaaccccaagttggccatgaccccgccggccctgctgcctcgcctgtcctggcagatggactgtccgtgtcccaggcccctgccattattgcccgtctccaagaacactgtaaagctgttggagtcccctgttccagcagcacaagtattaagtacagtgccattgggctgtgtccccagggtcgtcttcgtcggggcccttagctagctctcccagatgtgtcatcccatttctgagcagaaaaccagttcttcctccccattgtcctctccttctaagtctcccatcctctcatccagtgcctcaagctccaccctttccagtgcaaaaaccttcatgagccttgtgaagtccctgtcgaccgaggtggagccaaaagaatccccacaccccgcaaggcacaggcacttgatgaagacattagtcaagtctctgtccacggacacttcccggcaggagtcggatacagtgtcctataagccacctgattccaaactgaacttacacctgttcaagcagttcacacagccccgaaacacaggtggagattccaaaactgcaccttcttccccactgacttctccctctgatactcgttccttttttaaagtgcccgaaatggaggctaaaattgaagatactaaacgacgcctttcagaagtcatctatgagccttttcagctccttagtaaaattataggggaagaaagtggcagccataggcccaaagccttatcttcaagtgcttcagaactctccaatctgtccagcttgaatgggcacttggaaagcaataacaactacagcatcaaggaggaggagtgtgattctgagggggatggctacggaagtgattccaacatccccagaagtgaccacccaaagtccactggtgagcccacaagagagatagaactgaaaagttcccaggggagcagtctgaaggatttaggcctgaagacaagttctctagttctggagaaatgttctttgtctgccttagtgagcaaagaagatgaagagttttgtgaactgtacactgaggacttcgatttggaaacggagggggagagtaaagttgataagctctcagatattcctctcaagccagaggtgctcgcggaagatggtgtggtccttgacagtgaggacgaggtggactcggccgtgcagcacccggaattgccagtgaagacgttgggcttctttataatgtgtgtctatgtgtacctcatcctccccctcccccactatgtgagtggactctttctgggaattggccttggattcatgactgcagtttgcgtgatttggttttttacaccaccaagtgctcataaatatcacaagttacacaaaaatctgcgacactggaacacaagatctctggatatcaaagaacctgaaatactgaagggatggatgaatgagatttacaactatgatccagaaacctaccatgcgactttgacacattcagtctttgttcgacttgagggtggaaccttaagactttcaaagcccaataaaaatatatccaggagggccagctacaatgaacccaagccagaggtcacctacatcagccagaaaatctatgacctctcagacagcaagatttatcttgtacctaaaactttggctcgaaagcgaatctggaataaaaagtaccccatttgtatcgagcttggtcagcaagatgactttatgtctaaagctcagactgataaggagacttcagaagagaagccgccagctgagggaagtgaggaccctaagaagccaccccgccctcaggagggaacaagatctagccagcgagatcagatactctatctctttgggagaactggccgagaaaaagaggaatggtttaggagatttattctggcatctaagctaaagtcggaaatcaagaagtcatcgggtgtctctggaggtaaaccagggcttttgcctgcacacagcagacacaacagtccgtccgggcacctgacccacagccgcagcagcagcaaaggcagtgtggaggagatcatgtcacagccaaagcagaaggagctggcaggcagcgtgcggcagaagatgcttctcgactacagcgtgtacatgggcaggtgtgtcccccaggaaagccgaagcccccagaggagccccctgcagagtgcggagagcagccccacagctgggaagaagttgccagaggttccaccctctgaggaggaagaacaggaagcctgggtgaatgccttgcttggaagaatattttgggacttcttaggagagaaatactggtctgatctggtgtctaagaagatccaaatgaaactcagcaaaataaagctcccctactttatgaatgagctcactctgacggaacttgacatgggcgtggctgtgccaaaaatcctccaggccttcaagccttacgttgatcaccaaggactctggattgatttggaaatgtcctacaatgggtcctttctgatgactctcgagaccaaaatgaatttgaccaaactaggtaaagagcctcttgttgaagccctgaaggttggagaaattggcaaagaaggttgcaggccccgggcattctgtctggcggacagcgatgaggaatcctccagcgctggctcctccgaggaagacgatgccccagagcccagcgggggagacaaacagctcctcccaggggctgaagggtacgttggaggtcatcgaacaagtaagattatgaggtttgttgataaaattaccaagtcaaaatatttccaaaaagcaacagagacagagtttattaaaaagaagatcgaagaagtctccaacacacccctgctgctcactgttgaagtacaagaatgtagaggaaccttggcggtcaacattccaccacccccgactgaccgagtatggtatggtttccgaaagccaccacatgtggagctgaaagctcggccaaaacttggagagagagaagtgactttagttcatgtgacagactggatagagaagaaactggagcaagagtttcagaaagtttttgtcatgccaaacatggatgatgtttatatcactataatgcactcagccatggaccctcgctctacttcctgcctcctgaaagacccacctgtggaggctgctgatcagccatgatgggtgatgtcagatgttccccatattgtgacatcgagctggatgtgtggggttcttggccgccatctgtactgtagcactggcctctgtgccacagctactgtttcttaaaggactgcttctgccctctgcctgccagtgcccattccactgtgaggtgtcattccctgcatctagtgacaactgtctggattgcctgctgcaaagctttgatttggcaaaggagaccatggaagaatcatggtggatccagaagttatacgtgacccacaccatggcttttaaaagtctacccatgtttgtggcagcaaatgagcacagtaagagcaaagctgaacaacttgcctcctctactcctccaaagcttttcttcaggcagccggtgcacagtggactttttcacttctatactttgtatgcggccttccacacttccagagaatgtcagtgtgcaatgtgtctggagggtggggagaggaattctgtgagccttttcatttcggtgacagaagagatgggcagagcaacttattttccacattaaattgtgcatttgggaagcaagtagccatagtacacacacaacacgctatcagcttgggtaaggacagtgggatttatgtgaacatcaggcaaagccatgagatcaaaccatcccaagcctttcaccaatgaggtacaaccacctgggggctagctaatcttgaatgttttcctgagacaggagcgtatgtgaaaacatcaaacactgcacatgacaggatgggtcctctcatacagatgggatggggttagaaagccagagccagtttttccatctggcgtttcctgtgtcctccaggtttatatgggaatcgaaacagtttgttaatctgattgggagagttccatgggcagatttcccttcctgaaggccaaaacggagaactgctctctttaattatttcaagagtcaagaccaaaagtttgctcagcatcacactacatctcaaaattaatgttgccaacttaattttgtgcatttgtgtcagaatgtttagtttacaaggttgggggctctctttgcttcgagaagtaaacctaataccatttttttattgtttaaagctgcattcaacgtcaaaattaccttgggtaacttttgataacttacatgtgtggacaaagctaatagtggttttttaaacagcaccttgcctgaacatgactttaaagaaattaatatattgaaaacatgtttgaacccttattttaattgcaccattaaaacatttgacttaaattgtttgaccattccagttggtgtactgttctgatttttcgttgtgtaggccgatctgcctgtcagagtccacgtgtcctggtcactggtctttataattgttgtgcaataactaaaggctaaggactagatgcactatcgtgtaaagagattacacatgactgtaccatgttgcacttaatcaaatagtatgtggggatttaaaatcgcttgcattgtttcacaaaataaatatctcaatgtcaaataaaaaaaaaaaaaagaaaaaaaaaaaaaaaaaaaaaaaaaaaagggggggggccccaaaatcccccggggggccccttcggcgagcacccgggttttcctgtgaacaagggggcgcccctaataagggaggcgcctgtatataaacaagacagggagccctgggcgccgcgccgagtatcacaaacggggctcgtagatggtgtgggaaaaactctgtgtgtgacgctgggagggaatctttgtgggagaagagggaaccccttaatcttgtggggggggtgggacaatattgtgggggcacaaccttttcatcctacgaaagtattataacagggtctgtaggggggacaatctttctactctttttcaagtgttgtttatgtggttggttcacctagaggtgatataattgtatgggggcctgaaaaaattttggctcagggagtagtgtttgtgggacaaattattc

SEQ ID NO: 299775 - DNA, 5214 bp, Homo sapiens
cggggcggcgtgtgcccgggggcgggcgggcggcagggcagcaggaccgcggccggtgccccagccgaagccggagtcgcgcggccgggagcacgggcgccggcatagtacaatgaggcagccagcggatcttggagcctgagcccttgtgaagccggcaatgacaagtctgtatggtcgccatgccgagaaaaccactgacatgccaaaaccatcagcccctaaagtgcacgtgcagaggtccgtgtcccgagataccatcgccattcacttctcggcatccggcgaggaggaggaggaagaggaggaggagttcagggagtactttgaggaggggctggatgaccaaagcattgtaacagggctggaagccaaggaagacctctatcttgaaccccaagttggccatgaccccgccggccctgctgcctcgcctgtcctggcagatggactgtccgtgtcccaggcccctgccattattgcccgtctccaagaacactgtaaagctgttggagtcccctgttccagcagcacaagtattaagtacagtgccattgggctgtgtccccagggtcgtcttcgtcggggcccttagctagctctcccagatgtgtcatcccatttctgagcagaaaaccagttcttcctccccattgtcctctccttctaagtctcccatcctctcatccagtgcctcaagctccaccctttccagtgcaaaaaccttcatgagccttgtgaagtccctgtcgaccgaggtggagccaaaagaatccccacaccccgcaaggcacaggcacttgatgaagacattagtcaagtctctgtccacggacacttcccggcaggagtcggatacagtgtcctataagccacctgattccaaactgaacttacacctgttcaagcagttcacacagccccgaaacacaggtggagattccaaaactgcaccttcttccccactgacttctccctctgatactcgttccttttttaaagtgcccgaaatggaggctaaaattgaagatactaaacgacgcctttcagaagtcatctatgagccttttcagctccttagtaaaattataggggaagaaagtggcagccataggcccaaagccttatcttcaagtgcttcagaactctccaatctgtccagcttgaatgggcacttggaaagcaataacaactacagcatcaaggaggaggagtgtgattctgagggggatggctacggaagtgattccaacatccccagaagtgaccacccaaagtccactggtgagcccacaagagagatagaactgaaaagttcccaggggagcagtctgaaggatttaggcctgaagacaagttctctagttctggagaaatgttctttgtctgccttagtgagcaaagaagatgaagagttttgtgaactgtacactgaggacttcgatttggaaacggagggggagagtaaagttgataagctctcagatattcctctcaagccagaggtgctcgcggaagatggtgtggtccttgacagtgaggacgaggtggactcggccgtgcagcacccggaattgccagtgaagacgttgggcttctttataatgtgtgtctatgtgtacctcatcctccccctcccccactatgtgagtggactctttctgggaattggccttggattcatgactgcagtttgcgtgatttggttttttacaccaccaagtgctcataaatatcacaagttacacaaaaatctgcgacactggaacacaagatctctggatatcaaagaacctgaaatactgaagggatggatgaatgagatttacaactatgatccagaaacctaccatgcgactttgacacattcagtctttgttcgacttgagggtggaaccttaagactttcaaagcccaataaaaatatatccaggagggccagctacaatgaacccaagccagaggtcacctacatcagccagaaaatctatgacctctcagacagcaagatttatcttgtacctaaaactttggctcgaaagcgaatctggaataaaaagtaccccatttgtatcgagcttggtcagcaagatgactttatgtctaaagctcagactgataaggagacttcagaagagaagccgccagctgagggaagtgaggaccctaagaagccaccccgccctcaggagggaacaagatctagccagcgagatcagatactctatctctttgggagaactggccgagaaaaagaggaatggtttaggagatttattctggcatctaagctaaagtcggaaatcaagaagtcatcgggtgtctctggaggtaaaccagggcttttgcctgcacacagcagacacaacagtccgtccgggcacctgacccacagccgcagcagcagcaaaggcagtgtggaggagatcatgtcacagccaaagcagaaggagctggcaggcagcgtgcggcagaagatgcttctcgactacagcgtgtacatgggcaggtgtgtcccccaggaaagccgaagcccccagaggagccccctgcagagtgcggagagcagccccacagctgggaagaagttgccagaggttccaccctctgaggaggaagaacaggaagcctgggtgaatgccttgcttggaagaatattttgggacttcttaggagagaaatactggtctgatctggtgtctaagaagatccaaatgaaactcagcaaaataaagctcccctactttatgaatgagctcactctgacggaacttgacatgggcgtggctgtgccaaaaatcctccaggccttcaagccttacgttgatcaccaaggactctggattgatttggaaatgtcctacaatgggtcctttctgatgactctcgagaccaaaatgaatttgaccaaactaggtaaagagcctcttgttgaagccctgaaggttggagaaattggcaaagaaggttgcaggccccgggcattctgtctggcggacagcgatgaggaatcctccagcgctggctcctccgaggaagacgatgccccagagcccagcgggggagacaaacagctcctcccaggggctgaagggtacgttggaggtcatcgaacaagtaagattatgaggtttgttgataaaattaccaagtcaaaatatttccaaaaagcaacagagacagagtttattaaaaagaagatcgaagaagtctccaacacacccctgctgctcactgttgaagtacaagaatgtagaggaaccttggcggtcaacattccaccacccccgactgaccgagtatggtatggtttccgaaagccaccacatgtggagctgaaagctcggccaaaacttggagagagagaagtgactttagttcatgtgacagactggatagagaagaaactggagcaagagtttcagaaagtttttgtcatgccaaacatggatgatgtttatatcactataatgcactcagccatggaccctcgctctacttcctgcctcctgaaagacccacctgtggaggctgctgatcagccatgatgggtgatgtcagatgttccccatattgtgacatcgagctggatgtgtggggttcttggccgccatctctactgtttcttaaaggactgcttctgccctctgcctgccagtgcccattccactgtgaggtgtcattccctgcatctagtgacaactgtctggattgcctgctgcaaagctttgatttggcaaaggagaccatggaagaatcatggtggatccagaagttatacgtgacccacaccatggcttttaaaagtctacccatgtttgtggcagcaaatgagcacagtaagagcaaagctgaacaacttgcctcctctactcctccaaagcttttcttcaggcagccggtgcacagtggactttttcacttctatactttgtatgcggccttccacacttccagagaatgtcagtgtgcaatgtgtctggagggtggggagaggaattctgtgagccttttcatttcggtgacagaagagatgggcagagcaacttattttccacattaaattgtgcatttgggaagcaagtagccatagtacacacacaacacgctatcagcttgggtaaggacagtgggatttatgtgaacatcaggcaaagccatgagatcaaaccatcccaagcctttcaccaatgaggtacaaccacctgggggctagctaatcttgaatgttttcctgagacaggagcgtatgtgaaaacatcaaacactgcacatgacaggatgggtcctctcatacagatgggatggggttagaaagccagagccagtttttccatctggcgtttcctgtgtcctccaggtttatatgggaatcgaaacagtttgttaatctgattgggagagttccatgggcagatttcccttcctgaaggccaaaacggagaactgctctctttaattatttcaagagtcaagaccaaaagtttgctcagcatcacactacatctcaaaattaatgttgccaacttaattttgtgcatttgtgtcagaatgtttagtttacaaggttgggggctctctttgcttcgagaagtaaacctaataccatttttttattgtttaaagctgcattcaacgtcaaaattaccttgggtaacttttgataacttacatgtgtggacaaagctaatagtggttttttaaacagcaccttgcctgaacatgactttaaagaaattaatatattgaaaacatgtttgaacccttattttaattgcaccattaaaacatttgacttaaattgtttgaccattccagttggtgtactgttctgatttttcgttgtgtaggccgatctgcctgtcagagtccacgtgtcctggtcactggtctttataattgttgtgcaataactaaaggctaaggactagatgcactatcgtgtaaagagattacacatgactgtaccatgttgcacttaatcaaatagtatgtggggatttaaaatcgcttgcattgtttcacaaaataaatatctcaatgtcaaatactagataagcatctaagtcatttctacggaatcctgttcagataggggcacaataaaatgagtacagagcaccggggccctcacctggcaatcgcagctttcatttactgcgttgatcactgcccagtcctaaggctacaaagccatcctcactacatccttca

SEQ ID NO: 299776 - DNA, 2303 bp, Homo sapiens
cagtggtggtgactctctctctgtccagttgcaggccccgggcattctgtctggcggacagcgatgaggaatcctccagcgctggctcctccgaggaagacgatgccccagagcccagcgggggagacaaacagctcctcccaggggctgaagggtacgttggaggtcatcgaacaagtaagattatgaggtttgttgataaaattaccaagtcaaaatatttccaaaaagcaacagagacagagtttattaaaaagaagatcgaagaagtctccaacacacccctgctgctcactgttgaagtacaagaatgtagaggaaccttggcggtcaacattccaccacccccgactgaccgagtatggtatggtttccgaaagccaccacatgtggagctgaaagctcggccaaaacttggagagagagaagtgactttagttcatgtgacagactggatagagaagaaactggagcaagagtttcagaaagtttttgtcatgccaaacatggatgatgtttatatcactataatgcactcagccatggaccctcgctctacttcctgcctcctgaaagacccacctgtggaggctgctgatcagccatgatgggtgatgtcagatgttccccatattgtgacatcgagctggatgtgtggggttcttggccgccatctgtactgtagcactggcctctgtgccacagctactgtttcttaaaggactgcttctgccctctgcctgccagtgcccattccactgtgaggtgtcattccctgcatctagtgacaactgtctggattgcctgctgcaaagctttgatttggcaaaggagaccatggaagaatcatggtggatccagaagttatacgtgacccacaccatggcttttaaaagtctacccatgtttgtggcagcaaatgagcacagtaagagcaaagctgaacaacttgcctcctctactcctccaaagcttttcttcaggcagccggtgcacagtggactttttcacttctatactttgtatgcggccttccacacttccagagaatgtcagtgtgcaatgtgtctggagggtggggagaggaattctgtgagccttttcatttcggtgacagaagagatgggcagagcaacttattttccacattaaattgtgcatttgggaagcaagtagccatagtacacacacaacacgctatcagcttgggtaaggacagtgggatttatgtgaacatcaggcaaagccatgagatcaaaccatcccaagcctttcaccaatgaggtacaaccacctgggggctagctaatcttgaatgttttcctgagacaggagcgtatgtgaaaacatcaaacactgcacatgacaggatgggtcctctcatacagatgggatggggttagaaagccagagccagtttttccatctggcgtttcctgtgtcctccaggtttatatgggaatcgaaacagtttgttaatctgattgggagagttccatgggcagatttcccttcctgaaggccaaaacggagaactgctctctttaattatttcaagagtcaagaccaaaagtttgctcagcatcacactacatctcaaaattaatgttgccaacttaattttgtgcatttgtgtcagaatgtttagtttacaaggttgggggctctctttgcttcgagaagtaaacctaataccatttttttattgtttaaagctgcattcaacgtcaaaattaccttgggtaacttttgataacttacatgtgtggacaaagctaatagtggttttttaaacagcaccttgcctgaacatgactttaaagaaattaatatattgaaaacatgtttgaacccttattttaattgcaccattaaaacatttgacttaaattgtttgaccattccagttggtgtactgttctgatttttcgttgtgtaggccgatctgcctgtcagagtccacgtgtcctggtcactggtctttataattgttgtgcaataactaaaggctaaggactagatgcactatcgtgtaaagagattacacatgactgtaccatgttgcacttaatcaaatagtatgtggggatttaaaatcgcttgcattgtttcacaaaataaatatctcaatgtcaaatactagataagcatctaagtcatttctacggaatcctgttcagataggggcacaataaaatgagtacagagcaccggggccctcacctggcaatcgcagctttcatttactgcgttgatcactgcccagtcctaaggctacaaagccatcctcactacatccttca

SEQ ID NO: 299777 - DNA, 5315 bp, Homo sapiens
cggggcggcgtgtgcccgggggcgggcgggcggcagggcagcaggaccgcggccggtgccccagccgaagccggagtcgcgcggccgggagcacgggcgccggcatagtacaatgaggcagccagcggatcttggagcctgagcccttgtgaagccggcaatgacaagtctgtatggtcgccatgccgagaaaaccactgacatgccaaaaccatcagcccctaaagtgcacgtgcagaggtccgtgtcccgagataccatcgccattcacttctcggcatccggcgaggaggaggaggaagaggaggaggagttcagggagtactttgaggaggggctggatgaccaaagcattgtaacagggctggaagccaaggaagacctctatcttgaaccccaagttggccatgaccccgccggccctgctgcctcgcctgtcctggcagatggactgtccgtgtcccaggcccctgccattattgcccgtctccaagaacactgtaaagctgttggagtcccctgttccagcagcacaagtattaagtacagtgccattgggctgtgtccccagggtcgtcttcgtcggggcccttagctagctctcccagatgtgtcatcccatttctgagcagaaaaccagttcttcctccccattgtcctctccttctaagtctcccatcctctcatccagtgcctcaagctccaccctttccagtgcaaaaaccttcatgagccttgtgaagtccctgtcgaccgaggtggagccaaaagaatccccacaccccgcaaggcacaggcacttgatgaagacattagtcaagtctctgtccacggacacttcccggcaggagtcggatacagtgtcctataagccacctgattccaaactgaacttacacctgttcaagcagttcacacagccccgaaacacaggtggagattccaaaactgcaccttcttccccactgacttctccctctgatactcgttccttttttaaagtgcccgaaatggaggctaaaattgaagatactaaacgacgcctttcagaagtcatctatgagccttttcagctccttagtaaaattataggggaagaaagtggcagccataggcccaaagccttatcttcaagtgcttcagaactctccaatctgtccagcttgaatgggcacttggaaagcaataacaactacagcatcaaggaggaggagtgtgattctgagggggatggctacggaagtgattccaacatccccagaagtgaccacccaaagtccactggtgagcccacaagagagatagaactgaaaagttcccaggggagcagtctgaaggatttaggcctgaagacaagttctctagttctggagaaatgttctttgtctgccttagtgagcaaagaagatgaagagttttgtgaactgtacactgaggacttcgatttggaaacggagggggagagtaaagttgataagctctcagatattcctctcaagccagaggtgctcgcggaagatggtgtggtccttgacagtgaggacgaggtggactcggccgtgcagcacccggaattgccagtgaagacgttgggcttctttataatgtgtgtctatgtgtacctcatcctccccctcccccactatgtgagtggactctttctgggaattggccttggattcatgactgcagtttgcgtgatttggttttttacaccaccaagtgctcataaatatcacaagttacacaaaaatctgcgacactggaacacaagatctctggatatcaaagaacctgaaatactgaagggatggatgaatgagatttacaactatgatccagaaacctaccatgcgactttgacacattcagtctttgttcgacttgagggtggaaccttaagactttcaaagcccaataaaaatatatccaggagggccagctacaatgaacccaagccagaggtcacctacatcagccagaaaatctatgacctctcagacagcaagatttatcttgtacctaaaactttggctcgaaagcgaatctggaataaaaagtaccccatttgtatcgagcttggtcagcaagatgactttatgtctaaagctcagactgataaggagacttcagaagagaagccgccagctgagggaagtgaggaccctaagaagccaccccgccctcaggagggaacaagatctagccagcgagatcagatactctatctctttgggagaactggccgagaaaaagaggaatggtttaggagatttattctggcatctaagctaaagtcggaaatcaagaagtcatcgggtgtctctggaggtaaaccagggcttttgcctgcacacagcagacacaacagtccgtccgggcacctgacccacagccgcagcagcagcaaaggcagtgtggaggagatcatgtcacagccaaagcagaaggagctggcaggcagcgtgcggcagaagatgcttctcgactacagcgtgtacatgggcaggtgtgtcccccaggaaagccgaagcccccagaggagccccctgcagagtgcggagagcagccccacagctgggaagaagttgccagaggttccaccctctgaggaggaagaacaggaagcctgggtgaatgccttgcttggaagaatattttgggacttcttaggagagaaatactggtctgatctggtgtctaagaagatccaaatgaaactcagcaaaataaagctcccctactttatgaatgagctcactctgacggaacttgacatgggcgtggctgtgccaaaaatcctccaggccttcaagccttacgttgatcaccaaggactctggattgatttggaaatgtcctacaatgggtcctttctgatgactctcgagaccaaaatgaatttgaccaaactaggtaaagagcctcttgttgaagccctgaaggttggagaaattggcaaagaaggttgcaggccccgggcattctgtctggcggacagcgatgaggaatcctccagcgctggctcctccgaggaagacgatgccccagagcccagcgggggagacaaacagctcctcccaggggctgaagggtacgttggaggtcatcgaacaagtaagattatgaggtttgttgataaaattaccaagtcaaaatatttccaaaaagcaacagagacagagtttattaaaaagaagatcgaagaagtctccaacacacccctgctgctcactgttgaagtacaagaatgtagaggaaccttggcggtcaacattccaccacccccgactgaccgagtatggtatggtttccgaaagccaccacatgtggagctgaaagctcggccaaaacttggagagagagaagtgactttagttcatgtgacagactggatagagaagaaactggagcaagagtttcagaaagtttttgtcatgccaaacatggatgatgtttatatcactataatgcactcagccatggaccctcgctctacttcctgcctcctgaaagacccacctgtggaggctgctgatcagccatgatgggtgatgtcagatgttccccatattgtgacatcgagctggatgtgtggggttcttggccgccatctgtactgtagcactggcctctgtgccacagctactgtttcttaaaggactgcttctgccctctgcctgccagtgcccattccactgtgaggtgtcattccctgcatctagtgacaactgtctggattgcctgctgcaaagctttgatttggcaaaggagaccatggaagaatcatggtggatccagaagttatacgtgacccacaccatggcttttaaaagtctacccatgtttgtggcagcaaatgagcacagtaagagcaaagctgaacaacttgcctcctctactcctccaaagcttttcttcaggcagccggtgcacagtggactttttcacttctatactttgtatgcggccttccacacttccagagaatgtcagtgtgcaatgtgtctggagggtggggagaggaattctgtgagccttttcatttcggtgacagaagagatgggcagagcaacttattttccacattaaattgtgcatttgggaagcaagtagccatagtacacacacaacacgctatcagcttgggtaaggacagtgggatttatgtgaacatcaggcaaagccatgagatcaaaccatcccaagcctttcaccaatgaggtacaaccacctgggggctagctaatcttgaatgttttcctgagacaggagcgtatgtgaaaacatcaaacactgcacatgacaggatgggtcctctcatacagatgggatggggttagaaagccagagccagtttttccatctggcgtttcctgtgtcctccaggtttatatgggaatcgaaacagtttgttaatctgattgggagagttccatgggcagatttcccttcctgaaggccaaaacggagaactgctctctttaattatttcaagagtcaagaccaaaagtttgctcagcatcacactacatctcaaaattaatgttgccaacttaattttgtgcatttgtgtcagaatgtttagtttacaaggttgggggctctctttgcttcgagaagtaaacctaataccatttttttattgtttaaagctgcattcaacgtcaaaattaccttgggtaacttttgataacttacatgtgtggacaaagctaatagtggttttttaaacagcaccttgcctgaacatgactttaaagaaattaatatattgaaaacatgtttgaacccttattttaattgcaccattaaaacatttgacttaaattgtttgaccattccaaaaaaaaaaaaaagaaaaaaaaaaaaaaaaaaaaaaaaaaaagggggggggccccaaaatcccccggggggccccttcggcgagcacccgggttttcctgtgaacaagggggcgcccctaataagggaggcgcctgtatataaacaagacagggagccctgggcgccgcgccgagtatcacaaacggggctcgtagatggtgtgggaaaaactctgtgtgtgacgctgggagggaatctttgtgggagaagagggaaccccttaatcttgtggggggggtgggacaatattgtgggggcacaaccttttcatcctacgaaagtattataacagggtctgtaggggggacaatctttctactctttttcaagtgttgtttatgtggttggttcacctagaggtgatataattgtatgggggcctgaaaaaattttggctcagggagtagtgtttgtgggacaaattattc

SEQ ID NO: 299778 - DNA, 3126 bp, Homo sapiens
cggggcggcgtgtgcccgggggcgggcgggcggcagggcagcaggaccgcggccggtgccccagccgaagccggagtcgcgcggccgggagcacgggcgccggcatagtacaatgaggcagccagcggatcttggagcctgagcccttgtgaagccggcaatgacaagtctgtatggtcgccatgccgagaaaaccactgacatgccaaaaccatcagcccctaaagtgcacgtgcagaggtccgtgtcccgagataccatcgccattcacttctcggcatccggcgaggaggaggaggaagaggaggaggagttcagggagtactttgaggaggggctggatgaccaaagcattgtaacagggctggaagccaaggaagacctctatcttgaaccccaagttggccatgaccccgccggccctgctgcctcgcctgtcctggcagatggactgtccgtgtcccaggcccctgccattattgcccgtctccaagaacactgtaaagctgttggagtcccctgttccagcagcacaagtattaagtacagtgccattgggctgtgtccccagggtcgtcttcgtcggggcccttagctagctctcccagatgtgtcatcccatttctgagcagaaaaccagttcttcctccccattgtcctctccttctaagtctcccatcctctcatccagtgcctcaagctccaccctttccagtgcaaaaaccttcatgagccttgtgaagtccctgtcgaccgaggtggagccaaaagaatccccacaccccgcaaggcacaggcacttgatgaagacattagtcaagtctctgtccacggacacttcccggcaggagtcggatacagtgtcctataagccacctgattccaaactgaacttacacctgttcaagcagttcacacagccccgaaacacaggtggagattccaaaactgcaccttcttccccactgacttctccctctgatactcgttccttttttaaagtgcccgaaatggaggctaaaattgaagatactaaacgacgcctttcagaagtcatctatgagccttttcagctccttagtaaaattataggggaagaaagtggcagccataggcccaaagccttatcttcaagtgcttcagaactctccaatctgtccagcttgaatgggcacttggaaagcaataacaactacagcatcaaggaggaggagtgtgattctgagggggatggctacggaagtgattccaacatccccagaagtgaccacccaaagtccactggtgagcccacaagagagatagaactgaaaagttcccaggggagcagtctgaaggatttaggcctgaagacaagttctctagttctggagaaatgttctttgtctgccttagtgagcaaagaagatgaagagttttgtgaactgtacactgaggacttcgatttggaaacggagggggagagtaaagttgataagctctcagatattcctctcaagccagaggtgctcgcggaagatggtgtggtccttgacagtgaggacgaggtggactcggccgtgcagcacccggaattgccagtgaagacgttgggcttctttataatgtgtgtctatgtgtacctcatcctccccctcccccactatgtgagtggactctttctgggaattggccttggattcatgactgcagtttgcgtgatttggttttttacaccaccaagtgctcataaatatcacaagttacacaaaaatctgcgacactggaacacaagatctctggatatcaaagaacctgaaatactgaagggatggatgaatgagatttacaactatgatccagaaacctaccatgcgactttgacacattcagtctttgttcgacttgagggtggaaccttaagactttcaaagcccaataaaaatatatccaggagggccagctacaatgaacccaagccagaggtcacctacatcagccagaaaatctatgacctctcagacagcaagatttatcttgtacctaaaactttggctcgaaagcgaatctggaataaaaagtaccccatttgtatcgagcttggtcagcaagatgactttatgtctaaagctcagactgataaggagacttcagaagagaagccgccagctgagggaagtgaggaccctaagaagccaccccgccctcaggagggaacaagatctagccagcgagatcagatactctatctctttgggagaactggccgagaaaaagaggaatggtttaggagatttattctggcatctaagctaaagtcggaaatcaagaagtcatcgggtgtctctggaggtaaaccagggcttttgcctgcacacagcagacacaacagtccgtccgggcacctgacccacagccgcagcagcagcaaaggcagtgtggaggagatcatgtcacagccaaagcagaaggagctggcaggcagcgtgcggcagaagatgcttctcgactacagcgtgtacatgggcaggtgtgtcccccaggaaagccgaagcccccagaggagccccctgcagagtgcggagagcagccccacagctgggaagaagttgccagaggttccaccctctgaggaggaagaacaggaagcctgggtgaatgccttgcttggaagaatattttgggacttcttaggagagaaatactggtctgatctggtgtctaagaagatccaaatgaaactcagcaaaataaagctcccctactttatgaatgagctcactctgacggaacttgacatgggcgtggctgtgccaaaaatcctccaggccttcaagccttacgttgatcaccaaggtaactcctaactgaccattctatgagtgttaaaatatatcctttgctgcagattcagtaccatgatggctttctgtttggagggtgttgaggactttttaaatcatctgtttcatgttgagtgtctttctgttcttaccagtcatggccttaaaactgatttggggccgggcatggtggcttacgcctgtaatcccagcattttgggaggccaaggcaggcggatcacctgaggtcaggaattcgaggccagcctggccaacatggcaaaacaccgtctctactaaaaaa

SEQ ID NO: 299779 - DNA, 955 bp, Homo sapiens
ggtggtggcgagggaggcggaagtgcggtgttctagcaggtggctgctttctctgggctggctgtgggaggctcccgaggtggggacccggccgggatggctgcagcggcggccggggctgggagcgggccctcggcggcccaggagaagcagttcctgccggcgctgctgagtttcttcatctacaacccgcgcttctggccgcgggaaggagaggttgttcggaatcctataattgaaaaacagtaaagatggaaaaccagttattgaatatcaagaggaggagttgttggacaaggtttatagctcggtgctgcagcagtgctacagcatgtacaagaagtctcaggggatccagaactgcagccagtccttgctgggctgttcctgtccatgtgcctggtcacggtgctggggaacctgctcatcatcctggccatcagccctgactcccacctccacacccccatgtacttcttcctctccaacctgtccttgcctgacatcggtttcacctccaccacggtccccaagatgattgtggacatccagtctcacagcagagtcatctcctatgcaggctgcctgactcagatgtctctctttgccatttttggaggcatggaagagagacatgctcctgagtgtgatggcctatgactggtttgtagccatctgtcacccgctatatcattcaccatcatgaacccgtgtttctgtgcctttctagttttgtgtctttttttctcagtcttttagactcccagctgcacaacttgattgccttacaagtgacctgcttcaaggatgtggaaattcctaatttcttctgtgacccttctcaactctcccatcttgcatgttgtgacaccttcaccattaacataatcatgtatttccctgctgccatatttggttttcttcccatcttggggacccttttctctttctctaa

SEQ ID NO: 299780 - DNA, 892 bp, Homo sapiens
ggtggtggcgagggaggcggaagtgcggtgttctagcaggtggctgctttctctgggctggctgtgggaggctcccgaggtggggacccggccgggatggctgcagcggcggccggggctgggagcgggccctcggcggcccaggagaagcagttcctgccggcgctgctgagtttcttcatctacaacccgcgcttctggccgcgggaaggagaggttgttcggaatcctataattgaaaaacagtaaagatggaaaaccagttattgaatatcaagaggaggagttgttggacaaggtttatagctcggtgctgcagcagtgctacagcatgtacaagaagtctcaggggatccagaactgcagccagtccttgctgggctgttcctgtccatgtgcctggtcacggtgctggggaacctgctcatcatcctggccatcagccctgactcccacctccacacccccatgtacttcttcctctccaacctgtccttgcctgacatcggtttcacctccaccacggtccccaagatgattgtggacatccagtctcacagcagagtcatctcctatgcaggctgcctgactcagatgtctctctttgccatttttggaggcatggaagagagacatgctcctgagtgtgatggcctatgactggtttgtagccatctgtcacccgctatatcattcaccatcatgaacccgtgtttctgtgcctttcttaaaaaaaaaaaaaaaaaaaaaagaaaaaaaaaaaaagggggggcttttttggggggggaaaaaagagtttaaaagggcacgggtaaggttgttggagcgccttttttgaaaggggaaaactggggggcccccaaagagggggataaatggaaaggggggacta

SEQ ID NO: 299781 - DNA, 771 bp, Homo sapiens
agatgtgcaaacctttatttcttacaagcattggtgtattacagattagctctaggaaagaaatatggagacttgagttttcataaaaattacctggtgctacttcagatgtgacttattgactatcgaaattgccttctgactgttgggcagtatttgcacaatgatgagataattcctgttattattttaatagagacgaggtctcacggtgttgcccaggctggtcttgaactcctgagctcaggtgatcctctcacctcggcctctcaaagtgctaggattacaattcctgtttttctaaaaccggtttttctttggttttgtcattagcatgtgcgacacaagaggtcgacactgaacttagcgttttcaatagctaagatgaaatgtttctattcatgatgtgcttctgtttcctcatgtttcaggaggaaaataagattttattttatcatccaaatgaggtagaaaagaagaagaggccgggctcggtggctcaagcctgtaatcccagcactttgggaggctgaggcgggcggatcacgaggtcaggagatcgagaccatcctggctaacacaatgaaaccccgtcaatactaaaaatacaaaaaaattagccgggcgtggtggcgggcgcctgtagtcccagctactcgggaggctgaggcaggagaatggcgtgaacccgggaggcggagcttgcagtgagcggagatcgcaccactgcactccagcctgggcgacagagcgagactccgtctccaaaaa

SEQ ID NO: 299782 - DNA, 836 bp, Homo sapiens
ggtggtggcgagggaggcggaagtgcggtgttctagcaggtggctgctttctctgggctggctgtgggaggctcccgaggtggggacccggccgggatggctgcagcggcggccggggctgggagcgggccctcggcggcccaggagaagcagttcctgccggcgctgctgagtttcttcatctacaacccgcgcttctggccgcgggaaggagagacctcccagtgccaagtgtataagcgtgtccagaattggtgggtctcactgacttcaagaatgaagccgcggaccctcctggcggaattctccacgagttttgagcagcctcggttttcccaccacctccaaatcatgcaagacacagggtaagagcaaagacaaggtggctgtggccgatgtccaccctctcggggcgtcccttctcttctctcctccttgagcagggagaccatcggggtgcaacctggttggggcggggaggaggtgcagggcctggccagagcgggcctggccacgggcaagggacagcgacccccgggccaggacaggtgagagcggcgcaggcccgggccggcgtggcggaggtgcgcgtgagcggcagcagagggcgccagagagccaggagcgggccgagaggagcccgcgccggccccggtgcccacctccgcgccggcgagccctccgagcccgcgctcagacgccccagctccgccgagaggccgcttgctgccggggtccttcttccccaaatgcaggcagagccccggagccatggccagcccttccggcagctccaaagccactggcaagccccgaggcagggatggccggcccag

SEQ ID NO: 299783 - DNA, 788 bp, Homo sapiens
aattcttaaaactgctgctggagaattgtcccaaacatatttttttaacctttgtaggacctttagcccatcaaaacctgcaaaatctttacatacgcagaagaacagacagttctttaatgaaccagaagaaaatttctggatggtcatggtatttacatacacagtgtatctttctgaaattgtatggtgaagttatgggtgatctttactattcagaatttagcaaagttctctggctattgcatccaagtaaaattaaaataaaattcgttgcagttttaaaatcaagttcttcctgtttgctttattcgttcttggggctgctttaagaagctgtgtttctggtgctgtagcatgtgcaaagtttttaaactaaggcaaaataaacatggtctaatgaattcattgtataatttcagtttatcaaactttgtaggttgttcggaatcctataattgaaaaacagtaaagatggaaaaccagttattgaatatcaagaggaggagttgttggacaaggtttatagctcggtgctgcagcagtgctacagcatgtacaagaaatttgtttcaatgaagaaactgtggtatacacacccaatgaagtattattcagcctaaaaaggaagaaactcctctccgctgcagacaaaatggatgagattgcaggtctgtatattaaaggaaagaagccaggcacagaatgacaaatatttcatgtcctcacttctatgtaggaagaaaaaagacaccttggccaggtgtggtggctcaggcctggaatcc

SEQ ID NO: 299784 - DNA, 384 bp, Homo sapiens
caggtcctgggtcgatgtctgtctatggaataaagccccgtcaggaggaaaataagattttattttatcatccaaatgaggtagaaaagaagaagaggccgggctcggtggctcaagcctgtaatcccagcactttgggaggctgaggcgggcggatcacgaggtcaggagatcgagaccatcctggctaacacaatgaaaccccgtcaatactaaaaatacaaaaaaattagccgggcgtggtggcgggcgcctgtagtcccagctactcgggaggctgaggcaggagaatggcgtgaacccgggaggcggagcttgcagtgagcggagatcgcaccactgcactccagcctgggcgacagagcgagactccgtctccaaaaa

SEQ ID NO: 299785 - DNA, 368 bp, Homo sapiens
ggtggtggcgagggaggcggaagtgcggtgttctagcaggtggctgctttctctgggctggctgtgggaggctcccgaggtggggacccggccgggatggctgcagcggcggccggggctgggagcgggccctcggcggcccaggagaagcagttcctgccggcgctgctgagtttcttcatctacaacccgcgcttctggccgcgggaaggagaggaggaaaataagattttattttatcatccaaatgaggtagaaaagtgctgggattacagacgtgagccaccgcactcggcctacagaaaatttttttaaaaattagccatgtgtggtgatgcgcacctgtagtcccagctactctggaggct

SEQ ID NO: 299786 - DNA, 907 bp, Homo sapiens
ggtggtggcgagggaggcggaagtgcggtgttctagcaggtggctgctttctctgggctggctgtgggaggctcccgaggtggggacccggccgggatggctgcagcggcggccggggctgggagcgggccctcggcggcccaggagaagcagttcctgccggcgctgctgagtttcttcatctacaacccgcgcttctggccgcgggaaggagaggttgttcggaatcctataattgaaaaacagtaaagatggaaaaccagttattgaatatcaagaggaggagttgttgaagtctcaggggatccagaactgcagccagtccttgctgggctgttcctgtccatgtgcctggtcacggtgctggggaacctgctcatcatcctggccatcagccctgactcccacctccacacccccatgtacttcttcctctccaacctgtccttgcctgacatcggtttcacctccaccacggtccccaagatgattgtggacatccagtctcacagcagagtcatctcctatgcaggctgcctgactcagatgtctctctttgccatttttggaggcatggaagagagacatgctcctgagtgtgatggcctatgactggtttgtagccatctgtcacccgctatatcattcaccatcatgaacccgtgtttctgtgcctttctagttttgtgtctttttttctcagtcttttagactcccagctgcacaacttgattgccttacaagtgacctgcttcaaggatgtggaaattcctaatttcttctgtgacccttctcaactctcccatcttgcatgttgtgacaccttcaccattaacataatcatgtatttccctgctgccatatttggttttcttcccatcttggggacccttttctctttctctaa

SEQ ID NO: 299787 - DNA, 924 bp, Homo sapiens
aaaagataggctgtattttctagcagttacgaatttgttatgtatgatgatctggttcttggaacattcttgaatctagtgtctctaaggcaggtgtgtacagcaagaagtgaataacacagaaatcaatgatgaaagcattagaagacaattgagtctgtcagaactgcaaaatattgctgagtgtggattgctctgaaatctgaaaacattacttgtgaattgcttctattctcgtttctaggcaaaggtgtccaaattatgcagacccacagaatctaacagatgtctctatattcctcctcctagaagtctcaggggatccagaactgcagccagtccttgctgggctgttcctgtccatgtgcctggtcacggtgctggggaacctgctcatcatcctggccatcagccctgactcccacctccacacccccatgtacttcttcctctccaacctgtccttgcctgacatcggtttcacctccaccacggtccccaagatgattgtggacatccagtctcacagcagagtcatctcctatgcaggctgcctgactcagatgtctctctttgccatttttggaggcatggaagagagacatgctcctgagtgtgatggcctatgactggtttgtagccatctgtcacccgctatatcattcaccatcatgaacccgtgtttctgtgcctttctagttttgtgtctttttttctcagtcttttagactcccagctgcacaacttgattgccttacaagtgacctgcttcaaggatgtggaaattcctaatttcttctgtgacccttctcaactctcccatcttgcatgttgtgacaccttcaccattaacataatcatgtatttccctgctgccatatttggttttcttcccatcttggggacccttttctctttctctaa

SEQ ID NO: 299788 - DNA, 795 bp, Homo sapiens
ggtggtggcgagggaggcggaagtgcggtgttctagcaggtggctgctttctctgggctggctgtgggaggctcccgaggtggggacccggccgggatggctgcagcggcggccggggctgggagcgggccctcggcggcccaggagaagcagttcctgccggcgctgctgagtttcttcatctacaacccgcgcttctggccgcgggaaggagaggttgttcggaatcctataattgaaaaacagtaaagatggaaaacctgctcatcatcctggccatcagccctgactcccacctccacacccccatgtacttcttcctctccaacctgtccttgcctgacatcggtttcacctccaccacggtccccaagatgattgtggacatccagtctcacagcagagtcatctcctatgcaggctgcctgactcagatgtctctctttgccatttttggaggcatggaagagagacatgctcctgagtgtgatggcctatgactggtttgtagccatctgtcacccgctatatcattcaccatcatgaacccgtgtttctgtgcctttctagttttgtgtctttttttctcagtcttttagactcccagctgcacaacttgattgccttacaagtgacctgcttcaaggatgtggaaattcctaatttcttctgtgacccttctcaactctcccatcttgcatgttgtgacaccttcaccattaacataatcatgtatttccctgctgccatatttggttttcttcccatcttggggacccttttctctttctctaa

SEQ ID NO: 299789 - DNA, 245 bp, Homo sapiens
ctgaaatctgaaaacattacttgtgaattgcttctattcaaaatgcagacacaatgccaggtgttggtttacttgtttcccatttttcaaccctcgtttctaggcaaaggtgtccaaattatgcagacccacagaatctaacagatgtctctatattcctcctcctagaagtctcaggggatccagaactgcagccagtccttgctgggctgttcctgtccatgtgcctggtcacggtgctgggg

SEQ ID NO: 299790 - DNA, 506 bp, Homo sapiens
aattcgcggccgcgtcgacacgacagaagggcggggcccaagatggcggccagccggtaccggcgttttcttaagctctgtgaggaatggccagtggacgagaccaaacggggccgggacttgggcgcttacctgcgacagcgggtagcacaggcctttcgggagggagagaatacccaggttgcagagcctgaggcctgtgatcagatgtacgagagcttagcgcgactccattcaaactactacaaacacaagtaccctcgccccagagacaccagcttcagtggcctgtcgttggaagagtacaagctgatcctgtccacagacaccttggaagagcttaaggaaatagataaaggcatgtggaagaaactgcaggagaagtttgcccccaagggtcctgaggaggatcataaggcctgagctcaggccttacctcgtgcacatacctaggtgtggagtcttgtacattgccatcgtcaataaaactgccccagtttcccctt

SEQ ID NO: 299791 - DNA, 836 bp, Homo sapiens
catccagtaacctgtatttacatgcaaatatattggtttatgcaaaacagcggaggcctcgggggagggttttttagtctcaagcttgtgcagtcattgaaaaagagacgcaaagctgtctctggggtactccacgtccgccttgcccctgggagctgggccggttccaggaggacgaagactgaattagctcggcttgcagagaaaggcgagcagcgcccctacacggagagtagcggtgcgcctacaaagtcgcgcatgcccactccggcctcccgctccactcctaaggcaggcggcgaggcttagtgcgcaagcgccattcgtcggcgccgactcctcccgctaaggcgggaacacgcggggcccaagatggcggccagccggtaccggcgttttcttaagctctgtgaggaatggccagtggacgagaccaaacggggccgggacttgggcgcttacctgcgacagcgggtagcacaggcctttcgggagggagagaatacccaggttgcagagcctgaggcctgtgatcagatgtacgagagcttagcgcgactccattcaaactactacaaacacaagtaccctcgccccagagacaccagcttcagtggcctgtcgttggaagagtacaagctgatcctgtccacagacaccttggaagagcttaaggaaatagataaaggcatgtggaagaaactgcaggagaagtttgcccccaagggtcctgaggaggatcataaggcctgagctcaggccttacctcgtgcacatacctaggtgtggagtcttgtacattgccatcgtcaataaaactgccccagtttcccctt

SEQ ID NO: 299792 - DNA, 392 bp, Homo sapiens
gagcaacctactggtgacttctcactgctagagaagttggagcaggaagggaacttgagttgaaaggttgcagagcctgaggcctgtgatcagatgtacgagagcttagcgcgactccattcaaactactacaaacacaagtaccctcgccccagagacaccagcttcagtggcctgtcgttggaagagtacaagctgatcctgtccacagacaccttggaagagcttaaggaaatagataaaggcatgtggaagaaactgcaggagaagtttgcccccaagggtcctgaggaggatcataaggcctgagctcaggccttacctcgtgcacatacctaggtgtggagtcttgtacattgccatcgtcaataaaactgccccagtttcccctt

SEQ ID NO: 299793 - DNA, 1081 bp, Homo sapiens
ggcagcaacgaaggctgggagatagtcccgccattggtccgcgctgcagcttgttctggcagcgagtttagttcaggaaatttgctgagaatttgttttcacagcaagcctcatatttttgttgcaaattgtgtggcgtaacttaccaaatgtttcctctgacaggacaagaaaagacctgcagcaccttgtagtgagaggctttgagggcctggcaagtctgaaatgtgctgtgttctgggttatgtgtgtgtccaccctgggattggggtcatggaaagcgcctaagggaggcctcagtgtccacctggacactggaaacatgggacttctggaaaagctccagagcaggggcttttttctgttaccttttttggtcagaaaagatactctttttttctccagtagttttgttaacgtgaaaatttaggctggtaaagcaaaacaatattataagaatatctaaaatttaacatgcacgtaaaattagatttcatggaacattagccctagagactttagacaaatggttccgtactggggggatggttttgccccccaggggacatgtggcaatgtctggagacatttttagttgtcacaactggtggtgcgggcagcggtgctactggcattagtgggtagaggccaggatgctttgaaacagccttcagtgatgcacaggccagcccacgacgaaaaattatctggcccaaagtgttggtagtgccaaggccaagaaaccctgctttggttcctgggtgtagggacgtgtatgttcttaaacaagagcccctcccgcctgcattgtggtggatgatggctgccttttcattgagtgcgggctgtgtgccaagcgagttacctccatgcttttctttaatccttacaacttttgagacaccttggaagagcttaaggaaatagataaaggcatgtggaagaaactgcaggagaagtttgcccccaagggtcctgaggaggatcataaggcctgagctcaggccttacctcgtgcacatacctaggtgtggagtcttgtacattgccatcgtcaataaaactgccccagtttcccctt

SEQ ID NO: 299794 - DNA, 942 bp, Homo sapiens
  misc_feature (46)..(46): n is a, c, g, or t
tatataaaaacgtctcaagcaaactatagcacctgcgcgcgtgagnggttgcccatatgttgcagagcctgaggcctgtgatcagatgtacgagagcttagcgcgactccattcaaactactacaaacacaagtaccctcgccccagagacaccagcttcagtggcctgtcgttggaagagtacaagctgatcctgtccacagacaccttggaagagcttaaggaaatagataaaggcatgtggaagaaactgcaggagaagtttgcccccaagggtcctgaggaggatcataaggcctgagctcaggccttacctcgtgcacatacctaggtgtggagtcttgtacattgcccctatccatataattcccccagataaccattggaagcaaacactactcacgcccttatacgcccgcactagtggacctctaacgtaatattctcttgcagtgagggacacaccacgatctacaatcattaacttaattgtgttaggtccttttcagactacccctgcaaatacctactacatatgcaagccattcatattatacattacctaaggcgtaaatcatttcccctcgcatttcatactatcgacatatgtacccccccagaacacaacgatatatttattgtctatcgacatatccgaaatctgttacattactaccaccactcccatggatctctatgtttacaatcgcacgacaataacccgataaaaacaaccacgtttcctacacgaatacctctctactcctccctcgatccattccccgaccaacacccaccccccacttacccagctacactattctctcccacttaccgttctcccgccgccctccttcctattatatgatccatatgcccgcacccccgatatgctcaatttcgccgaatatgtcatttacattagtcttctttatacccact

SEQ ID NO: 299795 - DNA, 436 bp, Homo sapiens
gttggcgctgcagctctgggattcattcattcatatagctcgtatttattgagcacctaccatatgcctggaacggtgctagggaaacagcagtgttaaacaggtgaagtcctgcccgcatgaagttttacattgtagttcaggacacaataagcaggagcagcactctgcaagggtgacccgccccccatgcccctcctgtctgccctgctggctgaggacacacacagggtcacctcgttattccatggaaccttggctcttactgatattgagcatccttctctctggaaccgtgagggacagggctgggcccacagcggccctggtgggtacaaagtggaagtgggttcttaacctcgtctgtgtctagactcctcaggatgttctgaaatgcataaaataaaatcgacaggactgccgtagaaaccagtta

SEQ ID NO: 299796 - DNA, 395 bp, Homo sapiens
  misc_feature (354)..(354): n is a, c, g, or t
tttgtaggattagattgttatctcacaacttgtgcaactgagctttgtcgagtcgagagctacgcgactccattcaactactacttcacaagtaccctcgccccagagacaccagcttcagtggcctgtcgttggaagagtacaagctgatcctgtccacagacaccttggaagagcttaaggaaatagataaaggcatgtggaagaaactgcaggagaagtttgcccccaagggtcctgaggaggatcataaggcctgagctcaggccttacctcgtgcacatacctaggtgtggagtcttgtacattgccatcgtcaataaaactgccccagtttccccttaacagaatatntaaatcattaaaaaaaaataaattggccttctttggcctca

SEQ ID NO: 299797 - DNA, 1649 bp, Homo sapiens
catccagtaacctgtatttacatgcaaatatattggtttatgcaaaacagcggaggcctcgggggagggttttttagtctcaagcttgtgcagtcattgaaaaagagacgcaaagctgtctctggggtactccacgtccgccttgcccctgggagctgggccggttccaggaggacgaagactgaattagctcggcttgcagagaaaggcgagcagcgcccctacacggagagtagcggtgcgcctacaaagtcgcgcatgcccactccggcctcccgctccactcctaaggcaggcggcgaggcttagtgcgcaagcgccattcgtcggcgccgactcctcccgctaaggcgggaacacgcggggcccaagatggcggccagccggtaccggcgttttcttaagctctgtgaggaatggccagtggacgagaccaaacggggccgggacttgggcgcttacctgcgacagcgggtagcacaggcctttcgggagggagagaatacccaggttgcagagcctgaggcctgtgatcagatgtacgagagcttagcgcgactccattcaaactactacaaacacaagtaccctcgccccagagacaccagcttcagtggcctgtcgttggaagagtacaagctgatcctgtccacagacaccttggaagagcttaaggaaatagataaaggcatgtggaagaaactgcaggagaagtttgcccccaagggtcctgaggaggatcataaggcctgagctcaggccttacctcgtgcacatacctaggtgtggagtcttgtacattgccatcgtcaataaaactgccccagtttccccttgaccttacggtttgggaatctcctctagctttcccagaaaggaagcccttgctgctctaaagaaagtttcagcctgagaagggatggtgattgagctatctgctgtgactgctgctcagggtagggaaatctcctggggagaggaaatgcaggtttccctctgggcctgatgagggtaatggggcctcggcacaaggtgcttcctgcattgccacgggagcccccgcccctctggcacgggtctggtgtctcctggcaagatactcaggctcccttttgttgtaggagctcctgggaggaagccaaaaatagcagtaaatactgaaaagggcatcctgttgcaaagagaaagcagtagggaggtgtgaggccgagagaggcaaaaagcctgcttggccctcatccccactgactcagagaaggatggaccttaggcctctatccctgaccttgcaaaaacccacattgcccagttggcttaagggacagggaagctatagacaggccttggccaagcggggcctcagctgcagttggcttcagcactgtgggcaggttctgtaggtggccacaagtcagaggccctgctggctgaggacacacacagggtcacctcgttattccatggaaccttggctcttactgatattgagcatccttctctctggaaccgtgagggacagggctgggcccacagcggccctggtgggtacaaagtggaagtgggttcttaacctcgtctgtgtctagactcctcaggatgttctgaaatgcataaaataaaatcgacaggactgccgtagaaaccagtta

SEQ ID NO: 299798 - DNA, 1690 bp, Homo sapiens
tttttttttcttactttttcacctctccccaagttgtctgcagatgtgtgtttttatcttcattttacagatgaggaacccgaagcgtagagggttaagtaatttgcttgaggggacccagagtgggagatgatgggctcggattcaggcccaaggccatccccctcccagtgcctgctcaactccacagcatgtgctgagtccacacaccaggattcaaatccctgctccacttcccagctgtgcaacctgagcaagttacttcactgcctcctgcctcagtttccacacctgaaaactggggacaggaagggctgtgtggagcaggccaaattttgcgatgaagcatctgggtctgtgggttgcacagcggacagcgcagggccatttctttgccctcatacggagcagggcaacgagcagcacatcccgctttgatgccgagggtgaggagagggcaggagaccactgacagcgtgctgggcacagagtctggcacacagtgctcagtccccgcaagcggtcacttctgttacctgtttgatctgctcttcaggagctgggtctccacctttttcaggaacacactgtgtgaaaagcaagccatgcttgtgtcgggaaagcccagtgggtccaatctatgtcatcaagttttagacttcagtccctctctctttttgtcttccccttttgcagacaccttggaagagcttaaggaaatagataaaggcatgtggaagaaactgcaggagaagtttgcccccaagggtcctgaggaggatcataaggcctgagctcaggccttacctcgtgcacatacctaggtgtggagtcttgtacattgccatcgtcaataaaactgccccagtttccccttgaccttacggtttgggaatctcctctagctttcccagaaaggaagcccttgctgctctaaagaaagtttcagcctgagaagggatggtgattgagctatctgctgtgactgctgctcagggtagggaaatctcctggggagaggaaatgcaggtttccctctgggcctgatgagggtaatggggcctcggcacaaggtgcttcctgcattgccacgggagcccccgcccctctggcacgggtctggtgtctcctggcaagatactcaggctcccttttgttgtaggagctcctgggaggaagccaaaaatagcagtaaatactgaaaagggcatcctgttgcaaagagaaagcagtagggaggtgtgaggccgagagaggcaaaaagcctgcttggccctcatccccactgactcagagaaggatggaccttaggcctctatccctgaccttgcaaaaacccacattgcccagttggcttaagggacagggaagctatagacaggccttggccaagcggggcctcagctgcagttggcttcagcactgtgggcaggttctgtaggtggccacaagtcagaggccctgctggctgaggacacacacagggtcacctcgttattccatggaaccttggctcttactgatattgagcatccttctctctggaaccgtgagggacagggctgggcccacagcggccctggtgggtacaaagtggaagtgggttcttaacctcgtctgtgtctagactcctcaggatgttctgaaatgcataaaataaaatcgacaggactgccgtagaaaccagtta

SEQ ID NO: 299799 - DNA, 1388 bp, Homo sapiens
tctaaatcctccctgctaacatgtgatccatgagcagcagcatgggcatcacctgggaactggttagaaatgcagaatcaggggccccacccatacctgcgttttccagggaggactcacgggtacattatagttggagctgcctcctggagactgtactggttcttgcgaggccaagtcttgacctcgaggtggcgctgctcttctccttgctaggcctcctggcctctggttgcccagggcctaggtgaaatgcagttagagagcagggcttgtgtgctgatctctcccctcccttcacttcctttctgccccggtgaccagtaccctcgccccagagacaccagcttcagtggcctgtcgttggaagagtacaagctgatcctgtccacagacaccttggaagagcttaaggaaatagataaaggcatgtggaagaaactgcaggagaagtttgcccccaagggtcctgaggaggatcataaggcctgagctcaggccttacctcgtgcacatacctaggtgtggagtcttgtacattgccatcgtcaataaaactgccccagtttccccttgaccttacggtttgggaatctcctctagctttcccagaaaggaagcccttgctgctctaaagaaagtttcagcctgagaagggatggtgattgagctatctgctgtgactgctgctcagggtagggaaatctcctggggagaggaaatgcaggtttccctctgggcctgatgagggtaatggggcctcggcacaaggtgcttcctgcattgccacgggagcccccgcccctctggcacgggtctggtgtctcctggcaagatactcaggctcccttttgttgtaggagctcctgggaggaagccaaaaatagcagtaaatactgaaaagggcatcctgttgcaaagagaaagcagtagggaggtgtgaggccgagagaggcaaaaagcctgcttggccctcatccccactgactcagagaaggatggaccttaggcctctatccctgaccttgcaaaaacccacattgcccagttggcttaagggacagggaagctatagacaggccttggccaagcggggcctcagctgcagttggcttcagcactgtgggcaggttctgtaggtggccacaagtcagaggccctgctggctgaggacacacacagggtcacctcgttattccatggaaccttggctcttactgatattgagcatccttctctctggaaccgtgagggacagggctgggcccacagcggccctggtgggtacaaagtggaagtgggttcttaacctcgtctgtgtctagactcctcaggatgttctgaaatgcataaaataaaatcgacaggactgccgtagaaaccagtta

SEQ ID NO: 299800 - DNA, 1894 bp, Homo sapiens
ggcagcaacgaaggctgggagatagtcccgccattggtccgcgctgcagcttgttctggcagcgagtttagttcaggaaatttgctgagaatttgttttcacagcaagcctcatatttttgttgcaaattgtgtggcgtaacttaccaaatgtttcctctgacaggacaagaaaagacctgcagcaccttgtagtgagaggctttgagggcctggcaagtctgaaatgtgctgtgttctgggttatgtgtgtgtccaccctgggattggggtcatggaaagcgcctaagggaggcctcagtgtccacctggacactggaaacatgggacttctggaaaagctccagagcaggggcttttttctgttaccttttttggtcagaaaagatactctttttttctccagtagttttgttaacgtgaaaatttaggctggtaaagcaaaacaatattataagaatatctaaaatttaacatgcacgtaaaattagatttcatggaacattagccctagagactttagacaaatggttccgtactggggggatggttttgccccccaggggacatgtggcaatgtctggagacatttttagttgtcacaactggtggtgcgggcagcggtgctactggcattagtgggtagaggccaggatgctttgaaacagccttcagtgatgcacaggccagcccacgacgaaaaattatctggcccaaagtgttggtagtgccaaggccaagaaaccctgctttggttcctgggtgtagggacgtgtatgttcttaaacaagagcccctcccgcctgcattgtggtggatgatggctgccttttcattgagtgcgggctgtgtgccaagcgagttacctccatgcttttctttaatccttacaacttttgagacaccttggaagagcttaaggaaatagataaaggcatgtggaagaaactgcaggagaagtttgcccccaagggtcctgaggaggatcataaggcctgagctcaggccttacctcgtgcacatacctaggtgtggagtcttgtacattgccatcgtcaataaaactgccccagtttccccttgaccttacggtttgggaatctcctctagctttcccagaaaggaagcccttgctgctctaaagaaagtttcagcctgagaagggatggtgattgagctatctgctgtgactgctgctcagggtagggaaatctcctggggagaggaaatgcaggtttccctctgggcctgatgagggtaatggggcctcggcacaaggtgcttcctgcattgccacgggagcccccgcccctctggcacgggtctggtgtctcctggcaagatactcaggctcccttttgttgtaggagctcctgggaggaagccaaaaatagcagtaaatactgaaaagggcatcctgttgcaaagagaaagcagtagggaggtgtgaggccgagagaggcaaaaagcctgcttggccctcatccccactgactcagagaaggatggaccttaggcctctatccctgaccttgcaaaaacccacattgcccagttggcttaagggacagggaagctatagacaggccttggccaagcggggcctcagctgcagttggcttcagcactgtgggcaggttctgtaggtggccacaagtcagaggccctgctggctgaggacacacacagggtcacctcgttattccatggaaccttggctcttactgatattgagcatccttctctctggaaccgtgagggacagggctgggcccacagcggccctggtgggtacaaagtggaagtgggttcttaacctcgtctgtgtctagactcctcaggatgttctgaaatgcataaaataaaatcgacaggactgccgtagaaaccagtta

SEQ ID NO: 299801 - DNA, 1127 bp, Homo sapiens
catccagtaacctgtatttacatgcaaatatattggtttatgcaaaacagcggaggcctcgggggagggttttttagtctcaagcttgtgcagtcattgaaaaagagacgcaaagctgtctctggggtactccacgtccgccttgcccctgggagctgggccggttccaggaggacgaagactgaattagctcggcttgcagagaaaggcgagcagcgcccctacacggagagtagcggtgcgcctacaaagtcgcgcatgcccactccggcctcccgctccactcctaaggcaggcggcgaggcttagtgcgcaagcgccattcgtcggcgccgactcctcccgctaaggcgggaacacgcggggcccaagatggcggccagccggtaccggcgttttcttaagctctgtgaggaatggccagtggacgagaccaaacggggccgggacttgggcgcttacctgcgacagcgggtagcacaggcctttcgggagggagagaatacccaggttgcagagcctgaggcctgtgatcagatgtacgagagcttagcgcgactccattcaaactactacaaacacaagtaccctcgccccagagacaccagcttcagtggcctgtcgttggaagagtacaagctgatcctgtccacagacaccttggaagagcttaaggaaatagataaaggcatgtggaagaaactgcaggagaagtttgcccccaagggtcctgaggaggatcataaggcctgagctcaggccttacctcgtgcacatacctaggtgtggagtcttgtacattgccatcgtcaataaaactgccccagtttccccttaaaaaaaaaaaaaaaaaaaaaaaacaaaactgtgtggggaccctcgcgcacccggagaaaagattgtttacaacctttcgttgggggcgcggcgacccgaaggtttagatggaccaccggcccaaaacggctgccagagaaaacccgggcccagaacaggcgcctggctttcccacccaaaaaaaaagccgcggggcgacacggcgtctcggaagacaatccacggggactcggaggcatgacgggtcttccacagggtcaggcatcgtaaaccgcgcgaggcgcgcggga

SEQ ID NO: 299802 - DNA, 1086 bp, Homo sapiens
catccagtaacctgtatttacatgcaaatatattggtttatgcaaaacagcggaggcctcgggggagggttttttagtctcaagcttgtgcagtcattgaaaaagagacgcaaagctgtctctggggtactccacgtccgccttgcccctgggagctgggccggttccaggaggacgaagactgaattagctcggcttgcagagaaaggcgagcagcgcccctacacggagagtagcggtgcgcctacaaagtcgcgcatgcccactccggcctcccgctccactcctaaggcaggcggcgaggcttagtgcgcaagcgccattcgtcggcgccgactcctcccgctaaggcgggaacacgcggggcccaagatggcggccagccggtaccggcgttttcttaagctctgtgaggaatggccagtggacgagaccaaacggggccgggacttgggcgcttacctgcgacagcgggtagcacaggcctttcgggagggagagaatacccaggttgcagagcctgaggcctgtgatcagatgtacgagagcttagcgcgactccattcaaactactacaaacacaagacaccttggaagagcttaaggaaatagataaaggcatgtggaagaaactgcaggagaagtttgcccccaagggtcctgaggaggatcataaggcctgagctcaggccttacctcgtgcacatacctaggtgtggagtcttgtacattgccatcgtcaataaaactgccccagtttccccttcgaaaaaaaagatagcacaaaacaaaatttttgggggccggtgggggccacgaggaaaagagttttgaaagccccacctgcggttgtggggggcgcgcgcgacccaataagagcaatgtcgaacacggttgggacaacacgggggccccgagagagaaccggtgagcgacgagcagtgtggcgtgggtgctcccaccgataataaaaaacggcggggggggaacacacgacgcggttgtgaacactcaaaggggggccagggagacagcggggcccaacaaggggccaggggaggcaaaataaatcgaggcgggagagag

SEQ ID NO: 299803 - DNA, 693 bp, Homo sapiens
cgcccgttgtattcagcgctctcccccggctgcaccttggaattgccgaagaagctttttttaaactccagatgggccgggtgcggcggttcacacctataattccagcactctttgagaggccgaggcgggaggatcgcttgagcccaggatgacctcctgggcaacatagtgggactccgtctctacaaatcaaaaaacaaacaaaaacttcaaatgcagaatctctaggggtggggtcttgacctcagagttttaaaagctctccaggtgattcaaggtgcagagagagttgagacccacaccaccagtggcagctggtgacagcctcagctttttgcttccttgtcacggtagcattacctcattatttcgcagtgttgtgtattgactgagctaatccccagttaactctgcaggtccccgctaagcgtttgcgttcttcctgagcccctgtaagcctgtgcagcaggtttgggtcctcagctcacgcagctgtgtgtgagtagtaggcctatgttcttgctttcctccaggttggcgctgcagctctgggattcattcattcatatagctcgtatttattgagcacctaccatatgcctggaacggtgctagggaaacagcagtgttaaacaggtgaagtcctgcccgcatgaagttttacattgtagttcaggacacaataagcag

SEQ ID NO: 299804 - DNA, 296 bp, Homo sapiens
atgattcatatgcaatatcaattgtagtcatcttaaatattatatagaatttgaaagccaagaatatcaaagaaaataactttttctccaaagaaataatggtaggtggcccactctaacagtatatataaaaagaagtaagataatggcaaaattatggcatatataaatgttaaatcagggatgtccaatcttttggctttcctgggccacattggaagaaaaattgtcttgggccacacataaaatacactaacactaacgatagctgatgagcttaaaaaaaaaaaaattga

SEQ ID NO: 299805 - DNA, 228 bp, Homo sapiens
tcttttttttttacaggaacacagatttgatgctttaataaaaaaaaaaatacgatttctgcaaaaggtgcttaacacggcccaggacgggctgtccggtggagtcagccctaggacccctgaaggatgcataaagacagagccggctcgccagcacgctcctgccagcaccgggacccactgcgagccactgcggggtgtccttcattaaaaaaaagtctggattgt

SEQ ID NO: 299806 - DNA, 2711 bp, Homo sapiens
tccgctgtttttttctccgcccctaagaggttgactccaaacccggagttccgctaggtccaacaggagggcttacggcgtgagcggcgtacctggggagaggcttaggcagcggcaaccgctgattggcagtaaaggggttcactccccatctcctgctcgggcgaaaccgggacagccaatcagagagagtactgacggaaacggcccaatcctggagcagggctgagggagggggcggggacaaatggctcaggtggactccgggctggagctgtcctgggggagcttgtttgcggcagcggctgctgctgccactgctgtgctgggggcccggtcgccaggcaaaaagccctcccacgtttgaggggagtcatgagccgtttcctgaatgtgttaagaagttggctggttatggtgtccatcatagccatggggaacacgctgcagagcttccgagaccacacttttctctatgaaaagctctacactggcaagccaaaccttgtgaatggcctccaagctcggacctttgggatctggacgctgctctcatcagtgattcgctgcctctgtgccattgacattcacaacaagacgctctatcacatcacactctggaccttcctccttgccctggggcatttcctctctgagttgtttgtctatggaactgcagctcccacgattggcgtcctggcacccctgatggtggcaagtttctccatcctgggtatgctggtcgggctccggtatctagaagtagaaccagtatccagacagaagaagagaaactgaggccagcattatcacctccaggactttctcgttttccaccttggccatcttcttccttcgtcgtctctcctctttaatttcttttctattccatcatctgcccttttattcacttttagcctctttttttaatttttaaaatttaaagatatgcatactgaaaagtatataacatgtacgtacaatttaaagaataattttaaagtgaatactacgtaactccatccaagtcaagaaattgccagcttctcggaagcccactgtgtctccttcccctacctgcaacctcttccaggctcccttttccagccttcccctttttcccttttattttcatgccttgatttgacttgtgtggtgggaacatgtgaactatgaaacttaaacctgctgcccacccagagcagctgtgaccaagggctgcctcaaggggttgtccacgcaggttgggctcctctctgctgctggacccaagactctgaaccttccaagggacaggcagttcttctaagaagggctcccctgtgtgtgagcaagaccacagctctccttctatctacagatgcatgagggttggaagagtctgggctgtttttagaccttctggtcagctgtatttgtgtaacaacttttgtaataaatagaaaaaccctctgctctgatcagttcttgtactttgacctctgctaagacaagagcatggctgcctcctctgagccctaggagaatcacagctttatgcctgattgaatacaccatagtgagtaggacagctcatgacacaggtcagcctggctgcctccggctccttactgtcatttgctcattcctcttgtattcttgaagtcaaatcttcttttttctcaccttcaagagtctgcgttcacaactaaacactaagtgccctttcttatttcctcctaaagaagaaacagattcttgagagagcagagacaaaaaaatagaactaggcagcatagatgaaacaactgcatgacatgggaagaagacaactaaaccccgaggagaatgcactggaatggacagttgctcttaaaccctacccagagggcctcccccagctggaccctcatacacagtgtgtgtatccaaaaggccattgctatttcagcaaatatttgttgagtacttctccatgccggacacttgggaaagagaaatgaacgacacaggcaatgcccctgccctgtgggccttatattatagtcaaggtaacagaatcaacaagccaacacaaaaataaagaacttcaaatagggataagaactctaacaaacacaaggtattttggtcaagaaggaatgtggggtgggcagtggggaacgtaacttaaattagatcatcagaaagtcctccctgaggagatggatttttttttgtttttttagagacggggtttcactctgtcacccaggctggagtgcagtggcacaatcacacctcactgcagcctcaacttcctgggctcaagtgatcctcctgcatcagcttcccaagtagctgggactgcaagtgtgtaccaccacatccagctaacatttttgggggtgggaagagatggggtcttactatgttgtccaggctaagaggtgggatttgagctgagacttgaatgcccaggagttaaatgtcttaagatatggagcaggccgttagaaaggagggagcagcaactggaaggtagaatagtcttattcaaggaataagaactatgtaatcacagcatggtgaagagttaggaagtgaaagaaaaggtcagaaaaggaggcaaggggcttataagggtgtgataagaagcttgatgtttacacttaaatacattgggaattctcttatcagttaagtctctttaggtgaaaggacaaaacctaccttaaactagcttaaacaat

SEQ ID NO: 299807 - DNA, 788 bp, Homo sapiens
gagaagaaaggtaccgtatgtatgttagtcactagtctttcctctgtatttaaggtttctccatcctgggtatgctggtcgggctccggtatctagaagtagaaccagtatccagacagaagaagagaaactgaggccagcattatcacctccaggactttctcgttttccaccttggccatcttcttccttcgtcgtctctcctctttaatttcttttctattccatcatctgcccttttattcacttttagcctctttttttaatttttaaaatttaaagatatgcatactgaaaagtatataacatgtacgtacaatttaaagaataattttaaagtgaatactacgtaactccatccaagtcaagaaattgccagcttctcggaagcccactgtgtctccttcccctacctgcaacctcttccaggctcccttttccagccttcccctttttcccttttattttcatgccttgatttgacttgtgtggtgggaacatgtgaactatgaaacttaaacctgctgcccacccagagcagctgtgaccaagggctgcctcaaggggttgtccacgcaggttgggctcctctctgctgctggacccaagactctgaaccttccaagggacaggcagttcttctaagaagggctcccctgtgtgtgagcaagaccacagctctccttctatctacagatgcatgagggttggaagagtctgggctgtttttagaccttctggtcagctgtatttgtgtaacaacttttgtaataaatagaaaaaccctc

SEQ ID NO: 299808 - DNA, 424 bp, Homo sapiens
ctctacccgcttaatgagatcaccactttgctgagacctggacgttcattctggatgcctgaaccattctcctctcagtttagcagatgaaaccttcagttttgccctagatgagaatatcgttgtgatcaaataaccagctcttcctcaggaacaagtgtcctttcttttaagtcttaatgacatcctgggttcttatttgtctgtatgaagtctgatacttttcctctgttctgaacaaacagtaactttggttcccatttctgtctgcttccttataggctctatcacatcacactctggaccttcctccttgccctggggcatttcctctctgagttgtttgtctatggaactgcagctcccacgattggcgtcctggcacccctgatggtggcaagtaagcatccaaccaccctagacc

SEQ ID NO: 299809 - DNA, 312 bp, Homo sapiens
tcgacttttttttttgtttcataagggctatcgtagttttcatgcgttctacccagccagagcagctgtgaccaagggctgcctcaaggggttgtccacgcaggttgggctcctctctgctgctggacccaagactctgaaccttccaagggacaggcagttcttctaagaagggctcccctgtgtgtgagcaagaccacagctctccttctatctacagatgcatgagggttggaagagtctgggctgtttttagaccttctggtcagctgtatttgtgtaacaacttttgtaataaatagaaaaaccctc

SEQ ID NO: 299810 - DNA, 737 bp, Homo sapiens
aacctgcctggtactcatccctccccagtcgtgatcagcgagatgcgtgtcggttgaatatgctgctacttatacatctgtgtctgtacattctttccatagagagtcgtactgtgcctgtggtattctagcatcatatttatagcaactcgtagctggggaggaacaatattatgattctattttaaatgatctaggaagggacccaagcctgggctgttaagaaatctaatatccatagtgtctgctaaatactctaactgtacatctctttagatcctttgggtccctgccccctcaacttcctgggctcaagtgatcctcctgcatcagcttcccaagtagctgggactgcaagtgtgtaccaccacatccagctaacatttttgggggtgggaagagatggggtcttactatgttgtccaggctaagaggtgggatttgagctgagacttgaatgcccaggagttaaatgtcttaagatatggagcaggccgttagaaaggagggagcagcaactggaaggtagaatagtcttattcaaggaataagaactatgtaatcacagcatggtgaagagttaggaagtgaaagaaaaggtcagaaaaggaggcaaggggcttataagggtgtgataagaagcttgatgtttacacttaaatacattgggaattctcttatcagttaagtctctttaggtgaaaggacaaaacctaccttaaactagcttaaacaat

SEQ ID NO: 299811 - DNA, 336 bp, Homo sapiens
ggctgagccaggaagtcgagaccagcctgggcaacacagtgagactccatatctatcaacaaacaaacaaaaggaggccggcatggtggcaagtttctccatcctgggtatgctggtcgggctccggtatctagaagtagaaccagtatccagacagaagaagagaaactgaggccagcattatcacctccaggactttctcgttttccaccttggccatcttcttccttcgtcgtctctcctctttaatttcttttctattccatcttgagcctgtgtctagacacaggctccagatggcagcagcctgcagcctgaagattttgccacttatta

SEQ ID NO: 299812 - DNA, 1452 bp, Homo sapiens
tccgctgtttttttctccgcccctaagaggttgactccaaacccggagttccgctaggtccaacaggagggcttacggcgtgagcggcgtacctggggagaggcttaggcagcggcaaccgctgattggcagtaaaggggttcactccccatctcctgctcgggcgaaaccgggacagccaatcagagagagtactgacggaaacggcccaatcctggagcagggctgagggagggggcggggacaaatggctcaggtggactccgggctggagctgtcctgggggagcttgtttgcggcagcggctgctgctgccactgctgtgctgggggcccggtcgccaggcaaaaagccctcccacgtttgaggggagtcatgagccgtttcctgaatgtgttaagaagttggctggttatggtgtccatcatagccatggggaacacgctgcagagcttccgagaccacacttttctctatgaaaagctctacactggcaagccaaaccttgtgaatggcctccaagctcggacctttgggatctggacgctgctctcatcagtgattcgctgcctctgtgccattgacattcacaacaagacgctctatcacatcacactctggaccttcctccttgccctggggcatttcctctctgagttgtttgtctatggaactgcagctcccacgattggcgtcctggcacccctgatggtggcaagtttctccatcctgggtatgctggtcgggctccggtatctagaagtagaaccagtatccagacagaagaagagaaactgaggccagcattatcacctccaggactttctcgttttccaccttggccatcttcttccttcgtcgtctctcctctttaatttcttttctattccatcatctgcccttttattcacttttagcctctttttttaatttttaaaatttaaagatatgcatactgaaaagtatataacatgtacgtacaatttaaagaataattttaaagtgaatactacgtaactccatccaagtcaagaaattgccagcttctcggaagcccactgtgtctccttcccctacctgcaacctcttccaggctcccttttccagccttcccctttttcccttttattttcatgccttgatttgacttgtgtggtgggaacatgtgaactatgaaacttaaacctgctgcccacccagagcagctgtgaccaagggctgcctcaaggggttgtccacgcaggttgggctcctctctgctgctggacccaagactctgaaccttccaagggacaggcagttcttctaagaagggctcccctgtgtgtgagcaagaccacagctctccttctatctacagatgcatgagggttggaagagtctgggctgtttttagaccttctggtcagctgtatttgtgtaacaacttttgtaataaatagaaaaaccctc

SEQ ID NO: 299813 - DNA, 1477 bp, Homo sapiens
tccgctgtttttttctccgcccctaagaggttgactccaaacccggagttccgctaggtccaacaggagggcttacggcgtgagcggcgtacctggggagaggcttaggcagcggcaaccgctgattggcagtaaaggggttcactccccatctcctgctcgggcgaaaccgggacagccaatcagagagagtactgacggaaacggcccaatcctggagcagggctgagggagggggcggggacaaatggctcaggtggactccgggctggagctgtcctgggggagcttgtttgcggcagcggctgctgctgccactgctgtgctgggggcccggtcgccaggcaaaaagccctcccacgtttgaggggagtcatgagccgtttcctgaatgtgttaagaagttggctggttatggtgtccatcatagccatggggaacacgctgcagagcttccgagaccacacttttctctatgaaaagctctacactggcaagccaaaccttgtgaatggcctccaagctcggacctttgggatctggacgctgctctcatcagtgattcgctgcctctgtgccattgacattcacaacaagacgctctatcacatcacactctggaccttcctccttgccctggggcatttcctctctgagttgtttgtctatggaactgcagctcccacgattggcgtcctggcacccctgatggtggcaagtttctccatcctgggtatgctggtcgggctccggtatctagaagtagaaccagtatccagacagaagaagagaaactgaggccagcattatcacctccaggactttctcgttttccaccttggccatcttcttccttcgtcgtctctcctctttaatttcttttctattccatcatctgcccttttattcacttttagcctctttttttaatttttaaaatttaaagatatgcatactgaaaagtatataacatgtacgtacaatttaaagaataattttaaagtgaatactacgtaactccatccaagtcaagaaattgccagcttctcggaagcccactgtgtctccttcccctacctgcaacctcttccaggctcccttttccagccttcccctttttcccttttattttcatgccttgatttgacttgtgtggtgggaacatgtgaactatgaaacttaaacctgctgcccacccagagcagctgtgaccaagggctgcctcaaggggttgtccacgcaggttgggctcctctctgctgctggacccaagactctgaaccttccaagggacaggcagttcttctaagaagggctcccctgtgtgtgagcaagaccacagctctccttctatctacagatgcatgagggttggaagagtctgggctgtttttagaccttctggtcagctgtatttgtgtaacaacttttgtaataaatagaaaaaccctcaaaaaaaaaaacaaagggcggccgc

SEQ ID NO: 299814 - DNA, 1385 bp, Homo sapiens
tccgctgtttttttctccgcccctaagaggttgactccaaacccggagttccgctaggtccaacaggagggcttacggcgtgagcggcgtacctggggagaggcttaggcagcggcaaccgctgattggcagtaaaggggttcactccccatctcctgctcgggcgaaaccgggacagccaatcagagagagtactgacggaaacggcccaatcctggagcagggctgagggagggggcggggacaaatggctcaggtggactccgggctggagctgtcctgggggagcttgtttgcggcagcggctgctgctgccactgctgtgctgggggcccggtcgccaggcaaaaagccctcccacgtttgaggggaacacgctgcagagcttccgagaccacacttttctctatgaaaagctctacactggcaagccaaaccttgtgaatggcctccaagctcggacctttgggatctggacgctgctctcatcagtgattcgctgcctctgtgccattgacattcacaacaagacgctctatcacatcacactctggaccttcctccttgccctggggcatttcctctctgagttgtttgtctatggaactgcagctcccacgattggcgtcctggcacccctgatggtggcaagtttctccatcctgggtatgctggtcgggctccggtatctagaagtagaaccagtatccagacagaagaagagaaactgaggccagcattatcacctccaggactttctcgttttccaccttggccatcttcttccttcgtcgtctctcctctttaatttcttttctattccatcatctgcccttttattcacttttagcctctttttttaatttttaaaatttaaagatatgcatactgaaaagtatataacatgtacgtacaatttaaagaataattttaaagtgaatactacgtaactccatccaagtcaagaaattgccagcttctcggaagcccactgtgtctccttcccctacctgcaacctcttccaggctcccttttccagccttcccctttttcccttttattttcatgccttgatttgacttgtgtggtgggaacatgtgaactatgaaacttaaacctgctgcccacccagagcagctgtgaccaagggctgcctcaaggggttgtccacgcaggttgggctcctctctgctgctggacccaagactctgaaccttccaagggacaggcagttcttctaagaagggctcccctgtgtgtgagcaagaccacagctctccttctatctacagatgcatgagggttggaagagtctgggctgtttttagaccttctggtcagctgtatttgtgtaacaacttttgtaataaatagaaaaaccctc

SEQ ID NO: 299815 - DNA, 988 bp, Homo sapiens
cccatgttgccactaggacctccatcctgcccagccacagagagtgaatggcctccaagctcggacctttgggatctggacgctgctctcatcagtgattcgctgcctctgtgccattgacattcacaacaagacgctctatcacatcacactctggaccttcctccttgccctggggcatttcctctctgagttgtttgtctatggaactgcagctcccacgattggcgtcctggcacccctgatggtggcaagtttctccatcctgggtatgctggtcgggctccggtatctagaagtagaaccagtatccagacagaagaagagaaactgaggccagcattatcacctccaggactttctcgttttccaccttggccatcttcttccttcgtcgtctctcctctttaatttcttttctattccatcatctgcccttttattcacttttagcctctttttttaatttttaaaatttaaagatatgcatactgaaaagtatataacatgtacgtacaatttaaagaataattttaaagtgaatactacgtaactccatccaagtcaagaaattgccagcttctcggaagcccactgtgtctccttcccctacctgcaacctcttccaggctcccttttccagccttcccctttttcccttttattttcatgccttgatttgacttgtgtggtgggaacatgtgaactatgaaacttaaacctgctgcccacccagagcagctgtgaccaagggctgcctcaaggggttgtccacgcaggttgggctcctctctgctgctggacccaagactctgaaccttccaagggacaggcagttcttctaagaagggctcccctgtgtgtgagcaagaccacagctctccttctatctacagatgcatgagggttggaagagtctgggctgtttttagaccttctggtcagctgtatttgtgtaacaacttttgtaataaatagaaaaaccctc

SEQ ID NO: 299816 - DNA, 1398 bp, Homo sapiens
tccgctgtttttttctccgcccctaagaggttgactccaaacccggagttccgctaggtccaacaggagggcttacggcgtgagcggcgtacctggggagaggcttaggcagcggcaaccgctgattggcagtaaaggggttcactccccatctcctgctcgggcgaaaccgggacagccaatcagagagagtactgacggaaacggcccaatcctggagcagggctgagggagggggcggggacaaatggctcaggtggactccgggctggagctgtcctgggggagcttgtttgcggcagcggctgctgctgccactgctgtgctgggggcccggtcgccaggcaaaaagccctcccacgtttgaggggagtcatgagccgtttcctgaatgtgttaagaagttggctggttatggtgtccatcatagccatggggaacacgctgcagagcttccgagaccacacttttctctatgttgggatctggacgctgctctcatcagtgattcgctgcctctgtgccattgacattcacaacaagacgctctatcacatcacactctggaccttcctccttgccctggggcatttcctctctgagttgtttgtctatggaactgcagctcccacgattggcgtcctggcacccctgatggtggcaagtttctccatcctgggtatgctggtcgggctccggtatctagaagtagaaccagtatccagacagaagaagagaaactgaggccagcattatcacctccaggactttctcgttttccaccttggccatcttcttccttcgtcgtctctcctctttaatttcttttctattccatcatctgcccttttattcacttttagcctctttttttaatttttaaaatttaaagatatgcatactgaaaagtatataacatgtacgtacaatttaaagaataattttaaagtgaatactacgtaactccatccaagtcaagaaattgccagcttctcggaagcccactgtgtctccttcccctacctgcaacctcttccaggctcccttttccagccttcccctttttcccttttattttcatgccttgatttgacttgtgtggtgggaacatgtgaactatgaaacttaaacctgctgcccacccagagcagctgtgaccaagggctgcctcaaggggttgtccacgcaggttgggctcctctctgctgctggacccaagactctgaaccttccaagggacaggcagttcttctaagaagggctcccctgtgtgtgagcaagaccacagctctccttctatctacagatgcatgagggttggaagagtctgggctgtttttagaccttctggtcagctgtatttgtgtaacaacttttgtaataaatagaaaaaccctc

SEQ ID NO: 299817 - DNA, 1134 bp, Homo sapiens
ctctacccgcttaatgagatcaccactttgctgagacctggacgttcattctggatgcctgaaccattctcctctcagtttagcagatgaaaccttcagttttgccctagatgagaatatcgttgtgatcaaataaccagctcttcctcaggaacaagtgtcctttcttttaagtcttaatgacatcctgggttcttatttgtctgtatgaagtctgatacttttcctctgttctgaacaaacagtaactttggttcccatttctgtctgcttccttataggctctatcacatcacactctggaccttcctccttgccctggggcatttcctctctgagttgtttgtctatggaactgcagctcccacgattggcgtcctggcacccctgatggtggcaagtttctccatcctgggtatgctggtcgggctccggtatctagaagtagaaccagtatccagacagaagaagagaaactgaggccagcattatcacctccaggactttctcgttttccaccttggccatcttcttccttcgtcgtctctcctctttaatttcttttctattccatcatctgcccttttattcacttttagcctctttttttaatttttaaaatttaaagatatgcatactgaaaagtatataacatgtacgtacaatttaaagaataattttaaagtgaatactacgtaactccatccaagtcaagaaattgccagcttctcggaagcccactgtgtctccttcccctacctgcaacctcttccaggctcccttttccagccttcccctttttcccttttattttcatgccttgatttgacttgtgtggtgggaacatgtgaactatgaaacttaaacctgctgcccacccagagcagctgtgaccaagggctgcctcaaggggttgtccacgcaggttgggctcctctctgctgctggacccaagactctgaaccttccaagggacaggcagttcttctaagaagggctcccctgtgtgtgagcaagaccacagctctccttctatctacagatgcatgagggttggaagagtctgggctgtttttagaccttctggtcagctgtatttgtgtaacaacttttgtaataaatagaaaaaccctc

SEQ ID NO: 299818 - DNA, 475 bp, Homo sapiens
tgggtttccactcttggaacttcccttccaactgtagacatttgaagagaatctgagaagttctcattctggaattccttctattccttctagttcccatgttgccactaggacctccatcctgcccagccacagagaggtcaggtccagctccctatctcccatgaaccaccagtgaaataggaggagtttggaaggaacctcaagtctccccttctgaacactcttgcttttttctgctacacagtgaatggcctccaagctcggacctttgggatctggacgctgctctcatcagtgattcgctgcctctgtgccattgacattcacaacaagacgtatgtaagggaaggaagagctttagcatccttttgttggaaatcagatgcgaggcatacctgttaccttgagtaatgggaactgttaatcattttaatgcattagcttagaatgtgaataataaaaaactcacagg

SEQ ID NO: 299819 - DNA, 446 bp, Homo sapiens
  misc_feature (365)..(365): n is a, c, g, or t
atcagatgaaaagaagaacatgaactggaagcaacttcccaaaaagccgtgcaaaaatctacttagcaccttaaagaaattgtatccccagctgtcttcagttcaccaaaaaactcaagaaggctcagcgattgacatgactccaattgaagcagatttctcctggcaaaagaagatgacacagcttgagatggaaattcaagaggcatttttgcgctttatggcgtctattttaaaaggatatagaacatatctcagaccaatcacagaggctccttcaaataaagccacagctgctgattcattgtttgaccgacaggatgatctttccatttcagtggcaatgcccatatattcccctttgncctctttcactggctgcagtgcttagtgcacctttaccatttatagttggagttgactcaaggtattttgatcttcgtcga

SEQ ID NO: 299820 - DNA, 560 bp, Homo sapiens
ttttgttatttagaagagtatatattattgatatatggatgttacctctgagtagcagtaagggcagcaattagaatagtgatgtttctctttttattatagaaacttttttggtaatagttttattgatatataattcacataacatataattcacctaacatataattcacccacttaaagggtactatttagtggtttagcatatttgcagagttgtgcaaacatcatcacaatcagtattagaacatttttatcaccccctaaagaaaccccataccctttagccatccctctgtaattctcccaaagctcccagttctaggcaaccagtaatctacttagtgtctgtatagatttgcctgttgtgaattctggaatcatattatgcatgccttttgtgatgagcttcttttacatagcataatgtcttcaaggttcatccaacctgtagcgtgtatcaacccttcacttcttttatggccaaataatattcccttaaatggatataccacatttatttatccattcatcagttgatggacatttgggttgtttcc

SEQ ID NO: 299821 - DNA, 1743 bp, Homo sapiens
ttggaggtcagaagaccgcgagattctcgccctgagcaacgagcgacggcctgacgtcggcggagggaagccggcccaggctcggtgaggaggcaaggttctgaggggacaggctgacctggaggaccagaggcccccggaggagcactgaaggagaagatctgccagtgggtctccattgcccagctcctgcccacactcccgcctgttgccctgaccagagtcatcatgcctcttgagcagaggagtcagcactgcaagcctgaagaaggccttgaggcccgaggagaggccctgggcctggtgggtgcgcaggctcctgctactgaggagcaggaggctgcctcctcctcttctactctagttgaagtcaccctgggggaggtgcctgctgccgagtcaccagatcctccccagagtcctcagggagcctccagcctccccactaccatgaactaccctctctggagccaatcctatgaggactccagcaaccaagaagaggaggggccaagcaccttccctgacctggagtccgagttccaagcagcactcagtaggaaggtggccgagttggttcattttctgctcctcaagtatcgagccagggagccggtcacaaaggcagaaatgctggggagtgtcgtcggaaattggcagtatttctttcctgtgatcttcagcaaagcttccagttccttgcagctggtctttggcatcgagctgatggaagtggaccccatcggccacttgtacatctttgccacctgcctgggcctctcctacgatggcctgctgggtgacaatcagatcatgcccaaggcaggcctcctgataatcgtcctggccataatcgcaagagagggcgactgtgcccctgaggagaaaatctgggaggagctgagtgtgttagaggtgtttgaggggagggaagacagtatcttgggggatcccaagaagctgctcacccaacatttcgtgcaggaaaactacctggagtaccggcaggtccccggcagtgatcctgcatgttatgaattcctgtggggtccaagggccctcgttgaaaccagctatgtgaaagtcctgcaccatatggtaaagatcagtggaggacctcacatttcctacccacccctgcatgagtgggttttgagagagggggaagagtgagtctgagcacgagttgcagccagggccagtgggagggggtctgggccagtgcaccttccggggccgcatcccttagtttccactgcctcctgtgacgtgaggcccattcttcactctttgaagcgagcagtcagcattcttagtagtgggtttctgttctgttggatgactttgagattattctttgtttcctgttggagttgttcaaatgttccttttaacggatggttgaatgagcgtcagcatccaggtttatgaatgacagtagtcacacatagtgctgtttatatagtttaggagtaagagtcttgttttttactcaaattgggaaatccattccattttgtgaattgtgacataataatagcagtggtaaaagtatttgcttaaaattgtgagcgaattagcaataacatacatgagataactcaagaaatcaaaagatagttgattcttgccttgtacctcaatctattctgtaaaattaaacaaatatgcaaaccaggatttccttgacttctttgagaatgcaagcgaaattaaatctgaataaataattcttcctcttca

SEQ ID NO: 299822 - DNA, 400 bp, Homo sapiens
ttggaggtcagaagaccgcgagattctcgccctgagcaacgagcgacggcctgacgtcggcggagggaagccggcccaggctcggtgaggaggcaagtaagacgctgagggaggactgaggcgggcctcacctcagacagagggcctcaaataatccagtgctgcctctgctgccgggcctgggccaccccgcaggggaagacttccaggctgggtcgccactacctcaccccgccgacccccgccgctttagccacggggaactctggggacagagcttaatgtggccagggcagggctggttagaagaggtcagggcccacgctgtggcaggaatcaaggtcaggaccccgagagggaactgagggcagcctaaccaccaccctcaccaccattcccg

SEQ ID NO: 299823 - DNA, 2087 bp, Homo sapiens
ttggaggtcagaagaccgcgagattctcgccctgagcaacgagcgacggcctgacgtcggcggagggaagccggcccaggctcggtgaggaggcaaggttctgaggggacaggctgacctggaggaccagaggcccccggaggagcactgaaggagaagatctgccagtgggtctccattgcccagctcctgcccacactcccgcctgttgccctgaccagagtcatcatgcctcttgagcagaggagtcagcactgcaagcctgaagaaggccttgaggcccgaggagaggccctgggcctggtgggtgcgcaggctcctgctactgaggagcaggaggctgcctcctcctcttctactctagttgaagtcaccctgggggaggtgcctgctgccgagtcaccagatcctccccagagtcctcagggagcctccagcctccccactaccatgaactaccctctctggagccaatcctatgaggactccagcaaccaagaagaggaggggccaagcaccttccctgacctggagtccgagttccaagcagcactcagtaggaaggtggccgagttggttcattttctgctcctcaagtatcgagccagggagccggtcacaaaggcagaaatgctggggagtgtcgtcggaaattggcagtatttctttcctgtgatcttcagcaaagcttccagttccttgcagctggtctttggcatcgagctgatggaagtggaccccatcggccacttgtacatctttgccacctgcctgggcctctcctacgatggcctgctgggtgacaatcagatcatgcccaaggcaggcctcctgataatcgtcctggccataatcgcaagagagggcgactgtgcccctgaggagaaaatctgggaggagctgagtgtgttagaggtgtttgaggggagggaagacagtatcttgggggatcccaagaagctgctcacccaacatttcgtgcaggaaaactacctggagtaccggcaggtccccggcagtgatcctgcatgttatgaattcctgtggggtccaagggccctcgttgaaaccagctatgtgaaagtcctgcaccatatggtaaagatcagtggaggacctcacatttcctacccacccctgcatgagtgggttttgagagagggggaagagtgagtctgagcacgagttgcagccagggccagtgggagggggtctgggccagtgcaccttccggggccgcatcccttagtttccactgcctcctgtgacgtgaggcccattcttcactctttgaagcgagcagtcagcattcttagtagtgggtttctgttctgttggatgactttgagattattctttgtttcctgttggagttgttcaaatgttccttttaacggatggttgaatgagcgtcagcatccaggtttatgaatgacagtagtcacacatagtgctgtttatatagtttaggagtaagagtcttgttttttactcaaattgggaaatccattccattttgtgaattgtgacataataatagcagtggtaaaagtatttgcttaaaattgtgagcgaattagcaataacatacatgagataactcaagaaatcaaaagatagttgattcttgccttgtacctcaatctattctgtaaaattaaacaaatatgcaaaccaggatttccttgacttctttgagaatgcaagcgaaattaaatctgaataaataattcttcctcttcaaaaaaaaaaaaaaaaaaaaaaaaaaaaaaaaaaaaaaaaaaaaaaaaaaaaaaaaaaaaaaaaaaaaaaaaaacaaaaaaaaaaaaaaaaaaaaaaaaaaaaaaaaaaaaaaaacctaattaaagaaaattgggcaaaatgggccatattgccatatattgacactacattcgcacaacttggaacaagtttaacaactggaaaacccgtaaaaatccccgattttacccaattttaaagctcttgccccattatccaatttggcaagttgccgaaatagccaaaagtcccagacctttcaaacctttgaaacactttgaaagcctaaatgacttcggaacatt

SEQ ID NO: 299824 - DNA, 1666 bp, Homo sapiens
cgggaatggcggccaggcacgttctgaggggacaggctgacctggaggaccagaggcccccggaggagcactgaaggagaagatctgccagtgggtctccattgcccagctcctgcccacactcccgcctgttgccctgaccagagtcatcatgcctcttgagcagaggagtcagcactgcaagcctgaagaaggccttgaggcccgaggagaggccctgggcctggtgggtgcgcaggctcctgctactgaggagcaggaggctgcctcctcctcttctactctagttgaagtcaccctgggggaggtgcctgctgccgagtcaccagatcctccccagagtcctcagggagcctccagcctccccactaccatgaactaccctctctggagccaatcctatgaggactccagcaaccaagaagaggaggggccaagcaccttccctgacctggagtccgagttccaagcagcactcagtaggaaggtggccgagttggttcattttctgctcctcaagtatcgagccagggagccggtcacaaaggcagaaatgctggggagtgtcgtcggaaattggcagtatttctttcctgtgatcttcagcaaagcttccagttccttgcagctggtctttggcatcgagctgatggaagtggaccccatcggccacttgtacatctttgccacctgcctgggcctctcctacgatggcctgctgggtgacaatcagatcatgcccaaggcaggcctcctgataatcgtcctggccataatcgcaagagagggcgactgtgcccctgaggagaaaatctgggaggagctgagtgtgttagaggtgtttgaggggagggaagacagtatcttgggggatcccaagaagctgctcacccaacatttcgtgcaggaaaactacctggagtaccggcaggtccccggcagtgatcctgcatgttatgaattcctgtggggtccaagggccctcgttgaaaccagctatgtgaaagtcctgcaccatatggtaaagatcagtggaggacctcacatttcctacccacccctgcatgagtgggttttgagagagggggaagagtgagtctgagcacgagttgcagccagggccagtgggagggggtctgggccagtgcaccttccggggccgcatcccttagtttccactgcctcctgtgacgtgaggcccattcttcactctttgaagcgagcagtcagcattcttagtagtgggtttctgttctgttggatgactttgagattattctttgtttcctgttggagttgttcaaatgttccttttaacggatggttgaatgagcgtcagcatccaggtttatgaatgacagtagtcacacatagtgctgtttatatagtttaggagtaagagtcttgttttttactcaaattgggaaatccattccattttgtgaattgtgacataataatagcagtggtaaaagtatttgcttaaaattgtgagcgaattagcaataacatacatgagataactcaagaaatcaaaagatagttgattcttgccttgtacctcaatctattctgtaaaattaaacaaatatgcaaaccaggatttccttgacttctttgagaatgcaagcgaaattaaatctgaataaataattcttcctcttca

SEQ ID NO: 299825 - DNA, 1691 bp, Homo sapiens
gagacaaagtctcactcttgcccaggctggagtgcactggtgcgatctcggctccctgcaatgcctgactcccaggttcaagccattcttgtgcctcagcctcccaagtagctgggatttcaggcgtgagccactgcgcctgcccttgttacgatttttaaaagcttacctggttgtagtttaagcctcagatggtggttaccccagatattgcaagtgtcagctcttttggctgtttccagagaccagcctgtatttctgtgtccctgtctgtgttggtagggcatggagttgagtgtgggctgggtatccagttgtgggttgggaagctttgggggaaggaagataggttctttgaatacatacattagcttcattgttactaaaaccacccagattcagagagtagtggacacccaggatgttgattggctggtttgtaacgtgttttttcatgagaaacatcctttgggctactagggattgggcacatttgtgctgcttgccacctgatgtcttgagtcaccttttttgatcagacagttctcagtccatgggttagtgaaacaaataggctctcaagaatcttagtgtgggggttgttaactttcccgtgttggttttcagccgcctttgttgtatacacacatatcccaaacgccggaacaaggctctgtttccaagtgtgccgatgttgaattttgcattgggccctgaggtcactggtgggtgggggtgggtaggctgaagtggatagctgcaactcactaaacactcttttcctttgagggtcaaggtttgctaaataggggaaaactaagcttctttctcttttctttccaatggccttggtggtattggcatggggttaggaccaggagggcaacccattgatgccaatcacctgaataaaggcatcggaatgggaaacataggtcccgcaggtgagaatgacagtgcaccttgcttggtggtttggggaagtgaaaattattaattattggggcaactggactttgagtagtttaaatggaataaatatttaactgggacaaaattccctccttattcatctctgcctcattttgaataaaggcagtattttgtatttttatcaagttgagtcattttttaaaaagtcattatgctttttcattgtaacctcacaacaaccttctaagctgaaatagttgtgccatttgataagaggaggcaagccatagagttgatcttgctcaaggtcacactgtcagttactgacaggctgcaggtctcctgaccacgggaccatagcactgccgcagtgccctgaaaagtgtcttaccaagacccctttgggccctcctggtgtttgcacagctgctgctagagagctaggggcattgacagatgcaaaaaaggtggagaggccaggcacggtggctcacgcctgtaatcccagcactttgggaggccgaggtgggcggatcacaaggtcaggagtttgagaccatcctggccaacatggtgaaaccccatctctactaaaaataaaacaattagccgggcgtggtggcgcacgcctgtaatcccagttactcaagaggctgaggcaggagaattgcttgaacccgggaggcggaggttgcagtgagctgagatcacatgactgcacttcagcctggcaacagagcgagagtccgtctccagaa

SEQ ID NO: 299826 - DNA, 1007 bp, Homo sapiens
gaacttgcccctgaggacccctccaccctacctgccctgggccctctcttaggcactgagttcccacctctggcattgtggccctaccacctttggtactcctggagtagagcctttgccctctagggctctgtccacggcgttgacacatatctggatgcttaacgggtgctcaaatgaataagtgaaacctgctggctttcatttggacagtacagacgtgtccattggattgcggatggctttgtaaccaggggcggtggcatatcaaaaatgaagactttgtaaaatgtatgggaactttctgcctataaagctggctttacactgtgccttcttttttgaacttcctgaagcgtaaaggcgtgcattgaatccgccaggaaggcttttcatggggcaggggcaggctctgttagcagaagaatggcagtgtggctgagggggccgtagtcattggttctcgccattgtattctgagcctttgtgctctaggcttcagggcctctcctttttgactctgtccaccaaaatctaacaaaatcgggactgagtgtcgtctcttcttccctccctgtcctaggccacgtgctgtacgccgacatcaagatggagaatgggaagtccaaggggtgtggtgtggttaagttcgagtcgccagaggtggccgagagagcctgccggatgatgaatggcatgaagctgagtggccgagagattgacgttcgaattgatagaaacgcttaagcagttgccttttttaaacatcgatacgagacctctgaatttgtattttttcttgttaaccattttaatttgttggctggatgtataaagatgtttaaaaaattcagttgctttttggggtaatttgaattacttttttaatgactggggttccatttgactgtttgcattgagattgcaatgtgcgcaattttttttgtagttgtggcatcttgttgacatcgaatatgactttgataataaataccggttcctgaaaa

SEQ ID NO: 299827 - DNA, 2894 bp, Homo sapiens
aagacacaatgttttaagaaagtttacgaatcgtgtgccggaccgcgggttgaacaagcttcatctaaaacttccaggaatctctagacaggatcattgcttcccctctgctccagctctggttacagaaagctgagagtgactaggtctaggtgtttgtgtggggtggggtggggagatgcctcctctatcggactcagaggacgcgcgccgggaacagccagtcggtgcctaacgcgagtgtatctcgagagagaagcgatcaacagctgccggtctgcgcctgcgcggcggcgggggcgtggcccgcgggcgagtggggccaaggaggcagccgggagcggcgggcgcaggtgttactggttgcgtcgggtcacgtgggcgcgcaggcagcaccgcggtgcagcccgttcgctcacacaaagcccagacgcggagaaaatggcggcaggggtcgaagcggcggcggaggtggcggcgacggagatcaaaatggaggaagagagcggcgcgcccggcgtgccgagcggcaacggggctccgggccctaagggtgaaggagaacgacctgctcagaatgagaagaggaaggagaaaaacataaaaagaggaggcaatcgctttgagccatatgccaatccaactaaaagatacagagccttcattacaaacataccttttgatgtgaaatggcagtcacttaaagacctggttaaagaaaaagttggtgaggtaacatacgtggagctcttaatggacgctgaaggaaagtcaaggggatgtgctgttgttgaattcaagatggaagagagcatgaaaaaagctgcggaagtcctaaacaagcatagtctgagcggaagaccactgaaagtcaaagaagatcctgatggtgaacatgccaggagagcaatgcaaaaggtgatggctacgactggtgggatgggtatgggaccaggtggcccaggaatgattactatcccacccagtatcctaaataatcccaacatcccaaatgagattatccatgcattacaggctggaagacttggaagcacagtatttgtagcaaatctggattataaagttggctggaagaaactgaaggaagtatttagtatggctggtgtggtggtccgagcagacattcttgaagataaagatggaaaaagtcgtggaataggcactgttacttttgaacagtccattgaagctgtgcaagctatatctatgttcaatggccagctgctatttgatagaccaatgcacgtcaagatggatgagagggccttaccaaaaggagatttcttccctcctgagcgtccacaacaacttccccatggccttggtggtattggcatggggttaggaccaggagggcaacccattgatgccaatcacctgaataaaggcatcggaatgggaaacataggtcccgcaggaatgggaatggaaggcataggatttggaataaataaaatgggaggaatggaggggccctttggtggtggtatggaaaacatgggtcgatttggatctgggatgaacatgggcaggataaatgaaatcctaagtaatgcactgaagagaggagagatcattgcaaagcagggaggaggtggaggtggaggaagcgtccctgggatcgagaggatgggtcctggcattgaccgcctcgggggtgccggcatggagcgcatgggcgcgggcctgggccacggcatggatcgcgtgggctccgagatcgagcgcatgggcctggtcatggaccgcatgggctccgtggagcgcatgggctccggcattgagcgcatgggcccgctgggcctcgaccacatggcctccagcattgagcgcatgggccagaccatggagcgcattggctctggcgtggagcgcatgggtgccggcatgggcttcggccttgagcgcatggccgctcccatcgaccgtgtgggccagaccattgagcgcatgggctctggcgtggagcgcatgggccctgccatcgagcgcatgggcctgagcatggagcgcatggtgcccgcaggtatgggagctggcctggagcgcatgggccccgtgatggatcgcatggccaccggcctggagcgcatgggcgccaacaatctggagcggatgggcctggagcgcatgggcgccaacagcctcgagcgcatgggcctggagcgcatgggtgccaacagcctcgagcgcatgggccccgccatgggcccggccctgggcgctggcattgagcgcatgggcctggccatgggtggcggtggcggtgccagctttgaccgtgccatcgagatggagcgtggcaacttcggaggaagcttcgcaggttcctttggtggagctggaggccatgctcctggggtggccaggaaggcctgccagatatttgtgagaaatctgccattcgatttcacatggaagatgctaaaggacaaattcaacgagtgcggccacgtgctgtacgccgacatcaagatggagaatgggaagtccaaggggtgtggtgtggttaagttcgagtcgccagaggtggccgagagagcctgccggatgatgaatggcatgaagctgagtggccgagagattgacgttcgaattgatagaaacgcttaagcagttgccttttttaaacatcgatacgagacctctgaatttgtattttttcttgttaaccattttaatttgttggctggatgtataaagatgtttaaaaaattcagttgctttttggggtaatttgaattacttttttaatgactggggttccatttgactgtttgcattgagattgcaatgtgcgcaattttttttgtagttgtggcatcttgttgacatcgaatatgactttgataataaataccggttcctgaaaa

SEQ ID NO: 299828 - DNA, 2777 bp, Homo sapiens
aagacacaatgttttaagaaagtttacgaatcgtgtgccggaccgcgggttgaacaagcttcatctaaaacttccaggaatctctagacaggatcattgcttcccctctgctccagctctggttacagaaagctgagagtgactaggtctaggtgtttgtgtggggtggggtggggagatgcctcctctatcggactcagaggacgcgcgccgggaacagccagtcggtgcctaacgcgagtgtatctcgagagagaagcgatcaacagctgccggtctgcgcctgcgcggcggcgggggcgtggcccgcgggcgagtggggccaaggaggcagccgggagcggcgggcgcaggtgttactggttgcgtcgggtcacgtgggcgcgcaggcagcaccgcggtgcagcccgttcgctcacacaaagcccagacgcggagaaaatggcggcaggggtcgaagcggcggcggaggtggcggcgacggagatcaaaatggaggaagagagcggcgcgcccggcgtgccgagcggcaacggggctccgggccctaagggtgaaggagaacgacctgctcagaatgagaagaggaaggagaaaaacataaaaagaggaggcaatcgctttgagccatatgccaatccaactaaaagatacagagccttcattacaaacataccttttgatgtgaaatggcagtcacttaaagacctggttaaagaaaaagttggtgaggtaacatacgtggagctcttaatggacgctgaaggaaagtcaaggggatgtgctgttgttgaattcaagatggaagagagcatgaaaaaagctgcggaagtcctaaacaagcatagtctgagcggaagaccactgaaagtcaaagaagatcctgatggtgaacatgccaggagagcaatgcaaaaggctggaagacttggaagcacagtatttgtagcaaatctggattataaagttggctggaagaaactgaaggaagtatttagtatggctggtgtggtggtccgagcagacattcttgaagataaagatggaaaaagtcgtggaataggcactgttacttttgaacagtccattgaagctgtgcaagctatatctatgttcaatggccagctgctatttgatagaccaatgcacgtcaagatggatgagagggccttaccaaaaggagatttcttccctcctgagcgtccacaacaacttccccatggccttggtggtattggcatggggttaggaccaggagggcaacccattgatgccaatcacctgaataaaggcatcggaatgggaaacataggtcccgcaggaatgggaatggaaggcataggatttggaataaataaaatgggaggaatggaggggccctttggtggtggtatggaaaacatgggtcgatttggatctgggatgaacatgggcaggataaatgaaatcctaagtaatgcactgaagagaggagagatcattgcaaagcagggaggaggtggaggtggaggaagcgtccctgggatcgagaggatgggtcctggcattgaccgcctcgggggtgccggcatggagcgcatgggcgcgggcctgggccacggcatggatcgcgtgggctccgagatcgagcgcatgggcctggtcatggaccgcatgggctccgtggagcgcatgggctccggcattgagcgcatgggcccgctgggcctcgaccacatggcctccagcattgagcgcatgggccagaccatggagcgcattggctctggcgtggagcgcatgggtgccggcatgggcttcggccttgagcgcatggccgctcccatcgaccgtgtgggccagaccattgagcgcatgggctctggcgtggagcgcatgggccctgccatcgagcgcatgggcctgagcatggagcgcatggtgcccgcaggtatgggagctggcctggagcgcatgggccccgtgatggatcgcatggccaccggcctggagcgcatgggcgccaacaatctggagcggatgggcctggagcgcatgggcgccaacagcctcgagcgcatgggcctggagcgcatgggtgccaacagcctcgagcgcatgggccccgccatgggcccggccctgggcgctggcattgagcgcatgggcctggccatgggtggcggtggcggtgccagctttgaccgtgccatcgagatggagcgtggcaacttcggaggaagcttcgcaggttcctttggtggagctggaggccatgctcctggggtggccaggaaggcctgccagatatttgtgagaaatctgccattcgatttcacatggaagatgctaaaggacaaattcaacgagtgcggccacgtgctgtacgccgacatcaagatggagaatgggaagtccaaggggtgtggtgtggttaagttcgagtcgccagaggtggccgagagagcctgccggatgatgaatggcatgaagctgagtggccgagagattgacgttcgaattgatagaaacgcttaagcagttgccttttttaaacatcgatacgagacctctgaatttgtattttttcttgttaaccattttaatttgttggctggatgtataaagatgtttaaaaaattcagttgctttttggggtaatttgaattacttttttaatgactggggttccatttgactgtttgcattgagattgcaatgtgcgcaattttttttgtagttgtggcatcttgttgacatcgaatatgactttgataataaataccggttcctgaaaa

SEQ ID NO: 299829 - DNA, 918 bp, Homo sapiens
agcacacccagctcatttcaggcagggctggcatgctcaaggatttccgcgcagagctcatttgttagcgttgaggttgtccgtggagctgcagctttaatttgctctatgataatgagaggtgcctctgggtggataaatgtgggctccaagtgggtgatgctgggcggtcttctgaacaagaagttggctggggtgggggtgggggcttactttccagctcaggggaggcaaggaagcctcagtcctgagagcctggaccagctttagaaaactgccgctgagcgagacccgatggccctcttcttgctctggctctcagttcatgaatgcatatgactcctatctctgctgggcgcattcgcaggtgaccccgcacgctgggcctcagactctggagctacgtggggtcttggcatcgtgacccagcatcaaggactctcctagttctctgtaaaatgatcttgtctgtgcgtgtgtttctcaaacccctttccctttatcttgtcatttttattagtagtatttctactctggaatctgtaatgagcacatttctattgccatagaggaatttggctaatttttttttcttcctgatttccttagaaatcctaagtaatgcactgaagagaggagagatcattgcaaagcagggaggaggtaggaaccgcttagtttgatgtttagtttttttagaacaggctgttatcgctggggactgtagagcttagtggtgagacgtgcgggttctgacacagactgcccggggtgggagcagctctgcctttttctagctgtgtgacgtttggcaagtcactgaacctctctgtttctcatagcactcatttgtaaaatgggggtgtaatagtacctgcctcagggatgctgtggagagtgaatgcatgtgaaagagtg

SEQ ID NO: 299830 - DNA, 177 bp, Homo sapiens
aaagcctatgatcagtgcgcccgctcataaggggatggccatggctaggatttggaataaataaaatgggaggaatggaggggccctttggtggtggtatggaaaacatgggtcgatttggatctgggatgaacatgggcaggataaatgggtaagcatcgtgttttcttcctgctt

SEQ ID NO: 299831 - DNA, 3476 bp, Homo sapiens
ccttcttgccgatcctcctctgagggtcccgccctctcgcgctgctcagtcccaaatgtctcctttgataagcacccataacacaggcccacctgctctgacagactcctctgcaggccttccctctccgctgactcattccctgagaaggaccactattcatcacccatctgcctcatcccaatgtctcctttggccacgctctctccataggaccctaccatgattctggagagtgcattttacatgcatgtcttttgatgtgaaatggcagtcacttaaagacctggttaaagaaaaagttggtgaggtaacatacgtggagctcttaatggacgctgaaggaaagtcaaggggatgtgctctgagagaatttcttctgtggatttactacatgaaaaatgtaactgtatggtggcgtggaatcgaatgaaatcaggaaggcagtgagtgctcatgttacagtagctatgtttgattttgccaaacatttgagtggggtgggaggggatttgcaaatgggagtcccgcttttccaaatggctggccaaagagctttttggtattctgtttggatgcccaatttggataactggggaccaatagcagcattgtctctttgttaacagaggaattggctgtgtgtgaattatgcatggaattttagcggtggtataattaatgtaaaacgtgtgttcttgtctagaaaatgttactcttggttgtttgctgaatttgaaagttgtgtgaaccaaagattccgaaaagttgcctttgtgccagtaaattgtaaaccaaatattaaaaacctgaatgttcaaaattggcctagtttaaagagaacataaactattttctgtcgtgcaatagaatggcttagaataatcaaaaggatgagcttaacttacggaagggatggatttaggaggaatatggtaaggactcgattgagtacagagggaagcagatctaaagttggtgtgatttcttggagaccctgaatttaggtctgcttattaaatgtcagcagctctagtgcaatgctggtaacgcgtaggagaaggagatattaaggagcccagcttttaacaaggaaggcgaggcgaggcacttctgtcagcttccccttagaagggttcattttaaaagactaactttgtgacataaatcatatttttagtttgtttataactgtcattggtatttactatttttttcttttctttttccccttccttgctcttctgactggtctctggcttcctccaaagggatgtgcgtaagtatcgtctagttacttattggtatttgagccttctaacttgtaggactggtttcactcgactcgtttccttttgactctatagtgttgttgaattcaagatggaagagagcatgaaaaaagctgcggaagtcctaaacaagcatagtctgagcggaagaccactgaaagtcaaagaagatcctgatggtgaacatgccaggagagcaatgcaaaaggtgatggctacgactggtgggatgggtatgggaccaggtggcccaggaatgattactatcccacccagtatcctaaataatcccaacatcccaaatgagattatccatgcattacaggctggaagacttggaagcacagtatttgtagcaaatctggattataaagttggctggaagaaactgaaggaagtatttagtatggctggtgtggtggtccgagcagacattcttgaagataaagatggaaaaagtcgtggaataggcactgttacttttgaacagtccattgaagctgtgcaagctatatctatgttcaatggccagctgctatttgatagaccaatgcacgtcaagatggatgagagggccttaccaaaaggagatttcttccctcctgagcgtccacaacaacttccccatggccttggtggtattggcatggggttaggaccaggagggcaacccattgatgccaatcacctgaataaaggcatcggaatgggaaacataggtcccgcaggaatgggaatggaaggcataggatttggaataaataaaatgggaggaatggaggggccctttggtggtggtatggaaaacatgggtcgatttggatctgggatgaacatgggcaggataaatgaaatcctaagtaatgcactgaagagaggagagatcattgcaaagcagggaggaggtggaggtggaggaagcgtccctgggatcgagaggatgggtcctggcattgaccgcctcgggggtgccggcatggagcgcatgggcgcgggcctgggccacggcatggatcgcgtgggctccgagatcgagcgcatgggcctggtcatggaccgcatgggctccgtggagcgcatgggctccggcattgagcgcatgggcccgctgggcctcgaccacatggcctccagcattgagcgcatgggccagaccatggagcgcattggctctggcgtggagcgcatgggtgccggcatgggcttcggccttgagcgcatggccgctcccatcgaccgtgtgggccagaccattgagcgcatgggctctggcgtggagcgcatgggccctgccatcgagcgcatgggcctgagcatggagcgcatggtgcccgcaggtatgggagctggcctggagcgcatgggccccgtgatggatcgcatggccaccggcctggagcgcatgggcgccaacaatctggagcggatgggcctggagcgcatgggcgccaacagcctcgagcgcatgggcctggagcgcatgggtgccaacagcctcgagcgcatgggccccgccatgggcccggccctgggcgctggcattgagcgcatgggcctggccatgggtggcggtggcggtgccagctttgaccgtgccatcgagatggagcgtggcaacttcggaggaagcttcgcaggttcctttggtggagctggaggccatgctcctggggtggccaggaaggcctgccagatatttgtgagaaatctgccattcgatttcacatggaagatgctaaaggacaaattcaacgagtgcggccacgtgctgtacgccgacatcaagatggagaatgggaagtccaaggggtgtggtgtggttaagttcgagtcgccagaggtggccgagagagcctgccggatgatgaatggcatgaagctgagtggccgagagattgacgttcgaattgatagaaacgcttaagcagttgccttttttaaacatcgatacgagacctctgaatttgtattttttcttgttaaccattttaatttgttggctggatgtataaagatgtttaaaaaattcagttgctttttggggtaatttgaattacttttttaatgactggggttccatttgactgtttgcattgagattgcaatgtgcgcaattttttttgtagttgtggcatcttgttgacatcgaatatgactttgataataaataccggttcctgaaaa

SEQ ID NO: 299832 - DNA, 6977 bp, Homo sapiens
  misc_feature (2162)..(2162): n is a, c, g, or t
  misc_feature (2337)..(2337): n is a, c, g, or t
ccttcttgccgatcctcctctgagggtcccgccctctcgcgctgctcagtcccaaatgtctcctttgataagcacccataacacaggcccacctgctctgacagactcctctgcaggccttccctctccgctgactcattccctgagaaggaccactattcatcacccatctgcctcatcccaatgtctcctttggccacgctctctccataggaccctaccatgattctggagagtgcattttacatgcatgtcttttgatgtgaaatggcagtcacttaaagacctggttaaagaaaaagttggtgaggtaacatacgtggagctcttaatggacgctgaaggaaagtcaaggggatgtgctctgagagaatttcttctgtggatttactacatgaaaaatgtaactgtatggtggcgtggaatcgaatgaaatcaggaaggcagtgagtgctcatgttacagtagctatgtttgattttgccaaacatttgagtggggtgggaggggatttgcaaatgggagtcccgcttttccaaatggctggccaaagagctttttggtattctgtttggatgcccaatttggataactggggaccaatagcagcattgtctctttgttaacagaggaattggctgtgtgtgaattatgcatggaattttagcggtggtataattaatgtaaaacgtgtgttcttgtctagaaaatgttactcttggttgtttgctgaatttgaaagttgtgtgaaccaaagattccgaaaagttgcctttgtgccagtaaattgtaaaccaaatattaaaaacctgaatgttcaaaattggcctagtttaaagagaacataaactattttctgtcgtgcaatagaatggcttagaataatcaaaaggatgagcttaacttacggaagggatggatttaggaggaatatggtaaggactcgattgagtacagagggaagcagatctaaagttggtgtgatttcttggagaccctgaatttaggtctgcttattaaatgtcagcagctctagtgcaatgctggtaacgcgtaggagaaggagatattaaggagcccagcttttaacaaggaaggcgaggcgaggcacttctgtcagcttccccttagaagggttcattttaaaagactaactttgtgacataaatcatatttttagtttgtttataactgtcattggtatttactatttttttcttttctttttccccttccttgctcttctgactggtctctggcttcctccaaagggatgtgcgtaagtatcgtctagttacttattggtatttgagccttctaacttgtaggactggtttcactcgactcgtttccttttgactctatagtgttgttgaattcaagatggaagagagcatgaaaaaagctgcggaagtcctaaacaagcatagtctgagcggaagaccactgaaagtcaaagaagtaagctcttgcttaacactgcggatactgtgtgtaattgttgagtgatcctactttggaattagggaaagacggtcatggtcccagacggcatttacaaagcaagtgccagcctgttgtttctaatgaagagtgtcggtcatagcctacagcagccattccctgcaaggactttggggtggtggccaagcagatcctgagtggctgctgaccaccttctaatatctgtgatttgtctgaggccttgttgtctcagggactctcaaaccatgagcccgtgggtttgtgccattaagttttactccatctgacccttcttcttggcccatcttttttctttttttaaaaagtgagtttgttccagcctgggcaacatggtgaaaccccctctctacaaaaggtacaaaaattagccaggcatggtggcgcatgcctgtagtcctagctacttgggaggctgaggcaggaggatcatttgagcccaggatgtggaggttgcagtgagctgagattgcaccattgcactccagcccgggcaacagtgagaccctgtctaaaaaataaaaaataaagtgagtttgttattcctcaaacctgctttcacatctcatctgaatcaaatatattccttgaggaagaaggtttttttgttgattaaatccctcttggctgggcgcagtggctcacgcctgtaatccccngcactttgggaggctgaggtgggtggatcaaggtcatgagttcaagaccagcttgaccaacatggtgaaaccctgtctactaaaaatacaaaaaattagctgggcgtagtggggggtgcctgtaatccatctactcgggaggctgaggcaggagaatcgctggaacccaggaggnggaggttgcagtgagccgagatcgcgccattgaactccagcctgggcagtaagagcaaagctctgtctcaaaaaaacatccctcttaacttcttttcacctcttctcttggggaggaagatgagtagattcagagtgaagcttggtagggtctaaggtctctcatgtgttatgatgtcttttttagtgctgatggtggtaattgacaggacagagagttgaagaagagagtcagtacagagcttcacagaccttcccagatgttgttttactgcgcagccctcacacacacgcctccaacacctgaaggacttgaaggatgggggcgcttgtgtggtctagaactgtttctcaaacttctggaagccattgacggggtttgcagaagttacaaaaccccattgatgaattagtaagattcagctataccaagcccatgaagctctaatttcagtctggcggttctacattatatcagctaatcatgtttccctccctaccctgcttttcttttttacttagtgcaattgagagctgtgtttttagtgctacacttcatgccttttcttcctttcctatttctttagctggactcttctaagctggtagttgagttcatttgactttcttgttaatagatttgagagatgctttccaaacaacctttcagtttctaagtcttgagaatatcatttactgtgcaagcatggtttgcgttgtactgggtcagttaaacgtaacaccttttgtgcttgttttaggatcctgatggtgaacatgccaggagagcaatgcaaaaggtgatggctacgactggtgggatgggtatgggaccaggtggcccaggaatgattactatcccacccagtatcctaaataatcccaacatcccaaatgagattatccatgcattacaggctggaagacttggaagcacagtatttgtagcaaatgtaagtaaacagaaccatcgtctaaagtagaaaatcagaactttatgaaatgaccttgtcaatatgttataaaagtaattctcacatttgagaagaaaaatgtaaagaagggttttgttcttgatttctttaaaaatcagccttataggcgggctttgtctgcattcctaagtcacaggcttgaccgtggtctcgttggggctgtgattcctgagtttcgcaggtgtttccacaagcagtaaccgagtctgcattctccgttggtttattttatgcagttttggtgcagagtaagactgtacgagcagaagtgcactgacaccttcctcttgttgtgtctggggtgaatgataatacctccaccatctgcaaggggaaatatttagaataaagtaggttgggtggggtggggagtggtaaagcttatcagggaaacaattttttaaaaatgttcagaaaatgagtattaatttgaagtatgaggtgacttaagtttctgagaaaagagacaatatatttactataggtacagtttatttacagtgaaggccaggctttataatcctattttaaaatttccattgcagttgattagtttttgtgacattatttcctaatacttttttccaaccaaagcatgtatcattcatgtagtaaaaatgttgtgtttcttaagatgtttacattgaggtttttaccccgttctctctcgattagctggattataaagttggctggaagaaactgaaggaagtatttagtatggctggtgtggtggtccgagcagacattcttgaagataaagatggaaaaagtcgtggaataggcactgttacttttgaacagtccattgaagctgtgcaagctatatgtatccttctgcaggaattcaacttatgaacagtttgacctaaattgctgtgttagtaatgtaggtttgtgtgaggaagaggtgactgtgtgtattcatgttttttatgtgactagggggagtgcattactgtggaattaagaggttctctgggccggaccggtcacggtggctcacgcctgtaatcccagcacttcgggaggccaaggcgggcggatcacttgaggtcagttcgagaccagcctggccaacatggtgaaaccccggctctactaaaaaatgcaaaaattagctgggcgcagtggtgggtgcctgtaatcccagctactcgggaggctgaggcacaagaatcgcttgaacccgggaggtggaggttgcagtgagccgagattgcgccactgcacaccaccagcctgggtgatagagtgagactcagtctcaaaaaaaaaaaaaaaaaaaaaaaaaaaggttctctgggggtggaattgattcaatacagtgtggatagaggggatggttacaacatgggcatatgcccatgagtctttctactgttttcttttcagaagagtctaggtttgaaggaggaagtccaaagaatgtgctactagagagaaagtggggttgttgtttcatgtgtaatacatccttataggacctcactctttccagtgagtagacatcattttggagaggccacttctccttgaccctaggcttagcctagagtttttaatcccttggagagtaccccacaggagcacattcatacaactcagacaagaccgtcactgcatgtcttacccagaaaacatggtccttcagtttagatagtggtagatgcctggcccattggtcacattcagagaaccttgatgccactgcttaagaggatggtttggtgaaattgtaaggttacgaatgaagcttcacacctaaggaataagcagaagttgtcttgtcctccccgccagctttatttattgttccttttatgtttattgttgaaagtataatgaagaattgaaattgctcataaattcatcacttagagggactggtagcagttggagtatttttctttctttttgtatttctcttgtgcacatttttagaattgcaagaaatagccttaattgtaataccagctatgttcaatggccagctgctatttgatagaccaatgcacgtcaagatggatgagagggccttaccaaaaggagatttcttccctcctgagcgtccacaacaacttccccatggccttggtggtattggcatggggttaggaccaggagggcaacccattgatgccaatcacctgaataaaggcatcggaatgggaaacataggtcccgcaggaatgggaatggaaggcataggatttggaataaataaaatgggaggaatggaggggccctttggtggtggtatggaaaacatgggtcgatttggatctgggatgaacatgggcaggataaatgaaatcctaagtaatgcactgaagagaggagagatcattgcaaagcagggaggaggtggaggtggaggaagcgtccctgggatcgagaggatgggtcctggcattgaccgcctcgggggtgccggcatggagcgcatgggcgcgggcctgggccacggcatggatcgcgtgggctccgagatcgagcgcatgggcctggtcatggaccgcatgggctccgtggagcgcatgggctccggcattgagcgcatgggcccgctgggcctcgaccacatggcctccagcattgagcgcatgggccagaccatggagcgcattggctctggcgtggagcgcatgggtgccggcatgggcttcggccttgagcgcatggccgctcccatcgaccgtgtgggccagaccattgagcgcatgggctctggcgtggagcgcatgggccctgccatcgagcgcatgggcctgagcatggagcgcatggtgcccgcaggtatgggagctggcctggagcgcatgggccccgtgatggatcgcatggccaccggcctggagcgcatgggcgccaacaatctggagcggatgggcctggagcgcatgggcgccaacagcctcgagcgcatgggcctggagcgcatgggtgccaacagcctcgagcgcatgggccccgccatgggcccggccctgggcgctggcattgagcgcatgggcctggccatgggtggcggtggcggtgccagctttgaccgtgccatcgagatggagcgtggcaacttcggaggaagcttcgcaggttcctttggtggagctggaggccatgctcctggggtggccaggaaggcctgccagatatttgtgagaaatctgccattcgatttcacatggaagatgctaaaggacaaattcaacgagtgcggccacgtgctgtacgccgacatcaagatggagaatgggaagtccaaggggtgtggtgtggttaagttcgagtcgccagaggtggccgagagagcctgccggatgatgaatggcatgaagctgagtggccgagagattgacgttcgaattgatagaaacgcttaagcagttgccttttttaaacatcgatacgagacctctgaatttgtattttttcttgttaaccattttaatttgttggctggatgtataaagatgtttaaaaaattcagttgctttttggggtaatttgaattacttttttaatgactggggttccatttgactgtttgcattgagattgcaatgtgcgcaattttttttgtagttgtggcatcttgttgacatcgaatatgactttgataataaataccggttcctgaaaa

SEQ ID NO: 299833 - DNA, 3359 bp, Homo sapiens
ccttcttgccgatcctcctctgagggtcccgccctctcgcgctgctcagtcccaaatgtctcctttgataagcacccataacacaggcccacctgctctgacagactcctctgcaggccttccctctccgctgactcattccctgagaaggaccactattcatcacccatctgcctcatcccaatgtctcctttggccacgctctctccataggaccctaccatgattctggagagtgcattttacatgcatgtcttttgatgtgaaatggcagtcacttaaagacctggttaaagaaaaagttggtgaggtaacatacgtggagctcttaatggacgctgaaggaaagtcaaggggatgtgctctgagagaatttcttctgtggatttactacatgaaaaatgtaactgtatggtggcgtggaatcgaatgaaatcaggaaggcagtgagtgctcatgttacagtagctatgtttgattttgccaaacatttgagtggggtgggaggggatttgcaaatgggagtcccgcttttccaaatggctggccaaagagctttttggtattctgtttggatgcccaatttggataactggggaccaatagcagcattgtctctttgttaacagaggaattggctgtgtgtgaattatgcatggaattttagcggtggtataattaatgtaaaacgtgtgttcttgtctagaaaatgttactcttggttgtttgctgaatttgaaagttgtgtgaaccaaagattccgaaaagttgcctttgtgccagtaaattgtaaaccaaatattaaaaacctgaatgttcaaaattggcctagtttaaagagaacataaactattttctgtcgtgcaatagaatggcttagaataatcaaaaggatgagcttaacttacggaagggatggatttaggaggaatatggtaaggactcgattgagtacagagggaagcagatctaaagttggtgtgatttcttggagaccctgaatttaggtctgcttattaaatgtcagcagctctagtgcaatgctggtaacgcgtaggagaaggagatattaaggagcccagcttttaacaaggaaggcgaggcgaggcacttctgtcagcttccccttagaagggttcattttaaaagactaactttgtgacataaatcatatttttagtttgtttataactgtcattggtatttactatttttttcttttctttttccccttccttgctcttctgactggtctctggcttcctccaaagggatgtgcgtaagtatcgtctagttacttattggtatttgagccttctaacttgtaggactggtttcactcgactcgtttccttttgactctatagtgttgttgaattcaagatggaagagagcatgaaaaaagctgcggaagtcctaaacaagcatagtctgagcggaagaccactgaaagtcaaagaagatcctgatggtgaacatgccaggagagcaatgcaaaaggctggaagacttggaagcacagtatttgtagcaaatctggattataaagttggctggaagaaactgaaggaagtatttagtatggctggtgtggtggtccgagcagacattcttgaagataaagatggaaaaagtcgtggaataggcactgttacttttgaacagtccattgaagctgtgcaagctatatctatgttcaatggccagctgctatttgatagaccaatgcacgtcaagatggatgagagggccttaccaaaaggagatttcttccctcctgagcgtccacaacaacttccccatggccttggtggtattggcatggggttaggaccaggagggcaacccattgatgccaatcacctgaataaaggcatcggaatgggaaacataggtcccgcaggaatgggaatggaaggcataggatttggaataaataaaatgggaggaatggaggggccctttggtggtggtatggaaaacatgggtcgatttggatctgggatgaacatgggcaggataaatgaaatcctaagtaatgcactgaagagaggagagatcattgcaaagcagggaggaggtggaggtggaggaagcgtccctgggatcgagaggatgggtcctggcattgaccgcctcgggggtgccggcatggagcgcatgggcgcgggcctgggccacggcatggatcgcgtgggctccgagatcgagcgcatgggcctggtcatggaccgcatgggctccgtggagcgcatgggctccggcattgagcgcatgggcccgctgggcctcgaccacatggcctccagcattgagcgcatgggccagaccatggagcgcattggctctggcgtggagcgcatgggtgccggcatgggcttcggccttgagcgcatggccgctcccatcgaccgtgtgggccagaccattgagcgcatgggctctggcgtggagcgcatgggccctgccatcgagcgcatgggcctgagcatggagcgcatggtgcccgcaggtatgggagctggcctggagcgcatgggccccgtgatggatcgcatggccaccggcctggagcgcatgggcgccaacaatctggagcggatgggcctggagcgcatgggcgccaacagcctcgagcgcatgggcctggagcgcatgggtgccaacagcctcgagcgcatgggccccgccatgggcccggccctgggcgctggcattgagcgcatgggcctggccatgggtggcggtggcggtgccagctttgaccgtgccatcgagatggagcgtggcaacttcggaggaagcttcgcaggttcctttggtggagctggaggccatgctcctggggtggccaggaaggcctgccagatatttgtgagaaatctgccattcgatttcacatggaagatgctaaaggacaaattcaacgagtgcggccacgtgctgtacgccgacatcaagatggagaatgggaagtccaaggggtgtggtgtggttaagttcgagtcgccagaggtggccgagagagcctgccggatgatgaatggcatgaagctgagtggccgagagattgacgttcgaattgatagaaacgcttaagcagttgccttttttaaacatcgatacgagacctctgaatttgtattttttcttgttaaccattttaatttgttggctggatgtataaagatgtttaaaaaattcagttgctttttggggtaatttgaattacttttttaatgactggggttccatttgactgtttgcattgagattgcaatgtgcgcaattttttttgtagttgtggcatcttgttgacatcgaatatgactttgataataaataccggttcctgaaaa

SEQ ID NO: 299834 - DNA, 6923 bp, Homo sapiens
  misc_feature (2162)..(2162): n is a, c, g, or t
  misc_feature (2337)..(2337): n is a, c, g, or t
ccttcttgccgatcctcctctgagggtcccgccctctcgcgctgctcagtcccaaatgtctcctttgataagcacccataacacaggcccacctgctctgacagactcctctgcaggccttccctctccgctgactcattccctgagaaggaccactattcatcacccatctgcctcatcccaatgtctcctttggccacgctctctccataggaccctaccatgattctggagagtgcattttacatgcatgtcttttgatgtgaaatggcagtcacttaaagacctggttaaagaaaaagttggtgaggtaacatacgtggagctcttaatggacgctgaaggaaagtcaaggggatgtgctctgagagaatttcttctgtggatttactacatgaaaaatgtaactgtatggtggcgtggaatcgaatgaaatcaggaaggcagtgagtgctcatgttacagtagctatgtttgattttgccaaacatttgagtggggtgggaggggatttgcaaatgggagtcccgcttttccaaatggctggccaaagagctttttggtattctgtttggatgcccaatttggataactggggaccaatagcagcattgtctctttgttaacagaggaattggctgtgtgtgaattatgcatggaattttagcggtggtataattaatgtaaaacgtgtgttcttgtctagaaaatgttactcttggttgtttgctgaatttgaaagttgtgtgaaccaaagattccgaaaagttgcctttgtgccagtaaattgtaaaccaaatattaaaaacctgaatgttcaaaattggcctagtttaaagagaacataaactattttctgtcgtgcaatagaatggcttagaataatcaaaaggatgagcttaacttacggaagggatggatttaggaggaatatggtaaggactcgattgagtacagagggaagcagatctaaagttggtgtgatttcttggagaccctgaatttaggtctgcttattaaatgtcagcagctctagtgcaatgctggtaacgcgtaggagaaggagatattaaggagcccagcttttaacaaggaaggcgaggcgaggcacttctgtcagcttccccttagaagggttcattttaaaagactaactttgtgacataaatcatatttttagtttgtttataactgtcattggtatttactatttttttcttttctttttccccttccttgctcttctgactggtctctggcttcctccaaagggatgtgcgtaagtatcgtctagttacttattggtatttgagccttctaacttgtaggactggtttcactcgactcgtttccttttgactctatagtgttgttgaattcaagatggaagagagcatgaaaaaagctgcggaagtcctaaacaagcatagtctgagcggaagaccactgaaagtcaaagaagtaagctcttgcttaacactgcggatactgtgtgtaattgttgagtgatcctactttggaattagggaaagacggtcatggtcccagacggcatttacaaagcaagtgccagcctgttgtttctaatgaagagtgtcggtcatagcctacagcagccattccctgcaaggactttggggtggtggccaagcagatcctgagtggctgctgaccaccttctaatatctgtgatttgtctgaggccttgttgtctcagggactctcaaaccatgagcccgtgggtttgtgccattaagttttactccatctgacccttcttcttggcccatcttttttctttttttaaaaagtgagtttgttccagcctgggcaacatggtgaaaccccctctctacaaaaggtacaaaaattagccaggcatggtggcgcatgcctgtagtcctagctacttgggaggctgaggcaggaggatcatttgagcccaggatgtggaggttgcagtgagctgagattgcaccattgcactccagcccgggcaacagtgagaccctgtctaaaaaataaaaaataaagtgagtttgttattcctcaaacctgctttcacatctcatctgaatcaaatatattccttgaggaagaaggtttttttgttgattaaatccctcttggctgggcgcagtggctcacgcctgtaatccccngcactttgggaggctgaggtgggtggatcaaggtcatgagttcaagaccagcttgaccaacatggtgaaaccctgtctactaaaaatacaaaaaattagctgggcgtagtggggggtgcctgtaatccatctactcgggaggctgaggcaggagaatcgctggaacccaggaggnggaggttgcagtgagccgagatcgcgccattgaactccagcctgggcagtaagagcaaagctctgtctcaaaaaaacatccctcttaacttcttttcacctcttctcttggggaggaagatgagtagattcagagtgaagcttggtagggtctaaggtctctcatgtgttatgatgtcttttttagtgctgatggtggtaattgacaggacagagagttgaagaagagagtcagtacagagcttcacagaccttcccagatgttgttttactgcgcagccctcacacacacgcctccaacacctgaaggacttgaaggatgggggcgcttgtgtggtctagaactgtttctcaaacttctggaagccattgacggggtttgcagaagttacaaaaccccattgatgaattagtaagattcagctataccaagcccatgaagctctaatttcagtctggcggttctacattatatcagctaatcatgtttccctccctaccctgcttttcttttttacttagtgcaattgagagctgtgtttttagtgctacacttcatgccttttcttcctttcctatttctttagctggactcttctaagctggtagttgagttcatttgactttcttgttaatagatttgagagatgctttccaaacaacctttcagtttctaagtcttgagaatatcatttactgtgcaagcatggtttgcgttgtactgggtcagttaaacgtaacaccttttgtgcttgttttaggatcctgatggtgaacatgccaggagagcaatgcaaaaggtgatggctacgactggtgggatgggtatgggaccaggtggcccaggaatgattactatcccacccagtatcctaaataatcccaacatcccaaatgagattatccatgcattacaggctggaagacttggaagcacagtatttgtagcaaatgtaagtaaacagaaccatcgtctaaagtagaaaatcagaactttatgaaatgaccttgtcaatatgttataaaagtaattctcacatttgagaagaaaaatgtaaagaagggttttgttcttgatttctttaaaaatcagccttataggcgggctttgtctgcattcctaagtcacaggcttgaccgtggtctcgttggggctgtgattcctgagtttcgcaggtgtttccacaagcagtaaccgagtctgcattctccgttggtttattttatgcagttttggtgcagagtaagactgtacgagcagaagtgcactgacaccttcctcttgttgtgtctggggtgaatgataatacctccaccatctgcaaggggaaatatttagaataaagtaggttgggtggggtggggagtggtaaagcttatcagggaaacaattttttaaaaatgttcagaaaatgagtattaatttgaagtatgaggtgacttaagtttctgagaaaagagacaatatatttactataggtacagtttatttacagtgaaggccaggctttataatcctattttaaaatttccattgcagttgattagtttttgtgacattatttcctaatacttttttccaaccaaagcatgtatcattcatgtagtaaaaatgttgtgtttcttaagatgtttacattgaggtttttaccccgttctctctcgattagctggattataaagttggctggaagaaactgaaggaagtatttagtatggctggtgtggtggtccgagcagacattcttgaagataaagatggaaaaagtcgtggaataggcactgttacttttgaacagtccattgaagctgtgcaagctatatgtatccttctgcaggaattcaacttatgaacagtttgacctaaattgctgtgttagtaatgtaggtttgtgtgaggaagaggtgactgtgtgtattcatgttttttatgtgactagggggagtgcattactgtggaattaagaggttctctgggccggaccggtcacggtggctcacgcctgtaatcccagcacttcgggaggccaaggcgggcggatcacttgaggtcagttcgagaccagcctggccaacatggtgaaaccccggctctactaaaaaatgcaaaaattagctgggcgcagtggtgggtgcctgtaatcccagctactcgggaggctgaggcacaagaatcgcttgaacccgggaggtggaggttgcagtgagccgagattgcgccactgcacaccaccagcctgggtgatagagtgagactcagtctcaaaaaaaaaaaaaaaaaaaaaaaaaaaggttctctgggggtggaattgattcaatacagtgtggatagaggggatggttacaacatgggcatatgcccatgagtctttctactgttttcttttcagaagagtctaggtttgaaggaggaagtccaaagaatgtgctactagagagaaagtggggttgttgtttcatgtgtaatacatccttataggacctcactctttccagtgagtagacatcattttggagaggccacttctccttgaccctaggcttagcctagagtttttaatcccttggagagtaccccacaggagcacattcatacaactcagacaagaccgtcactgcatgtcttacccagaaaacatggtccttcagtttagatagtggtagatgcctggcccattggtcacattcagagaaccttgatgccactgcttaagaggatggtttggtgaaattgtaaggttacgaatgaagcttcacacctaaggaataagcagaagttgtcttgtcctccccgccagctttatttattgttccttttatgtttattgttgaaagtataatgaagaattgaaattgctcataaattcatcacttagagggactggtagcagttggagtatttttctttctttttgtatttctcttgtgcacatttttagaattgcaagaaatagccttaattgtaataccagctatgttcaatggccagctgctatttgatagaccaatgcacgtcaagatggatgagagggccttaccaaaaggagatttcttccctcctgagcgtccacaacaacttccccatggccttggtggtattggcatggggttaggaccaggagggcaacccattgatgccaatcacctgaataaaggcatcggaatgggaaacataggtcccgcaggaatgggaatggaaggcataggatttggaataaataaaatgggaggaatggaggggccctttggtggtggtatggaaaacatgggtcgatttggatctgggatgaacatgggcaggataaatggtggaggtggaggaagcgtccctgggatcgagaggatgggtcctggcattgaccgcctcgggggtgccggcatggagcgcatgggcgcgggcctgggccacggcatggatcgcgtgggctccgagatcgagcgcatgggcctggtcatggaccgcatgggctccgtggagcgcatgggctccggcattgagcgcatgggcccgctgggcctcgaccacatggcctccagcattgagcgcatgggccagaccatggagcgcattggctctggcgtggagcgcatgggtgccggcatgggcttcggccttgagcgcatggccgctcccatcgaccgtgtgggccagaccattgagcgcatgggctctggcgtggagcgcatgggccctgccatcgagcgcatgggcctgagcatggagcgcatggtgcccgcaggtatgggagctggcctggagcgcatgggccccgtgatggatcgcatggccaccggcctggagcgcatgggcgccaacaatctggagcggatgggcctggagcgcatgggcgccaacagcctcgagcgcatgggcctggagcgcatgggtgccaacagcctcgagcgcatgggccccgccatgggcccggccctgggcgctggcattgagcgcatgggcctggccatgggtggcggtggcggtgccagctttgaccgtgccatcgagatggagcgtggcaacttcggaggaagcttcgcaggttcctttggtggagctggaggccatgctcctggggtggccaggaaggcctgccagatatttgtgagaaatctgccattcgatttcacatggaagatgctaaaggacaaattcaacgagtgcggccacgtgctgtacgccgacatcaagatggagaatgggaagtccaaggggtgtggtgtggttaagttcgagtcgccagaggtggccgagagagcctgccggatgatgaatggcatgaagctgagtggccgagagattgacgttcgaattgatagaaacgcttaagcagttgccttttttaaacatcgatacgagacctctgaatttgtattttttcttgttaaccattttaatttgttggctggatgtataaagatgtttaaaaaattcagttgctttttggggtaatttgaattacttttttaatgactggggttccatttgactgtttgcattgagattgcaatgtgcgcaattttttttgtagttgtggcatcttgttgacatcgaatatgactttgataataaataccggttcctgaaaa

SEQ ID NO: 299835 - DNA, 6878 bp, Homo sapiens
  misc_feature (2162)..(2162): n is a, c, g, or t
  misc_feature (2337)..(2337): n is a, c, g, or t
ccttcttgccgatcctcctctgagggtcccgccctctcgcgctgctcagtcccaaatgtctcctttgataagcacccataacacaggcccacctgctctgacagactcctctgcaggccttccctctccgctgactcattccctgagaaggaccactattcatcacccatctgcctcatcccaatgtctcctttggccacgctctctccataggaccctaccatgattctggagagtgcattttacatgcatgtcttttgatgtgaaatggcagtcacttaaagacctggttaaagaaaaagttggtgaggtaacatacgtggagctcttaatggacgctgaaggaaagtcaaggggatgtgctctgagagaatttcttctgtggatttactacatgaaaaatgtaactgtatggtggcgtggaatcgaatgaaatcaggaaggcagtgagtgctcatgttacagtagctatgtttgattttgccaaacatttgagtggggtgggaggggatttgcaaatgggagtcccgcttttccaaatggctggccaaagagctttttggtattctgtttggatgcccaatttggataactggggaccaatagcagcattgtctctttgttaacagaggaattggctgtgtgtgaattatgcatggaattttagcggtggtataattaatgtaaaacgtgtgttcttgtctagaaaatgttactcttggttgtttgctgaatttgaaagttgtgtgaaccaaagattccgaaaagttgcctttgtgccagtaaattgtaaaccaaatattaaaaacctgaatgttcaaaattggcctagtttaaagagaacataaactattttctgtcgtgcaatagaatggcttagaataatcaaaaggatgagcttaacttacggaagggatggatttaggaggaatatggtaaggactcgattgagtacagagggaagcagatctaaagttggtgtgatttcttggagaccctgaatttaggtctgcttattaaatgtcagcagctctagtgcaatgctggtaacgcgtaggagaaggagatattaaggagcccagcttttaacaaggaaggcgaggcgaggcacttctgtcagcttccccttagaagggttcattttaaaagactaactttgtgacataaatcatatttttagtttgtttataactgtcattggtatttactatttttttcttttctttttccccttccttgctcttctgactggtctctggcttcctccaaagggatgtgcgtaagtatcgtctagttacttattggtatttgagccttctaacttgtaggactggtttcactcgactcgtttccttttgactctatagtgttgttgaattcaagatggaagagagcatgaaaaaagctgcggaagtcctaaacaagcatagtctgagcggaagaccactgaaagtcaaagaagtaagctcttgcttaacactgcggatactgtgtgtaattgttgagtgatcctactttggaattagggaaagacggtcatggtcccagacggcatttacaaagcaagtgccagcctgttgtttctaatgaagagtgtcggtcatagcctacagcagccattccctgcaaggactttggggtggtggccaagcagatcctgagtggctgctgaccaccttctaatatctgtgatttgtctgaggccttgttgtctcagggactctcaaaccatgagcccgtgggtttgtgccattaagttttactccatctgacccttcttcttggcccatcttttttctttttttaaaaagtgagtttgttccagcctgggcaacatggtgaaaccccctctctacaaaaggtacaaaaattagccaggcatggtggcgcatgcctgtagtcctagctacttgggaggctgaggcaggaggatcatttgagcccaggatgtggaggttgcagtgagctgagattgcaccattgcactccagcccgggcaacagtgagaccctgtctaaaaaataaaaaataaagtgagtttgttattcctcaaacctgctttcacatctcatctgaatcaaatatattccttgaggaagaaggtttttttgttgattaaatccctcttggctgggcgcagtggctcacgcctgtaatccccngcactttgggaggctgaggtgggtggatcaaggtcatgagttcaagaccagcttgaccaacatggtgaaaccctgtctactaaaaatacaaaaaattagctgggcgtagtggggggtgcctgtaatccatctactcgggaggctgaggcaggagaatcgctggaacccaggaggnggaggttgcagtgagccgagatcgcgccattgaactccagcctgggcagtaagagcaaagctctgtctcaaaaaaacatccctcttaacttcttttcacctcttctcttggggaggaagatgagtagattcagagtgaagcttggtagggtctaaggtctctcatgtgttatgatgtcttttttagtgctgatggtggtaattgacaggacagagagttgaagaagagagtcagtacagagcttcacagaccttcccagatgttgttttactgcgcagccctcacacacacgcctccaacacctgaaggacttgaaggatgggggcgcttgtgtggtctagaactgtttctcaaacttctggaagccattgacggggtttgcagaagttacaaaaccccattgatgaattagtaagattcagctataccaagcccatgaagctctaatttcagtctggcggttctacattatatcagctaatcatgtttccctccctaccctgcttttcttttttacttagtgcaattgagagctgtgtttttagtgctacacttcatgccttttcttcctttcctatttctttagctggactcttctaagctggtagttgagttcatttgactttcttgttaatagatttgagagatgctttccaaacaacctttcagtttctaagtcttgagaatatcatttactgtgcaagcatggtttgcgttgtactgggtcagttaaacgtaacaccttttgtgcttgttttaggatcctgatggtgaacatgccaggagagcaatgcaaaaggtgatggctacgactggtgggatgggtatgggaccaggtggcccaggaatgattactatcccacccagtatcctaaataatcccaacatcccaaatgagattatccatgcattacaggctggaagacttggaagcacagtatttgtagcaaatgtaagtaaacagaaccatcgtctaaagtagaaaatcagaactttatgaaatgaccttgtcaatatgttataaaagtaattctcacatttgagaagaaaaatgtaaagaagggttttgttcttgatttctttaaaaatcagccttataggcgggctttgtctgcattcctaagtcacaggcttgaccgtggtctcgttggggctgtgattcctgagtttcgcaggtgtttccacaagcagtaaccgagtctgcattctccgttggtttattttatgcagttttggtgcagagtaagactgtacgagcagaagtgcactgacaccttcctcttgttgtgtctggggtgaatgataatacctccaccatctgcaaggggaaatatttagaataaagtaggttgggtggggtggggagtggtaaagcttatcagggaaacaattttttaaaaatgttcagaaaatgagtattaatttgaagtatgaggtgacttaagtttctgagaaaagagacaatatatttactataggtacagtttatttacagtgaaggccaggctttataatcctattttaaaatttccattgcagttgattagtttttgtgacattatttcctaatacttttttccaaccaaagcatgtatcattcatgtagtaaaaatgttgtgtttcttaagatgtttacattgaggtttttaccccgttctctctcgattagctggattataaagttggctggaagaaactgaaggaagtatttagtatggctggtgtggtggtccgagcagacattcttgaagataaagatggaaaaagtcgtggaataggcactgttacttttgaacagtccattgaagctgtgcaagctatatgtatccttctgcaggaattcaacttatgaacagtttgacctaaattgctgtgttagtaatgtaggtttgtgtgaggaagaggtgactgtgtgtattcatgttttttatgtgactagggggagtgcattactgtggaattaagaggttctctgggccggaccggtcacggtggctcacgcctgtaatcccagcacttcgggaggccaaggcgggcggatcacttgaggtcagttcgagaccagcctggccaacatggtgaaaccccggctctactaaaaaatgcaaaaattagctgggcgcagtggtgggtgcctgtaatcccagctactcgggaggctgaggcacaagaatcgcttgaacccgggaggtggaggttgcagtgagccgagattgcgccactgcacaccaccagcctgggtgatagagtgagactcagtctcaaaaaaaaaaaaaaaaaaaaaaaaaaaggttctctgggggtggaattgattcaatacagtgtggatagaggggatggttacaacatgggcatatgcccatgagtctttctactgttttcttttcagaagagtctaggtttgaaggaggaagtccaaagaatgtgctactagagagaaagtggggttgttgtttcatgtgtaatacatccttataggacctcactctttccagtgagtagacatcattttggagaggccacttctccttgaccctaggcttagcctagagtttttaatcccttggagagtaccccacaggagcacattcatacaactcagacaagaccgtcactgcatgtcttacccagaaaacatggtccttcagtttagatagtggtagatgcctggcccattggtcacattcagagaaccttgatgccactgcttaagaggatggtttggtgaaattgtaaggttacgaatgaagcttcacacctaaggaataagcagaagttgtcttgtcctccccgccagctttatttattgttccttttatgtttattgttgaaagtataatgaagaattgaaattgctcataaattcatcacttagagggactggtagcagttggagtatttttctttctttttgtatttctcttgtgcacatttttagaattgcaagaaatagccttaattgtaataccagctatgttcaatggccagctgctatttgatagaccaatgcacgtcaagatggatgagagggccttaccaaaaggagatttcttccctcctgagcgtccacaacaacttccccatggccttggtggtattggcatggggttaggaccaggagggcaacccattgatgccaatcacctgaataaaggcatcggaatgggaaacataggtcccgcaggaatggaggggccctttggtggtggtatggaaaacatgggtcgatttggatctgggatgaacatgggcaggataaatggtggaggtggaggaagcgtccctgggatcgagaggatgggtcctggcattgaccgcctcgggggtgccggcatggagcgcatgggcgcgggcctgggccacggcatggatcgcgtgggctccgagatcgagcgcatgggcctggtcatggaccgcatgggctccgtggagcgcatgggctccggcattgagcgcatgggcccgctgggcctcgaccacatggcctccagcattgagcgcatgggccagaccatggagcgcattggctctggcgtggagcgcatgggtgccggcatgggcttcggccttgagcgcatggccgctcccatcgaccgtgtgggccagaccattgagcgcatgggctctggcgtggagcgcatgggccctgccatcgagcgcatgggcctgagcatggagcgcatggtgcccgcaggtatgggagctggcctggagcgcatgggccccgtgatggatcgcatggccaccggcctggagcgcatgggcgccaacaatctggagcggatgggcctggagcgcatgggcgccaacagcctcgagcgcatgggcctggagcgcatgggtgccaacagcctcgagcgcatgggccccgccatgggcccggccctgggcgctggcattgagcgcatgggcctggccatgggtggcggtggcggtgccagctttgaccgtgccatcgagatggagcgtggcaacttcggaggaagcttcgcaggttcctttggtggagctggaggccatgctcctggggtggccaggaaggcctgccagatatttgtgagaaatctgccattcgatttcacatggaagatgctaaaggacaaattcaacgagtgcggccacgtgctgtacgccgacatcaagatggagaatgggaagtccaaggggtgtggtgtggttaagttcgagtcgccagaggtggccgagagagcctgccggatgatgaatggcatgaagctgagtggccgagagattgacgttcgaattgatagaaacgcttaagcagttgccttttttaaacatcgatacgagacctctgaatttgtattttttcttgttaaccattttaatttgttggctggatgtataaagatgtttaaaaaattcagttgctttttggggtaatttgaattacttttttaatgactggggttccatttgactgtttgcattgagattgcaatgtgcgcaattttttttgtagttgtggcatcttgttgacatcgaatatgactttgataataaataccggttcctgaaaa

SEQ ID NO: 299836 - DNA, 2982 bp, Homo sapiens
ccttcttgccgatcctcctctgagggtcccgccctctcgcgctgctcagtcccaaatgtctcctttgataagcacccataacacaggcccacctgctctgacagactcctctgcaggccttccctctccgctgactcattccctgagaaggaccactattcatcacccatctgcctcatcccaatgtctcctttggccacgctctctccataggaccctaccatgattctggagagtgcattttacatgcatgtcttttgatgtgaaatggcagtcacttaaagacctggttaaagaaaaagttggtgaggtaacatacgtggagctcttaatggacgctgaaggaaagtcaaggggatgtgctctgagagaatttcttctgtggatttactacatgaaaaatgtaactgtatggtggcgtggaatcgaatgaaatcaggaaggcagtgagtgctcatgttacagtagctatgtttgattttgccaaacatttgagtggggtgggaggggatttgcaaatgggagtcccgcttttccaaatggctggccaaagagctttttggtattctgtttggatgcccaatttggataactggggaccaatagcagcattgtctctttgttaacagaggaattggctgtgtgtgaattatgcatggaattttagcggtggtataattaatgtaaaacgtgtgttcttgtctagaaaatgttactcttggttgtttgctgaatttgaaagttgtgtgaaccaaagattccgaaaagttgcctttgtgccagtaaattgtaaaccaaatattaaaaacctgaatgttcaaaattggcctagtttaaagagaacataaactattttctgtcgtgcaatagaatggcttagaataatcaaaaggatgagcttaacttacggaagggatggatttaggaggaatatggtaaggactcgattgagtacagagggaagcagatctaaagttggtgtgatttcttggagaccctgaatttaggtctgcttattaaatgtcagcagctctagtgcaatgctggtaacgcgtaggagaaggagatattaaggagcccagcttttaacaaggaaggcgaggcgaggcacttctgtcagcttccccttagaagggttcattttaaaagactaactttgtgacataaatcatatttttagtttgtttataactgtcattggtatttactatttttttcttttctttttccccttccttgctcttctgactggtctctggcttcctccaaagggatgtgcgtaagtatcgtctagttacttattggtatttgagccttctaacttgtaggactggtttcactcgactcgtttccttttgactctatagtgttgttgaattcaagatggaagagagcatgaaaaaagctgcggaagtcctaaacaaatggccttggtggtattggcatggggttaggaccaggagggcaacccattgatgccaatcacctgaataaaggcatcggaatgggaaacataggtcccgcaggaatgggaatggaaggcataggatttggaataaataaaatgggaggaatggaggggccctttggtggtggtatggaaaacatgggtcgatttggatctgggatgaacatgggcaggataaatgaaatcctaagtaatgcactgaagagaggagagatcattgcaaagcagggaggaggtggaggtggaggaagcgtccctgggatcgagaggatgggtcctggcattgaccgcctcgggggtgccggcatggagcgcatgggcgcgggcctgggccacggcatggatcgcgtgggctccgagatcgagcgcatgggcctggtcatggaccgcatgggctccgtggagcgcatgggctccggcattgagcgcatgggcccgctgggcctcgaccacatggcctccagcattgagcgcatgggccagaccatggagcgcattggctctggcgtggagcgcatgggtgccggcatgggcttcggccttgagcgcatggccgctcccatcgaccgtgtgggccagaccattgagcgcatgggctctggcgtggagcgcatgggccctgccatcgagcgcatgggcctgagcatggagcgcatggtgcccgcaggtatgggagctggcctggagcgcatgggccccgtgatggatcgcatggccaccggcctggagcgcatgggcgccaacaatctggagcggatgggcctggagcgcatgggcgccaacagcctcgagcgcatgggcctggagcgcatgggtgccaacagcctcgagcgcatgggccccgccatgggcccggccctgggcgctggcattgagcgcatgggcctggccatgggtggcggtggcggtgccagctttgaccgtgccatcgagatggagcgtggcaacttcggaggaagcttcgcaggttcctttggtggagctggaggccatgctcctggggtggccaggaaggcctgccagatatttgtgagaaatctgccattcgatttcacatggaagatgctaaaggacaaattcaacgagtgcggccacgtgctgtacgccgacatcaagatggagaatgggaagtccaaggggtgtggtgtggttaagttcgagtcgccagaggtggccgagagagcctgccggatgatgaatggcatgaagctgagtggccgagagattgacgttcgaattgatagaaacgcttaagcagttgccttttttaaacatcgatacgagacctctgaatttgtattttttcttgttaaccattttaatttgttggctggatgtataaagatgtttaaaaaattcagttgctttttggggtaatttgaattacttttttaatgactggggttccatttgactgtttgcattgagattgcaatgtgcgcaattttttttgtagttgtggcatcttgttgacatcgaatatgactttgataataaataccggttcctgaaaa

SEQ ID NO: 299837 - DNA, 1623 bp, Homo sapiens
cactattttcttgagatccgtatggacgaagttgttgcaacaacttcgtccatcgcgacttccccatggccttggtggtattggcatggggttaggaccaggagggcaacccattgatgccaatcacctgaataaaggcatcggaatgggaaacataggtcccgcaggaatgggaatggaaggcataggatttggaataaataaaatgggaggaatggaggggccctttggtggtggtatggaaaacatgggtcgatttggatctgggatgaacatgggcaggataaatgaaatcctaagtaatgcactgaagagaggagagatcattgcaaagcagggaggaggtggaggtggaggaagcgtccctgggatcgagaggatgggtcctggcattgaccgcctcgggggtgccggcatggagcgcatgggcgcgggcctgggccacggcatggatcgcgtgggctccgagatcgagcgcatgggcctggtcatggaccgcatgggctccgtggagcgcatgggctccggcattgagcgcatgggcccgctgggcctcgaccacatggcctccagcattgagcgcatgggccagaccatggagcgcattggctctggcgtggagcgcatgggtgccggcatgggcttcggccttgagcgcatggccgctcccatcgaccgtgtgggccagaccattgagcgcatgggctctggcgtggagcgcatgggccctgccatcgagcgcatgggcctgagcatggagcgcatggtgcccgcaggtatgggagctggcctggagcgcatgggccccgtgatggatcgcatggccaccggcctggagcgcatgggcgccaacaatctggagcggatgggcctggagcgcatgggcgccaacagcctcgagcgcatgggcctggagcgcatgggtgccaacagcctcgagcgcatgggccccgccatgggcccggccctgggcgctggcattgagcgcatgggcctggccatgggtggcggtggcggtgccagctttgaccgtgccatcgagatggagcgtggcaacttcggaggaagcttcgcaggttcctttggtggagctggaggccatgctcctggggtggccaggaaggcctgccagatatttgtgagaaatctgccattcgatttcacatggaagatgctaaaggacaaattcaacgagtgcggccacgtgctgtacgccgacatcaagatggagaatgggaagtccaaggggtgtggtgtggttaagttcgagtcgccagaggtggccgagagagcctgccggatgatgaatggcatgaagctgagtggccgagagattgacgttcgaattgatagaaacgcttaagcagttgccttttttaaacatcgatacgagacctctgaatttgtattttttcttgttaaccattttaatttgttggctggatgtataaagatgtttaaaaaattcagttgctttttggggtaatttgaattacttttttaatgactggggttccatttgactgtttgcattgagattgcaatgtgcgcaattttttttgtagttgtggcatcttgttgacatcgaatatgactttgataataaataccggttcctgaaaa

SEQ ID NO: 299838 - DNA, 3422 bp, Homo sapiens
ccttcttgccgatcctcctctgagggtcccgccctctcgcgctgctcagtcccaaatgtctcctttgataagcacccataacacaggcccacctgctctgacagactcctctgcaggccttccctctccgctgactcattccctgagaaggaccactattcatcacccatctgcctcatcccaatgtctcctttggccacgctctctccataggaccctaccatgattctggagagtgcattttacatgcatgtcttttgatgtgaaatggcagtcacttaaagacctggttaaagaaaaagttggtgaggtaacatacgtggagctcttaatggacgctgaaggaaagtcaaggggatgtgctctgagagaatttcttctgtggatttactacatgaaaaatgtaactgtatggtggcgtggaatcgaatgaaatcaggaaggcagtgagtgctcatgttacagtagctatgtttgattttgccaaacatttgagtggggtgggaggggatttgcaaatgggagtcccgcttttccaaatggctggccaaagagctttttggtattctgtttggatgcccaatttggataactggggaccaatagcagcattgtctctttgttaacagaggaattggctgtgtgtgaattatgcatggaattttagcggtggtataattaatgtaaaacgtgtgttcttgtctagaaaatgttactcttggttgtttgctgaatttgaaagttgtgtgaaccaaagattccgaaaagttgcctttgtgccagtaaattgtaaaccaaatattaaaaacctgaatgttcaaaattggcctagtttaaagagaacataaactattttctgtcgtgcaatagaatggcttagaataatcaaaaggatgagcttaacttacggaagggatggatttaggaggaatatggtaaggactcgattgagtacagagggaagcagatctaaagttggtgtgatttcttggagaccctgaatttaggtctgcttattaaatgtcagcagctctagtgcaatgctggtaacgcgtaggagaaggagatattaaggagcccagcttttaacaaggaaggcgaggcgaggcacttctgtcagcttccccttagaagggttcattttaaaagactaactttgtgacataaatcatatttttagtttgtttataactgtcattggtatttactatttttttcttttctttttccccttccttgctcttctgactggtctctggcttcctccaaagggatgtgcgtaagtatcgtctagttacttattggtatttgagccttctaacttgtaggactggtttcactcgactcgtttccttttgactctatagtgttgttgaattcaagatggaagagagcatgaaaaaagctgcggaagtcctaaacaagcatagtctgagcggaagaccactgaaagtcaaagaagatcctgatggtgaacatgccaggagagcaatgcaaaaggtgatggctacgactggtgggatgggtatgggaccaggtggcccaggaatgattactatcccacccagtatcctaaataatcccaacatcccaaatgagattatccatgcattacaggctggaagacttggaagcacagtatttgtagcaaatctggattataaagttggctggaagaaactgaaggaagtatttagtatggctggtgtggtggtccgagcagacattcttgaagataaagatggaaaaagtcgtggaataggcactgttacttttgaacagtccattgaagctgtgcaagctatatctatgttcaatggccagctgctatttgatagaccaatgcacgtcaagatggatgagagggccttaccaaaaggagatttcttccctcctgagcgtccacaacaacttccccatggccttggtggtattggcatggggttaggaccaggagggcaacccattgatgccaatcacctgaataaaggcatcggaatgggaaacataggtcccgcaggaatgggaatggaaggcataggatttggaataaataaaatgggaggaatggaggggccctttggtggtggtatggaaaacatgggtcgatttggatctgggatgaacatgggcaggataaatggtggaggtggaggaagcgtccctgggatcgagaggatgggtcctggcattgaccgcctcgggggtgccggcatggagcgcatgggcgcgggcctgggccacggcatggatcgcgtgggctccgagatcgagcgcatgggcctggtcatggaccgcatgggctccgtggagcgcatgggctccggcattgagcgcatgggcccgctgggcctcgaccacatggcctccagcattgagcgcatgggccagaccatggagcgcattggctctggcgtggagcgcatgggtgccggcatgggcttcggccttgagcgcatggccgctcccatcgaccgtgtgggccagaccattgagcgcatgggctctggcgtggagcgcatgggccctgccatcgagcgcatgggcctgagcatggagcgcatggtgcccgcaggtatgggagctggcctggagcgcatgggccccgtgatggatcgcatggccaccggcctggagcgcatgggcgccaacaatctggagcggatgggcctggagcgcatgggcgccaacagcctcgagcgcatgggcctggagcgcatgggtgccaacagcctcgagcgcatgggccccgccatgggcccggccctgggcgctggcattgagcgcatgggcctggccatgggtggcggtggcggtgccagctttgaccgtgccatcgagatggagcgtggcaacttcggaggaagcttcgcaggttcctttggtggagctggaggccatgctcctggggtggccaggaaggcctgccagatatttgtgagaaatctgccattcgatttcacatggaagatgctaaaggacaaattcaacgagtgcggccacgtgctgtacgccgacatcaagatggagaatgggaagtccaaggggtgtggtgtggttaagttcgagtcgccagaggtggccgagagagcctgccggatgatgaatggcatgaagctgagtggccgagagattgacgttcgaattgatagaaacgcttaagcagttgccttttttaaacatcgatacgagacctctgaatttgtattttttcttgttaaccattttaatttgttggctggatgtataaagatgtttaaaaaattcagttgctttttggggtaatttgaattacttttttaatgactggggttccatttgactgtttgcattgagattgcaatgtgcgcaattttttttgtagttgtggcatcttgttgacatcgaatatgactttgataataaataccggttcctgaaaa

SEQ ID NO: 299839 - DNA, 3377 bp, Homo sapiens
ccttcttgccgatcctcctctgagggtcccgccctctcgcgctgctcagtcccaaatgtctcctttgataagcacccataacacaggcccacctgctctgacagactcctctgcaggccttccctctccgctgactcattccctgagaaggaccactattcatcacccatctgcctcatcccaatgtctcctttggccacgctctctccataggaccctaccatgattctggagagtgcattttacatgcatgtcttttgatgtgaaatggcagtcacttaaagacctggttaaagaaaaagttggtgaggtaacatacgtggagctcttaatggacgctgaaggaaagtcaaggggatgtgctctgagagaatttcttctgtggatttactacatgaaaaatgtaactgtatggtggcgtggaatcgaatgaaatcaggaaggcagtgagtgctcatgttacagtagctatgtttgattttgccaaacatttgagtggggtgggaggggatttgcaaatgggagtcccgcttttccaaatggctggccaaagagctttttggtattctgtttggatgcccaatttggataactggggaccaatagcagcattgtctctttgttaacagaggaattggctgtgtgtgaattatgcatggaattttagcggtggtataattaatgtaaaacgtgtgttcttgtctagaaaatgttactcttggttgtttgctgaatttgaaagttgtgtgaaccaaagattccgaaaagttgcctttgtgccagtaaattgtaaaccaaatattaaaaacctgaatgttcaaaattggcctagtttaaagagaacataaactattttctgtcgtgcaatagaatggcttagaataatcaaaaggatgagcttaacttacggaagggatggatttaggaggaatatggtaaggactcgattgagtacagagggaagcagatctaaagttggtgtgatttcttggagaccctgaatttaggtctgcttattaaatgtcagcagctctagtgcaatgctggtaacgcgtaggagaaggagatattaaggagcccagcttttaacaaggaaggcgaggcgaggcacttctgtcagcttccccttagaagggttcattttaaaagactaactttgtgacataaatcatatttttagtttgtttataactgtcattggtatttactatttttttcttttctttttccccttccttgctcttctgactggtctctggcttcctccaaagggatgtgcgtaagtatcgtctagttacttattggtatttgagccttctaacttgtaggactggtttcactcgactcgtttccttttgactctatagtgttgttgaattcaagatggaagagagcatgaaaaaagctgcggaagtcctaaacaagcatagtctgagcggaagaccactgaaagtcaaagaagatcctgatggtgaacatgccaggagagcaatgcaaaaggtgatggctacgactggtgggatgggtatgggaccaggtggcccaggaatgattactatcccacccagtatcctaaataatcccaacatcccaaatgagattatccatgcattacaggctggaagacttggaagcacagtatttgtagcaaatctggattataaagttggctggaagaaactgaaggaagtatttagtatggctggtgtggtggtccgagcagacattcttgaagataaagatggaaaaagtcgtggaataggcactgttacttttgaacagtccattgaagctgtgcaagctatatctatgttcaatggccagctgctatttgatagaccaatgcacgtcaagatggatgagagggccttaccaaaaggagatttcttccctcctgagcgtccacaacaacttccccatggccttggtggtattggcatggggttaggaccaggagggcaacccattgatgccaatcacctgaataaaggcatcggaatgggaaacataggtcccgcaggaatggaggggccctttggtggtggtatggaaaacatgggtcgatttggatctgggatgaacatgggcaggataaatggtggaggtggaggaagcgtccctgggatcgagaggatgggtcctggcattgaccgcctcgggggtgccggcatggagcgcatgggcgcgggcctgggccacggcatggatcgcgtgggctccgagatcgagcgcatgggcctggtcatggaccgcatgggctccgtggagcgcatgggctccggcattgagcgcatgggcccgctgggcctcgaccacatggcctccagcattgagcgcatgggccagaccatggagcgcattggctctggcgtggagcgcatgggtgccggcatgggcttcggccttgagcgcatggccgctcccatcgaccgtgtgggccagaccattgagcgcatgggctctggcgtggagcgcatgggccctgccatcgagcgcatgggcctgagcatggagcgcatggtgcccgcaggtatgggagctggcctggagcgcatgggccccgtgatggatcgcatggccaccggcctggagcgcatgggcgccaacaatctggagcggatgggcctggagcgcatgggcgccaacagcctcgagcgcatgggcctggagcgcatgggtgccaacagcctcgagcgcatgggccccgccatgggcccggccctgggcgctggcattgagcgcatgggcctggccatgggtggcggtggcggtgccagctttgaccgtgccatcgagatggagcgtggcaacttcggaggaagcttcgcaggttcctttggtggagctggaggccatgctcctggggtggccaggaaggcctgccagatatttgtgagaaatctgccattcgatttcacatggaagatgctaaaggacaaattcaacgagtgcggccacgtgctgtacgccgacatcaagatggagaatgggaagtccaaggggtgtggtgtggttaagttcgagtcgccagaggtggccgagagagcctgccggatgatgaatggcatgaagctgagtggccgagagattgacgttcgaattgatagaaacgcttaagcagttgccttttttaaacatcgatacgagacctctgaatttgtattttttcttgttaaccattttaatttgttggctggatgtataaagatgtttaaaaaattcagttgctttttggggtaatttgaattacttttttaatgactggggttccatttgactgtttgcattgagattgcaatgtgcgcaattttttttgtagttgtggcatcttgttgacatcgaatatgactttgataataaataccggttcctgaaaa

SEQ ID NO: 299840 - DNA, 6909 bp, Homo sapiens
  misc_feature (2162)..(2162): n is a, c, g, or t
  misc_feature (2337)..(2337): n is a, c, g, or t
ccttcttgccgatcctcctctgagggtcccgccctctcgcgctgctcagtcccaaatgtctcctttgataagcacccataacacaggcccacctgctctgacagactcctctgcaggccttccctctccgctgactcattccctgagaaggaccactattcatcacccatctgcctcatcccaatgtctcctttggccacgctctctccataggaccctaccatgattctggagagtgcattttacatgcatgtcttttgatgtgaaatggcagtcacttaaagacctggttaaagaaaaagttggtgaggtaacatacgtggagctcttaatggacgctgaaggaaagtcaaggggatgtgctctgagagaatttcttctgtggatttactacatgaaaaatgtaactgtatggtggcgtggaatcgaatgaaatcaggaaggcagtgagtgctcatgttacagtagctatgtttgattttgccaaacatttgagtggggtgggaggggatttgcaaatgggagtcccgcttttccaaatggctggccaaagagctttttggtattctgtttggatgcccaatttggataactggggaccaatagcagcattgtctctttgttaacagaggaattggctgtgtgtgaattatgcatggaattttagcggtggtataattaatgtaaaacgtgtgttcttgtctagaaaatgttactcttggttgtttgctgaatttgaaagttgtgtgaaccaaagattccgaaaagttgcctttgtgccagtaaattgtaaaccaaatattaaaaacctgaatgttcaaaattggcctagtttaaagagaacataaactattttctgtcgtgcaatagaatggcttagaataatcaaaaggatgagcttaacttacggaagggatggatttaggaggaatatggtaaggactcgattgagtacagagggaagcagatctaaagttggtgtgatttcttggagaccctgaatttaggtctgcttattaaatgtcagcagctctagtgcaatgctggtaacgcgtaggagaaggagatattaaggagcccagcttttaacaaggaaggcgaggcgaggcacttctgtcagcttccccttagaagggttcattttaaaagactaactttgtgacataaatcatatttttagtttgtttataactgtcattggtatttactatttttttcttttctttttccccttccttgctcttctgactggtctctggcttcctccaaagggatgtgcgtaagtatcgtctagttacttattggtatttgagccttctaacttgtaggactggtttcactcgactcgtttccttttgactctatagtgttgttgaattcaagatggaagagagcatgaaaaaagctgcggaagtcctaaacaagcatagtctgagcggaagaccactgaaagtcaaagaagtaagctcttgcttaacactgcggatactgtgtgtaattgttgagtgatcctactttggaattagggaaagacggtcatggtcccagacggcatttacaaagcaagtgccagcctgttgtttctaatgaagagtgtcggtcatagcctacagcagccattccctgcaaggactttggggtggtggccaagcagatcctgagtggctgctgaccaccttctaatatctgtgatttgtctgaggccttgttgtctcagggactctcaaaccatgagcccgtgggtttgtgccattaagttttactccatctgacccttcttcttggcccatcttttttctttttttaaaaagtgagtttgttccagcctgggcaacatggtgaaaccccctctctacaaaaggtacaaaaattagccaggcatggtggcgcatgcctgtagtcctagctacttgggaggctgaggcaggaggatcatttgagcccaggatgtggaggttgcagtgagctgagattgcaccattgcactccagcccgggcaacagtgagaccctgtctaaaaaataaaaaataaagtgagtttgttattcctcaaacctgctttcacatctcatctgaatcaaatatattccttgaggaagaaggtttttttgttgattaaatccctcttggctgggcgcagtggctcacgcctgtaatccccngcactttgggaggctgaggtgggtggatcaaggtcatgagttcaagaccagcttgaccaacatggtgaaaccctgtctactaaaaatacaaaaaattagctgggcgtagtggggggtgcctgtaatccatctactcgggaggctgaggcaggagaatcgctggaacccaggaggnggaggttgcagtgagccgagatcgcgccattgaactccagcctgggcagtaagagcaaagctctgtctcaaaaaaacatccctcttaacttcttttcacctcttctcttggggaggaagatgagtagattcagagtgaagcttggtagggtctaaggtctctcatgtgttatgatgtcttttttagtgctgatggtggtaattgacaggacagagagttgaagaagagagtcagtacagagcttcacagaccttcccagatgttgttttactgcgcagccctcacacacacgcctccaacacctgaaggacttgaaggatgggggcgcttgtgtggtctagaactgtttctcaaacttctggaagccattgacggggtttgcagaagttacaaaaccccattgatgaattagtaagattcagctataccaagcccatgaagctctaatttcagtctggcggttctacattatatcagctaatcatgtttccctccctaccctgcttttcttttttacttagtgcaattgagagctgtgtttttagtgctacacttcatgccttttcttcctttcctatttctttagctggactcttctaagctggtagttgagttcatttgactttcttgttaatagatttgagagatgctttccaaacaacctttcagtttctaagtcttgagaatatcatttactgtgcaagcatggtttgcgttgtactgggtcagttaaacgtaacaccttttgtgcttgttttaggatcctgatggtgaacatgccaggagagcaatgcaaaaggtgatggctacgactggtgggatgggtatgggaccaggtggcccaggaatgattactatcccacccagtatcctaaataatcccaacatcccaaatgagattatccatgcattacaggctggaagacttggaagcacagtatttgtagcaaatgtaagtaaacagaaccatcgtctaaagtagaaaatcagaactttatgaaatgaccttgtcaatatgttataaaagtaattctcacatttgagaagaaaaatgtaaagaagggttttgttcttgatttctttaaaaatcagccttataggcgggctttgtctgcattcctaagtcacaggcttgaccgtggtctcgttggggctgtgattcctgagtttcgcaggtgtttccacaagcagtaaccgagtctgcattctccgttggtttattttatgcagttttggtgcagagtaagactgtacgagcagaagtgcactgacaccttcctcttgttgtgtctggggtgaatgataatacctccaccatctgcaaggggaaatatttagaataaagtaggttgggtggggtggggagtggtaaagcttatcagggaaacaattttttaaaaatgttcagaaaatgagtattaatttgaagtatgaggtgacttaagtttctgagaaaagagacaatatatttactataggtacagtttatttacagtgaaggccaggctttataatcctattttaaaatttccattgcagttgattagtttttgtgacattatttcctaatacttttttccaaccaaagcatgtatcattcatgtagtaaaaatgttgtgtttcttaagatgtttacattgaggtttttaccccgttctctctcgattagctggattataaagttggctggaagaaactgaaggaagtatttagtatggctggtgtggtggtccgagcagacattcttgaagataaagatggaaaaagtcgtggaataggcactgttacttttgaacagtccattgaagctgtgcaagctatatgtatccttctgcaggaattcaacttatgaacagtttgacctaaattgctgtgttagtaatgtaggtttgtgtgaggaagaggtgactgtgtgtattcatgttttttatgtgactagggggagtgcattactgtggaattaagaggttctctgggccggaccggtcacggtggctcacgcctgtaatcccagcacttcgggaggccaaggcgggcggatcacttgaggtcagttcgagaccagcctggccaacatggtgaaaccccggctctactaaaaaatgcaaaaattagctgggcgcagtggtgggtgcctgtaatcccagctactcgggaggctgaggcacaagaatcgcttgaacccgggaggtggaggttgcagtgagccgagattgcgccactgcacaccaccagcctgggtgatagagtgagactcagtctcaaaaaaaaaaaaaaaaaaaaaaaaaaaggttctctgggggtggaattgattcaatacagtgtggatagaggggatggttacaacatgggcatatgcccatgagtctttctactgttttcttttcagaagagtctaggtttgaaggaggaagtccaaagaatgtgctactagagagaaagtggggttgttgtttcatgtgtaatacatccttataggacctcactctttccagtgagtagacatcattttggagaggccacttctccttgaccctaggcttagcctagagtttttaatcccttggagagtaccccacaggagcacattcatacaactcagacaagaccgtcactgcatgtcttacccagaaaacatggtccttcagtttagatagtggtagatgcctggcccattggtcacattcagagaaccttgatgccactgcttaagaggatggtttggtgaaattgtaaggttacgaatgaagcttcacacctaaggaataagcagaagttgtcttgtcctccccgccagctttatttattgttccttttatgtttattgttgaaagtataatgaagaattgaaattgctcataaattcatcacttagagggactggtagcagttggagtatttttctttctttttgtatttctcttgtgcacatttttagaattgcaagaaatagccttaattgtaataccagctatgttcaatggccagctgctatttgatagaccaatgcacgtcaagatggatgagagggccttaccaaaaggagatttcttccctcctgagcgtccacaacaacttccccatggccttggtggtattggcatggggttaggaccaggagggcaacccattgatgccaatcacctgaataaaggcatcggaatgggaaacataggtcccgcaggaatgggaatggaaggcataggatttggaataaataaaatgggaggaatggaggggccctttggtggtggtatggaaaacatgggtcgatttggatctgggatgaacatgggcaggataaatgaaatcctaagtaatgcactgaagagaggagagatcattgcaaagcagggaggaggtggaggtggaggaagcgtccctgggatcgagaggatgggtcctggcattgaccgcctcgggggtgccggcatggagcgcatgggcgcgggcctgggccacggcatggatcgcgtgggctccgagatcgagcgcatgggcctggtcatggaccgcatgggctccgtggagcgcatgggctccggcattgagcgcatgggcccgctgggcctcgaccacatggcctccagcattgagcgcatggcgcatggccgctcccatcgaccgtgtgggccagaccattgagcgcatgggctctggcgtggagcgcatgggccctgccatcgagcgcatgggcctgagcatggagcgcatggtgcccgcaggtatgggagctggcctggagcgcatgggccccgtgatggatcgcatggccaccggcctggagcgcatgggcgccaacaatctggagcggatgggcctggagcgcatgggcgccaacagcctcgagcgcatgggcctggagcgcatgggtgccaacagcctcgagcgcatgggccccgccatgggcccggccctgggcgctggcattgagcgcatgggcctggccatgggtggcggtggcggtgccagctttgaccgtgccatcgagatggagcgtggcaacttcggaggaagcttcgcaggttcctttggtggagctggaggccatgctcctggggtggccaggaaggcctgccagatatttgtgagaaatctgccattcgatttcacatggaagatgctaaaggacaaattcaacgagtgcggccacgtgctgtacgccgacatcaagatggagaatgggaagtccaaggggtgtggtgtggttaagttcgagtcgccagaggtggccgagagagcctgccggatgatgaatggcatgaagctgagtggccgagagattgacgttcgaattgatagaaacgcttaagcagttgccttttttaaacatcgatacgagacctctgaatttgtattttttcttgttaaccattttaatttgttggctggatgtataaagatgtttaaaaaattcagttgctttttggggtaatttgaattacttttttaatgactggggttccatttgactgtttgcattgagattgcaatgtgcgcaattttttttgtagttgtggcatcttgttgacatcgaatatgactttgataataaataccggttcctgaaaa

SEQ ID NO: 299841 - DNA, 6884 bp, Homo sapiens
  misc_feature (2162)..(2162): n is a, c, g, or t
  misc_feature (2337)..(2337): n is a, c, g, or t
ccttcttgccgatcctcctctgagggtcccgccctctcgcgctgctcagtcccaaatgtctcctttgataagcacccataacacaggcccacctgctctgacagactcctctgcaggccttccctctccgctgactcattccctgagaaggaccactattcatcacccatctgcctcatcccaatgtctcctttggccacgctctctccataggaccctaccatgattctggagagtgcattttacatgcatgtcttttgatgtgaaatggcagtcacttaaagacctggttaaagaaaaagttggtgaggtaacatacgtggagctcttaatggacgctgaaggaaagtcaaggggatgtgctctgagagaatttcttctgtggatttactacatgaaaaatgtaactgtatggtggcgtggaatcgaatgaaatcaggaaggcagtgagtgctcatgttacagtagctatgtttgattttgccaaacatttgagtggggtgggaggggatttgcaaatgggagtcccgcttttccaaatggctggccaaagagctttttggtattctgtttggatgcccaatttggataactggggaccaatagcagcattgtctctttgttaacagaggaattggctgtgtgtgaattatgcatggaattttagcggtggtataattaatgtaaaacgtgtgttcttgtctagaaaatgttactcttggttgtttgctgaatttgaaagttgtgtgaaccaaagattccgaaaagttgcctttgtgccagtaaattgtaaaccaaatattaaaaacctgaatgttcaaaattggcctagtttaaagagaacataaactattttctgtcgtgcaatagaatggcttagaataatcaaaaggatgagcttaacttacggaagggatggatttaggaggaatatggtaaggactcgattgagtacagagggaagcagatctaaagttggtgtgatttcttggagaccctgaatttaggtctgcttattaaatgtcagcagctctagtgcaatgctggtaacgcgtaggagaaggagatattaaggagcccagcttttaacaaggaaggcgaggcgaggcacttctgtcagcttccccttagaagggttcattttaaaagactaactttgtgacataaatcatatttttagtttgtttataactgtcattggtatttactatttttttcttttctttttccccttccttgctcttctgactggtctctggcttcctccaaagggatgtgcgtaagtatcgtctagttacttattggtatttgagccttctaacttgtaggactggtttcactcgactcgtttccttttgactctatagtgttgttgaattcaagatggaagagagcatgaaaaaagctgcggaagtcctaaacaagcatagtctgagcggaagaccactgaaagtcaaagaagtaagctcttgcttaacactgcggatactgtgtgtaattgttgagtgatcctactttggaattagggaaagacggtcatggtcccagacggcatttacaaagcaagtgccagcctgttgtttctaatgaagagtgtcggtcatagcctacagcagccattccctgcaaggactttggggtggtggccaagcagatcctgagtggctgctgaccaccttctaatatctgtgatttgtctgaggccttgttgtctcagggactctcaaaccatgagcccgtgggtttgtgccattaagttttactccatctgacccttcttcttggcccatcttttttctttttttaaaaagtgagtttgttccagcctgggcaacatggtgaaaccccctctctacaaaaggtacaaaaattagccaggcatggtggcgcatgcctgtagtcctagctacttgggaggctgaggcaggaggatcatttgagcccaggatgtggaggttgcagtgagctgagattgcaccattgcactccagcccgggcaacagtgagaccctgtctaaaaaataaaaaataaagtgagtttgttattcctcaaacctgctttcacatctcatctgaatcaaatatattccttgaggaagaaggtttttttgttgattaaatccctcttggctgggcgcagtggctcacgcctgtaatccccngcactttgggaggctgaggtgggtggatcaaggtcatgagttcaagaccagcttgaccaacatggtgaaaccctgtctactaaaaatacaaaaaattagctgggcgtagtggggggtgcctgtaatccatctactcgggaggctgaggcaggagaatcgctggaacccaggaggnggaggttgcagtgagccgagatcgcgccattgaactccagcctgggcagtaagagcaaagctctgtctcaaaaaaacatccctcttaacttcttttcacctcttctcttggggaggaagatgagtagattcagagtgaagcttggtagggtctaaggtctctcatgtgttatgatgtcttttttagtgctgatggtggtaattgacaggacagagagttgaagaagagagtcagtacagagcttcacagaccttcccagatgttgttttactgcgcagccctcacacacacgcctccaacacctgaaggacttgaaggatgggggcgcttgtgtggtctagaactgtttctcaaacttctggaagccattgacggggtttgcagaagttacaaaaccccattgatgaattagtaagattcagctataccaagcccatgaagctctaatttcagtctggcggttctacattatatcagctaatcatgtttccctccctaccctgcttttcttttttacttagtgcaattgagagctgtgtttttagtgctacacttcatgccttttcttcctttcctatttctttagctggactcttctaagctggtagttgagttcatttgactttcttgttaatagatttgagagatgctttccaaacaacctttcagtttctaagtcttgagaatatcatttactgtgcaagcatggtttgcgttgtactgggtcagttaaacgtaacaccttttgtgcttgttttaggatcctgatggtgaacatgccaggagagcaatgcaaaaggtgatggctacgactggtgggatgggtatgggaccaggtggcccaggaatgattactatcccacccagtatcctaaataatcccaacatcccaaatgagattatccatgcattacaggctggaagacttggaagcacagtatttgtagcaaatgtaagtaaacagaaccatcgtctaaagtagaaaatcagaactttatgaaatgaccttgtcaatatgttataaaagtaattctcacatttgagaagaaaaatgtaaagaagggttttgttcttgatttctttaaaaatcagccttataggcgggctttgtctgcattcctaagtcacaggcttgaccgtggtctcgttggggctgtgattcctgagtttcgcaggtgtttccacaagcagtaaccgagtctgcattctccgttggtttattttatgcagttttggtgcagagtaagactgtacgagcagaagtgcactgacaccttcctcttgttgtgtctggggtgaatgataatacctccaccatctgcaaggggaaatatttagaataaagtaggttgggtggggtggggagtggtaaagcttatcagggaaacaattttttaaaaatgttcagaaaatgagtattaatttgaagtatgaggtgacttaagtttctgagaaaagagacaatatatttactataggtacagtttatttacagtgaaggccaggctttataatcctattttaaaatttccattgcagttgattagtttttgtgacattatttcctaatacttttttccaaccaaagcatgtatcattcatgtagtaaaaatgttgtgtttcttaagatgtttacattgaggtttttaccccgttctctctcgattagctggattataaagttggctggaagaaactgaaggaagtatttagtatggctggtgtggtggtccgagcagacattcttgaagataaagatggaaaaagtcgtggaataggcactgttacttttgaacagtccattgaagctgtgcaagctatatgtatccttctgcaggaattcaacttatgaacagtttgacctaaattgctgtgttagtaatgtaggtttgtgtgaggaagaggtgactgtgtgtattcatgttttttatgtgactagggggagtgcattactgtggaattaagaggttctctgggccggaccggtcacggtggctcacgcctgtaatcccagcacttcgggaggccaaggcgggcggatcacttgaggtcagttcgagaccagcctggccaacatggtgaaaccccggctctactaaaaaatgcaaaaattagctgggcgcagtggtgggtgcctgtaatcccagctactcgggaggctgaggcacaagaatcgcttgaacccgggaggtggaggttgcagtgagccgagattgcgccactgcacaccaccagcctgggtgatagagtgagactcagtctcaaaaaaaaaaaaaaaaaaaaaaaaaaaggttctctgggggtggaattgattcaatacagtgtggatagaggggatggttacaacatgggcatatgcccatgagtctttctactgttttcttttcagaagagtctaggtttgaaggaggaagtccaaagaatgtgctactagagagaaagtggggttgttgtttcatgtgtaatacatccttataggacctcactctttccagtgagtagacatcattttggagaggccacttctccttgaccctaggcttagcctagagtttttaatcccttggagagtaccccacaggagcacattcatacaactcagacaagaccgtcactgcatgtcttacccagaaaacatggtccttcagtttagatagtggtagatgcctggcccattggtcacattcagagaaccttgatgccactgcttaagaggatggtttggtgaaattgtaaggttacgaatgaagcttcacacctaaggaataagcagaagttgtcttgtcctccccgccagctttatttattgttccttttatgtttattgttgaaagtataatgaagaattgaaattgctcataaattcatcacttagagggactggtagcagttggagtatttttctttctttttgtatttctcttgtgcacatttttagaattgcaagaaatagccttaattgtaataccagctatgttcaatggccagctgctatttgatagaccaatgcacgtcaagatggatgagagggccttaccaaaaggagatttcttccctcctgagcgtccacaacaacttccccatggccttggtggtattggcatggggttaggaccaggagggcaacccattgatgccaatcacctgaataaaggcatcggaatgggaaacataggtcccgcaggaatgggaatggaaggcataggatttggaataaataaaatgggaggaatggaggggccctttggtggtggtatggaaaacatgggtcgatttggatctgggatgaacatgggcaggataaatggtggaggtggaggaagcgtccctgggatcgagaggatgggtcctggcattgaccgcctcgggggtgccggcatggagcgcatgggcgcgggcctgggccacggcatggatcgcgtgggctccgagatcgagcgcatgggcctggtcatggaccgcatgggctccgtggagcgcatgggctccggcattgagcgcatgggcccgctgggcctcgaccacatggcctccagcattgagcgcatgggccagaccatggagcgcattggctctggcgtggagcgcatgggtgccggcatgggcttcggccttgagcgcatggccgctcccatcgaccgtgtgggccagaccattgagcgcatgggctctggcgtggagcgcatgggccctgccatcgagcgcatgggcctgagcatggagcgcatggtgcccgcaggtatgggagctggcctggagcgcatgggccccgtgatggatcgcatggccaccggcctggagcgcatgggcgccaacagcctcgagcgcatgggcctggagcgcatgggtgccaacagcctcgagcgcatgggccccgccatgggcccggccctgggcgctggcattgagcgcatgggcctggccatgggtggcggtggcggtgccagctttgaccgtgccatcgagatggagcgtggcaacttcggaggaagcttcgcaggttcctttggtggagctggaggccatgctcctggggtggccaggaaggcctgccagatatttgtgagaaatctgccattcgatttcacatggaagatgctaaaggacaaattcaacgagtgcggccacgtgctgtacgccgacatcaagatggagaatgggaagtccaaggggtgtggtgtggttaagttcgagtcgccagaggtggccgagagagcctgccggatgatgaatggcatgaagctgagtggccgagagattgacgttcgaattgatagaaacgcttaagcagttgccttttttaaacatcgatacgagacctctgaatttgtattttttcttgttaaccattttaatttgttggctggatgtataaagatgtttaaaaaattcagttgctttttggggtaatttgaattacttttttaatgactggggttccatttgactgtttgcattgagattgcaatgtgcgcaattttttttgtagttgtggcatcttgttgacatcgaatatgactttgataataaataccggttcctgaaaa

SEQ ID NO: 299842 - DNA, 6884 bp, Homo sapiens
  misc_feature (2162)..(2162): n is a, c, g, or t
  misc_feature (2337)..(2337): n is a, c, g, or t
ccttcttgccgatcctcctctgagggtcccgccctctcgcgctgctcagtcccaaatgtctcctttgataagcacccataacacaggcccacctgctctgacagactcctctgcaggccttccctctccgctgactcattccctgagaaggaccactattcatcacccatctgcctcatcccaatgtctcctttggccacgctctctccataggaccctaccatgattctggagagtgcattttacatgcatgtcttttgatgtgaaatggcagtcacttaaagacctggttaaagaaaaagttggtgaggtaacatacgtggagctcttaatggacgctgaaggaaagtcaaggggatgtgctctgagagaatttcttctgtggatttactacatgaaaaatgtaactgtatggtggcgtggaatcgaatgaaatcaggaaggcagtgagtgctcatgttacagtagctatgtttgattttgccaaacatttgagtggggtgggaggggatttgcaaatgggagtcccgcttttccaaatggctggccaaagagctttttggtattctgtttggatgcccaatttggataactggggaccaatagcagcattgtctctttgttaacagaggaattggctgtgtgtgaattatgcatggaattttagcggtggtataattaatgtaaaacgtgtgttcttgtctagaaaatgttactcttggttgtttgctgaatttgaaagttgtgtgaaccaaagattccgaaaagttgcctttgtgccagtaaattgtaaaccaaatattaaaaacctgaatgttcaaaattggcctagtttaaagagaacataaactattttctgtcgtgcaatagaatggcttagaataatcaaaaggatgagcttaacttacggaagggatggatttaggaggaatatggtaaggactcgattgagtacagagggaagcagatctaaagttggtgtgatttcttggagaccctgaatttaggtctgcttattaaatgtcagcagctctagtgcaatgctggtaacgcgtaggagaaggagatattaaggagcccagcttttaacaaggaaggcgaggcgaggcacttctgtcagcttccccttagaagggttcattttaaaagactaactttgtgacataaatcatatttttagtttgtttataactgtcattggtatttactatttttttcttttctttttccccttccttgctcttctgactggtctctggcttcctccaaagggatgtgcgtaagtatcgtctagttacttattggtatttgagccttctaacttgtaggactggtttcactcgactcgtttccttttgactctatagtgttgttgaattcaagatggaagagagcatgaaaaaagctgcggaagtcctaaacaagcatagtctgagcggaagaccactgaaagtcaaagaagtaagctcttgcttaacactgcggatactgtgtgtaattgttgagtgatcctactttggaattagggaaagacggtcatggtcccagacggcatttacaaagcaagtgccagcctgttgtttctaatgaagagtgtcggtcatagcctacagcagccattccctgcaaggactttggggtggtggccaagcagatcctgagtggctgctgaccaccttctaatatctgtgatttgtctgaggccttgttgtctcagggactctcaaaccatgagcccgtgggtttgtgccattaagttttactccatctgacccttcttcttggcccatcttttttctttttttaaaaagtgagtttgttccagcctgggcaacatggtgaaaccccctctctacaaaaggtacaaaaattagccaggcatggtggcgcatgcctgtagtcctagctacttgggaggctgaggcaggaggatcatttgagcccaggatgtggaggttgcagtgagctgagattgcaccattgcactccagcccgggcaacagtgagaccctgtctaaaaaataaaaaataaagtgagtttgttattcctcaaacctgctttcacatctcatctgaatcaaatatattccttgaggaagaaggtttttttgttgattaaatccctcttggctgggcgcagtggctcacgcctgtaatccccngcactttgggaggctgaggtgggtggatcaaggtcatgagttcaagaccagcttgaccaacatggtgaaaccctgtctactaaaaatacaaaaaattagctgggcgtagtggggggtgcctgtaatccatctactcgggaggctgaggcaggagaatcgctggaacccaggaggnggaggttgcagtgagccgagatcgcgccattgaactccagcctgggcagtaagagcaaagctctgtctcaaaaaaacatccctcttaacttcttttcacctcttctcttggggaggaagatgagtagattcagagtgaagcttggtagggtctaaggtctctcatgtgttatgatgtcttttttagtgctgatggtggtaattgacaggacagagagttgaagaagagagtcagtacagagcttcacagaccttcccagatgttgttttactgcgcagccctcacacacacgcctccaacacctgaaggacttgaaggatgggggcgcttgtgtggtctagaactgtttctcaaacttctggaagccattgacggggtttgcagaagttacaaaaccccattgatgaattagtaagattcagctataccaagcccatgaagctctaatttcagtctggcggttctacattatatcagctaatcatgtttccctccctaccctgcttttcttttttacttagtgcaattgagagctgtgtttttagtgctacacttcatgccttttcttcctttcctatttctttagctggactcttctaagctggtagttgagttcatttgactttcttgttaatagatttgagagatgctttccaaacaacctttcagtttctaagtcttgagaatatcatttactgtgcaagcatggtttgcgttgtactgggtcagttaaacgtaacaccttttgtgcttgttttaggatcctgatggtgaacatgccaggagagcaatgcaaaaggtgatggctacgactggtgggatgggtatgggaccaggtggcccaggaatgattactatcccacccagtatcctaaataatcccaacatcccaaatgagattatccatgcattacaggctggaagacttggaagcacagtatttgtagcaaatgtaagtaaacagaaccatcgtctaaagtagaaaatcagaactttatgaaatgaccttgtcaatatgttataaaagtaattctcacatttgagaagaaaaatgtaaagaagggttttgttcttgatttctttaaaaatcagccttataggcgggctttgtctgcattcctaagtcacaggcttgaccgtggtctcgttggggctgtgattcctgagtttcgcaggtgtttccacaagcagtaaccgagtctgcattctccgttggtttattttatgcagttttggtgcagagtaagactgtacgagcagaagtgcactgacaccttcctcttgttgtgtctggggtgaatgataatacctccaccatctgcaaggggaaatatttagaataaagtaggttgggtggggtggggagtggtaaagcttatcagggaaacaattttttaaaaatgttcagaaaatgagtattaatttgaagtatgaggtgacttaagtttctgagaaaagagacaatatatttactataggtacagtttatttacagtgaaggccaggctttataatcctattttaaaatttccattgcagttgattagtttttgtgacattatttcctaatacttttttccaaccaaagcatgtatcattcatgtagtaaaaatgttgtgtttcttaagatgtttacattgaggtttttaccccgttctctctcgattagctggattataaagttggctggaagaaactgaaggaagtatttagtatggctggtgtggtggtccgagcagacattcttgaagataaagatggaaaaagtcgtggaataggcactgttacttttgaacagtccattgaagctgtgcaagctatatgtatccttctgcaggaattcaacttatgaacagtttgacctaaattgctgtgttagtaatgtaggtttgtgtgaggaagaggtgactgtgtgtattcatgttttttatgtgactagggggagtgcattactgtggaattaagaggttctctgggccggaccggtcacggtggctcacgcctgtaatcccagcacttcgggaggccaaggcgggcggatcacttgaggtcagttcgagaccagcctggccaacatggtgaaaccccggctctactaaaaaatgcaaaaattagctgggcgcagtggtgggtgcctgtaatcccagctactcgggaggctgaggcacaagaatcgcttgaacccgggaggtggaggttgcagtgagccgagattgcgccactgcacaccaccagcctgggtgatagagtgagactcagtctcaaaaaaaaaaaaaaaaaaaaaaaaaaaggttctctgggggtggaattgattcaatacagtgtggatagaggggatggttacaacatgggcatatgcccatgagtctttctactgttttcttttcagaagagtctaggtttgaaggaggaagtccaaagaatgtgctactagagagaaagtggggttgttgtttcatgtgtaatacatccttataggacctcactctttccagtgagtagacatcattttggagaggccacttctccttgaccctaggcttagcctagagtttttaatcccttggagagtaccccacaggagcacattcatacaactcagacaagaccgtcactgcatgtcttacccagaaaacatggtccttcagtttagatagtggtagatgcctggcccattggtcacattcagagaaccttgatgccactgcttaagaggatggtttggtgaaattgtaaggttacgaatgaagcttcacacctaaggaataagcagaagttgtcttgtcctccccgccagctttatttattgttccttttatgtttattgttgaaagtataatgaagaattgaaattgctcataaattcatcacttagagggactggtagcagttggagtatttttctttctttttgtatttctcttgtgcacatttttagaattgcaagaaatagccttaattgtaataccagctatgttcaatggccagctgctatttgatagaccaatgcacgtcaagatggatgagagggccttaccaaaaggagatttcttccctcctgagcgtccacaacaacttccccatggccttggtggtattggcatggggttaggaccaggagggcaacccattgatgccaatcacctgaataaaggcatcggaatgggaaacataggtcccgcaggaatgggaatggaaggcataggatttggaataaataaaatgggaggaatggaggggccctttggtggtggtatggaaaacatgggtcgatttggatctgggatgaacatgggcaggataaatgaaatcctaagtaatgcactgaagagaggagagatcattgcaaagcagggaggaggtggaggtggaggaagcgtccctgggatcgagaggatgggtcctggcattgaccgcctcgggggtgccggcatggagcgcatgggcgcgggcctgggccacggcatggatcgcgtgggctccgagatcgagcgcatgggcctggtcatggaccgcatgggctccgtggagcgcatgggctccggcattgagcgcatgggcccgctgggcctcgaccacatggcctccagcattgagcgcatgggccagaccatggagcgcattggctctggcgtggagcgcatgggtgccggcatgggcttcggccttgagcgcatggccgctcccatcgaccgtgtgggccagaccattgagcgcatgggctctggcgtggagcgcatgggccctgccatcgagcgcatgggcctgagcatggagcgcatggtgcccgcaggtatgggagctggcctggagcgcatgggccccgtgatggatcgcatggccaccggcctggagcgcatgggcgccaacaatctggagcggatgggcctggagcgcatgggcgccaacagcctcgagcgcatgggcctggagcgcatgggtgccagctttgaccgtgccatcgagatggagcgtggcaacttcggaggaagcttcgcaggttcctttggtggagctggaggccatgctcctggggtggccaggaaggcctgccagatatttgtgagaaatctgccattcgatttcacatggaagatgctaaaggacaaattcaacgagtgcggccacgtgctgtacgccgacatcaagatggagaatgggaagtccaaggggtgtggtgtggttaagttcgagtcgccagaggtggccgagagagcctgccggatgatgaatggcatgaagctgagtggccgagagattgacgttcgaattgatagaaacgcttaagcagttgccttttttaaacatcgatacgagacctctgaatttgtattttttcttgttaaccattttaatttgttggctggatgtataaagatgtttaaaaaattcagttgctttttggggtaatttgaattacttttttaatgactggggttccatttgactgtttgcattgagattgcaatgtgcgcaattttttttgtagttgtggcatcttgttgacatcgaatatgactttgataataaataccggttcctgaaaa

SEQ ID NO: 299843 - DNA, 7065 bp, Homo sapiens
  misc_feature (2162)..(2162): n is a, c, g, or t
  misc_feature (2337)..(2337): n is a, c, g, or t
ccttcttgccgatcctcctctgagggtcccgccctctcgcgctgctcagtcccaaatgtctcctttgataagcacccataacacaggcccacctgctctgacagactcctctgcaggccttccctctccgctgactcattccctgagaaggaccactattcatcacccatctgcctcatcccaatgtctcctttggccacgctctctccataggaccctaccatgattctggagagtgcattttacatgcatgtcttttgatgtgaaatggcagtcacttaaagacctggttaaagaaaaagttggtgaggtaacatacgtggagctcttaatggacgctgaaggaaagtcaaggggatgtgctctgagagaatttcttctgtggatttactacatgaaaaatgtaactgtatggtggcgtggaatcgaatgaaatcaggaaggcagtgagtgctcatgttacagtagctatgtttgattttgccaaacatttgagtggggtgggaggggatttgcaaatgggagtcccgcttttccaaatggctggccaaagagctttttggtattctgtttggatgcccaatttggataactggggaccaatagcagcattgtctctttgttaacagaggaattggctgtgtgtgaattatgcatggaattttagcggtggtataattaatgtaaaacgtgtgttcttgtctagaaaatgttactcttggttgtttgctgaatttgaaagttgtgtgaaccaaagattccgaaaagttgcctttgtgccagtaaattgtaaaccaaatattaaaaacctgaatgttcaaaattggcctagtttaaagagaacataaactattttctgtcgtgcaatagaatggcttagaataatcaaaaggatgagcttaacttacggaagggatggatttaggaggaatatggtaaggactcgattgagtacagagggaagcagatctaaagttggtgtgatttcttggagaccctgaatttaggtctgcttattaaatgtcagcagctctagtgcaatgctggtaacgcgtaggagaaggagatattaaggagcccagcttttaacaaggaaggcgaggcgaggcacttctgtcagcttccccttagaagggttcattttaaaagactaactttgtgacataaatcatatttttagtttgtttataactgtcattggtatttactatttttttcttttctttttccccttccttgctcttctgactggtctctggcttcctccaaagggatgtgcgtaagtatcgtctagttacttattggtatttgagccttctaacttgtaggactggtttcactcgactcgtttccttttgactctatagtgttgttgaattcaagatggaagagagcatgaaaaaagctgcggaagtcctaaacaagcatagtctgagcggaagaccactgaaagtcaaagaagtaagctcttgcttaacactgcggatactgtgtgtaattgttgagtgatcctactttggaattagggaaagacggtcatggtcccagacggcatttacaaagcaagtgccagcctgttgtttctaatgaagagtgtcggtcatagcctacagcagccattccctgcaaggactttggggtggtggccaagcagatcctgagtggctgctgaccaccttctaatatctgtgatttgtctgaggccttgttgtctcagggactctcaaaccatgagcccgtgggtttgtgccattaagttttactccatctgacccttcttcttggcccatcttttttctttttttaaaaagtgagtttgttccagcctgggcaacatggtgaaaccccctctctacaaaaggtacaaaaattagccaggcatggtggcgcatgcctgtagtcctagctacttgggaggctgaggcaggaggatcatttgagcccaggatgtggaggttgcagtgagctgagattgcaccattgcactccagcccgggcaacagtgagaccctgtctaaaaaataaaaaataaagtgagtttgttattcctcaaacctgctttcacatctcatctgaatcaaatatattccttgaggaagaaggtttttttgttgattaaatccctcttggctgggcgcagtggctcacgcctgtaatccccngcactttgggaggctgaggtgggtggatcaaggtcatgagttcaagaccagcttgaccaacatggtgaaaccctgtctactaaaaatacaaaaaattagctgggcgtagtggggggtgcctgtaatccatctactcgggaggctgaggcaggagaatcgctggaacccaggaggnggaggttgcagtgagccgagatcgcgccattgaactccagcctgggcagtaagagcaaagctctgtctcaaaaaaacatccctcttaacttcttttcacctcttctcttggggaggaagatgagtagattcagagtgaagcttggtagggtctaaggtctctcatgtgttatgatgtcttttttagtgctgatggtggtaattgacaggacagagagttgaagaagagagtcagtacagagcttcacagaccttcccagatgttgttttactgcgcagccctcacacacacgcctccaacacctgaaggacttgaaggatgggggcgcttgtgtggtctagaactgtttctcaaacttctggaagccattgacggggtttgcagaagttacaaaaccccattgatgaattagtaagattcagctataccaagcccatgaagctctaatttcagtctggcggttctacattatatcagctaatcatgtttccctccctaccctgcttttcttttttacttagtgcaattgagagctgtgtttttagtgctacacttcatgccttttcttcctttcctatttctttagctggactcttctaagctggtagttgagttcatttgactttcttgttaatagatttgagagatgctttccaaacaacctttcagtttctaagtcttgagaatatcatttactgtgcaagcatggtttgcgttgtactgggtcagttaaacgtaacaccttttgtgcttgttttaggatcctgatggtgaacatgccaggagagcaatgcaaaaggtgatggctacgactggtgggatgggtatgggaccaggtggcccaggaatgattactatcccacccagtatcctaaataatcccaacatcccaaatgagattatccatgcattacaggctggaagacttggaagcacagtatttgtagcaaatgtaagtaaacagaaccatcgtctaaagtagaaaatcagaactttatgaaatgaccttgtcaatatgttataaaagtaattctcacatttgagaagaaaaatgtaaagaagggttttgttcttgatttctttaaaaatcagccttataggcgggctttgtctgcattcctaagtcacaggcttgaccgtggtctcgttggggctgtgattcctgagtttcgcaggtgtttccacaagcagtaaccgagtctgcattctccgttggtttattttatgcagttttggtgcagagtaagactgtacgagcagaagtgcactgacaccttcctcttgttgtgtctggggtgaatgataatacctccaccatctgcaaggggaaatatttagaataaagtaggttgggtggggtggggagtggtaaagcttatcagggaaacaattttttaaaaatgttcagaaaatgagtattaatttgaagtatgaggtgacttaagtttctgagaaaagagacaatatatttactataggtacagtttatttacagtgaaggccaggctttataatcctattttaaaatttccattgcagttgattagtttttgtgacattatttcctaatacttttttccaaccaaagcatgtatcattcatgtagtaaaaatgttgtgtttcttaagatgtttacattgaggtttttaccccgttctctctcgattagctggattataaagttggctggaagaaactgaaggaagtatttagtatggctggtgtggtggtccgagcagacattcttgaagataaagatggaaaaagtcgtggaataggcactgttacttttgaacagtccattgaagctgtgcaagctatatgtatccttctgcaggaattcaacttatgaacagtttgacctaaattgctgtgttagtaatgtaggtttgtgtgaggaagaggtgactgtgtgtattcatgttttttatgtgactagggggagtgcattactgtggaattaagaggttctctgggccggaccggtcacggtggctcacgcctgtaatcccagcacttcgggaggccaaggcgggcggatcacttgaggtcagttcgagaccagcctggccaacatggtgaaaccccggctctactaaaaaatgcaaaaattagctgggcgcagtggtgggtgcctgtaatcccagctactcgggaggctgaggcacaagaatcgcttgaacccgggaggtggaggttgcagtgagccgagattgcgccactgcacaccaccagcctgggtgatagagtgagactcagtctcaaaaaaaaaaaaaaaaaaaaaaaaaaaggttctctgggggtggaattgattcaatacagtgtggatagaggggatggttacaacatgggcatatgcccatgagtctttctactgttttcttttcagaagagtctaggtttgaaggaggaagtccaaagaatgtgctactagagagaaagtggggttgttgtttcatgtgtaatacatccttataggacctcactctttccagtgagtagacatcattttggagaggccacttctccttgaccctaggcttagcctagagtttttaatcccttggagagtaccccacaggagcacattcatacaactcagacaagaccgtcactgcatgtcttacccagaaaacatggtccttcagtttagatagtggtagatgcctggcccattggtcacattcagagaaccttgatgccactgcttaagaggatggtttggtgaaattgtaaggttacgaatgaagcttcacacctaaggaataagcagaagttgtcttgtcctccccgccagctttatttattgttccttttatgtttattgttgaaagtataatgaagaattgaaattgctcataaattcatcacttagagggactggtagcagttggagtatttttctttctttttgtatttctcttgtgcacatttttagaattgcaagaaatagccttaattgtaataccagctatgttcaatggccagctgctatttgatagaccaatgcacgtcaagatggatgagagggccttaccaaaaggagatttcttccctcctgagcgtccacaacaacttccccatggccttggtggtattggcatggggttaggaccaggagggcaacccattgatgccaatcacctgaataaaggcatcggaatgggaaacataggtcccgcaggaatgggaatggaaggcataggatttggaataaataaaatgggaggaatggaggggccctttggtggtggtatggaaaacatgggtcgatttggatctgggatgaacatgggcaggataaatgaaatcctaagtaatgcactgaagagaggagagatcattgcaaagcagggaggaggtggaggtggaggaagcgtccctgggatcgagaggatgggtcctggcattgaccgcctcgggggtgccggcatggagcgcatgggcgcgggcctgggccacggcatggatcgcgtgggctccgagatcgagcgcatgggcctggtcatggaccgcatgggctccgtggagcgcatgggctccggcattgagcgcatgggcccgctgggcctcgaccacatggcctccagcattgagcgcatgggccagaccatggagcgcattggctctggcgtggagcgcatgggtgccggcatgggcttcggccttgagcgcatggccgctcccatcgaccgtgtgggccagaccattgagcgcatgggctctggcgtggagcgcatgggccctgccatcgagcgcatgggcctgagcatggagcgcatggtgcccgcaggtatgggagctggcctggagcgcatgggccccgtgatggatcgcatggccaccggcctggagcgcatgggcgccaacaatctggagcggatgggcctggagcgcatgggcgccaacagcctcgagcgcatgggcctggagcgcatgggtgccaacagcctcgagcgcatgggccccgccatgggcccggccctgggcgctggcattgagcgcatgggcctggccatgggtggcggtggcggtgccagctttgaccgtgccatcgagatggagcgtggcaacttcggaggaagcttcgcaggttcctttggtggagctggaggccatgctcctggggtggccaggaaggcctgccagatatttgtgagaaatctgccattcgatttcacatggaagatgctaaaggacaaattcaacgagtgcggccacgtgctgtacgccgacatcaagatggagaatgggaagtccaaggggtgtggtgtggttaagttcgagtcgccagaggtggccgagagagcctgccggatgatgaatggcatgaagctgagtggccgagagattgacgttcgaattgatagaaacgcttaagcagttgccttttttaaacatcgatacgagacctctgaatttgtattttttcttgttaaccattttaatttgttggctggatgtataaagatgtttaaaaaattcagttgctttttggggtaatttgaattacttttttaatgactggggttccatttgactgtttgcattgagattgcaatgtgcgcaattttttttgtagttgtggcatcttgttgacatcgaatatgactttgataataaataccggttcctgaaaaaaaaaaaagggggcggcaaaatatactcggggggcccagtagggtcccgcttttttacaaggggccagagaggggtaaaaaagagggg

SEQ ID NO: 299844 - DNA, 7308 bp, Homo sapiens
  misc_feature (2162)..(2162): n is a, c, g, or t
  misc_feature (2337)..(2337): n is a, c, g, or t
ccttcttgccgatcctcctctgagggtcccgccctctcgcgctgctcagtcccaaatgtctcctttgataagcacccataacacaggcccacctgctctgacagactcctctgcaggccttccctctccgctgactcattccctgagaaggaccactattcatcacccatctgcctcatcccaatgtctcctttggccacgctctctccataggaccctaccatgattctggagagtgcattttacatgcatgtcttttgatgtgaaatggcagtcacttaaagacctggttaaagaaaaagttggtgaggtaacatacgtggagctcttaatggacgctgaaggaaagtcaaggggatgtgctctgagagaatttcttctgtggatttactacatgaaaaatgtaactgtatggtggcgtggaatcgaatgaaatcaggaaggcagtgagtgctcatgttacagtagctatgtttgattttgccaaacatttgagtggggtgggaggggatttgcaaatgggagtcccgcttttccaaatggctggccaaagagctttttggtattctgtttggatgcccaatttggataactggggaccaatagcagcattgtctctttgttaacagaggaattggctgtgtgtgaattatgcatggaattttagcggtggtataattaatgtaaaacgtgtgttcttgtctagaaaatgttactcttggttgtttgctgaatttgaaagttgtgtgaaccaaagattccgaaaagttgcctttgtgccagtaaattgtaaaccaaatattaaaaacctgaatgttcaaaattggcctagtttaaagagaacataaactattttctgtcgtgcaatagaatggcttagaataatcaaaaggatgagcttaacttacggaagggatggatttaggaggaatatggtaaggactcgattgagtacagagggaagcagatctaaagttggtgtgatttcttggagaccctgaatttaggtctgcttattaaatgtcagcagctctagtgcaatgctggtaacgcgtaggagaaggagatattaaggagcccagcttttaacaaggaaggcgaggcgaggcacttctgtcagcttccccttagaagggttcattttaaaagactaactttgtgacataaatcatatttttagtttgtttataactgtcattggtatttactatttttttcttttctttttccccttccttgctcttctgactggtctctggcttcctccaaagggatgtgcgtaagtatcgtctagttacttattggtatttgagccttctaacttgtaggactggtttcactcgactcgtttccttttgactctatagtgttgttgaattcaagatggaagagagcatgaaaaaagctgcggaagtcctaaacaagcatagtctgagcggaagaccactgaaagtcaaagaagtaagctcttgcttaacactgcggatactgtgtgtaattgttgagtgatcctactttggaattagggaaagacggtcatggtcccagacggcatttacaaagcaagtgccagcctgttgtttctaatgaagagtgtcggtcatagcctacagcagccattccctgcaaggactttggggtggtggccaagcagatcctgagtggctgctgaccaccttctaatatctgtgatttgtctgaggccttgttgtctcagggactctcaaaccatgagcccgtgggtttgtgccattaagttttactccatctgacccttcttcttggcccatcttttttctttttttaaaaagtgagtttgttccagcctgggcaacatggtgaaaccccctctctacaaaaggtacaaaaattagccaggcatggtggcgcatgcctgtagtcctagctacttgggaggctgaggcaggaggatcatttgagcccaggatgtggaggttgcagtgagctgagattgcaccattgcactccagcccgggcaacagtgagaccctgtctaaaaaataaaaaataaagtgagtttgttattcctcaaacctgctttcacatctcatctgaatcaaatatattccttgaggaagaaggtttttttgttgattaaatccctcttggctgggcgcagtggctcacgcctgtaatccccngcactttgggaggctgaggtgggtggatcaaggtcatgagttcaagaccagcttgaccaacatggtgaaaccctgtctactaaaaatacaaaaaattagctgggcgtagtggggggtgcctgtaatccatctactcgggaggctgaggcaggagaatcgctggaacccaggaggnggaggttgcagtgagccgagatcgcgccattgaactccagcctgggcagtaagagcaaagctctgtctcaaaaaaacatccctcttaacttcttttcacctcttctcttggggaggaagatgagtagattcagagtgaagcttggtagggtctaaggtctctcatgtgttatgatgtcttttttagtgctgatggtggtaattgacaggacagagagttgaagaagagagtcagtacagagcttcacagaccttcccagatgttgttttactgcgcagccctcacacacacgcctccaacacctgaaggacttgaaggatgggggcgcttgtgtggtctagaactgtttctcaaacttctggaagccattgacggggtttgcagaagttacaaaaccccattgatgaattagtaagattcagctataccaagcccatgaagctctaatttcagtctggcggttctacattatatcagctaatcatgtttccctccctaccctgcttttcttttttacttagtgcaattgagagctgtgtttttagtgctacacttcatgccttttcttcctttcctatttctttagctggactcttctaagctggtagttgagttcatttgactttcttgttaatagatttgagagatgctttccaaacaacctttcagtttctaagtcttgagaatatcatttactgtgcaagcatggtttgcgttgtactgggtcagttaaacgtaacaccttttgtgcttgttttaggatcctgatggtgaacatgccaggagagcaatgcaaaaggtgatggctacgactggtgggatgggtatgggaccaggtggcccaggaatgattactatcccacccagtatcctaaataatcccaacatcccaaatgagattatccatgcattacaggctggaagacttggaagcacagtatttgtagcaaatgtaagtaaacagaaccatcgtctaaagtagaaaatcagaactttatgaaatgaccttgtcaatatgttataaaagtaattctcacatttgagaagaaaaatgtaaagaagggttttgttcttgatttctttaaaaatcagccttataggcgggctttgtctgcattcctaagtcacaggcttgaccgtggtctcgttggggctgtgattcctgagtttcgcaggtgtttccacaagcagtaaccgagtctgcattctccgttggtttattttatgcagttttggtgcagagtaagactgtacgagcagaagtgcactgacaccttcctcttgttgtgtctggggtgaatgataatacctccaccatctgcaaggggaaatatttagaataaagtaggttgggtggggtggggagtggtaaagcttatcagggaaacaattttttaaaaatgttcagaaaatgagtattaatttgaagtatgaggtgacttaagtttctgagaaaagagacaatatatttactataggtacagtttatttacagtgaaggccaggctttataatcctattttaaaatttccattgcagttgattagtttttgtgacattatttcctaatacttttttccaaccaaagcatgtatcattcatgtagtaaaaatgttgtgtttcttaagatgtttacattgaggtttttaccccgttctctctcgattagctggattataaagttggctggaagaaactgaaggaagtatttagtatggctggtgtggtggtccgagcagacattcttgaagataaagatggaaaaagtcgtggaataggcactgttacttttgaacagtccattgaagctgtgcaagctatatgtatccttctgcaggaattcaacttatgaacagtttgacctaaattgctgtgttagtaatgtaggtttgtgtgaggaagaggtgactgtgtgtattcatgttttttatgtgactagggggagtgcattactgtggaattaagaggttctctgggccggaccggtcacggtggctcacgcctgtaatcccagcacttcgggaggccaaggcgggcggatcacttgaggtcagttcgagaccagcctggccaacatggtgaaaccccggctctactaaaaaatgcaaaaattagctgggcgcagtggtgggtgcctgtaatcccagctactcgggaggctgaggcacaagaatcgcttgaacccgggaggtggaggttgcagtgagccgagattgcgccactgcacaccaccagcctgggtgatagagtgagactcagtctcaaaaaaaaaaaaaaaaaaaaaaaaaaaggttctctgggggtggaattgattcaatacagtgtggatagaggggatggttacaacatgggcatatgcccatgagtctttctactgttttcttttcagaagagtctaggtttgaaggaggaagtccaaagaatgtgctactagagagaaagtggggttgttgtttcatgtgtaatacatccttataggacctcactctttccagtgagtagacatcattttggagaggccacttctccttgaccctaggcttagcctagagtttttaatcccttggagagtaccccacaggagcacattcatacaactcagacaagaccgtcactgcatgtcttacccagaaaacatggtccttcagtttagatagtggtagatgcctggcccattggtcacattcagagaaccttgatgccactgcttaagaggatggtttggtgaaattgtaaggttacgaatgaagcttcacacctaaggaataagcagaagttgtcttgtcctccccgccagctttatttattgttccttttatgtttattgttgaaagtataatgaagaattgaaattgctcataaattcatcacttagagggactggtagcagttggagtatttttctttctttttgtatttctcttgtgcacatttttagaattgcaagaaatagccttaattgtaataccagctatgttcaatggccagctgctatttgatagaccaatgcacgtcaagatggatgagagggccttaccaaaaggagatttcttccctcctgagcgtccacaacaacttccccatggccttggtggtattggcatggggttaggaccaggagggcaacccattgatgccaatcacctgaataaaggcatcggaatgggaaacataggtcccgcaggaatgggaatggaaggcataggatttggaataaataaaatgggaggaatggaggggccctttggtggtggtatggaaaacatgggtcgatttggatctgggatgaacatgggcaggataaatgaaatcctaagtaatgcactgaagagaggagagatcattgcaaagcagggaggaggtggaggtggaggaagcgtccctgggatcgagaggatgggtcctggcattgaccgcctcgggggtgccggcatggagcgcatgggcgcgggcctgggccacggcatggatcgcgtgggctccgagatcgagcgcatgggcctggtcatggaccgcatgggctccgtggagcgcatgggctccggcattgagcgcatgggcccgctgggcctcgaccacatggcctccagcattgagcgcatgggccagaccatggagcgcattggctctggcgtggagcgcatgggtgccggcatgggcttcggccttgagcgcatggccgctcccatcgaccgtgtgggccagaccattgagcgcatgggctctggcgtggagcgcatgggccctgccatcgagcgcatgggcctgagcatggagcgcatggtgcccgcaggtatgggagctggcctggagcgcatgggccccgtgatggatcgcatggccaccggcctggagcgcatgggcgccaacaatctggagcggatgggcctggagcgcatgggcgccaacagcctcgagcgcatgggcctggagcgcatgggtgccaacagcctcgagcgcatgggccccgccatgggcccggccctgggcgctggcattgagcgcatgggcctggccatgggtggcggtggcggtgccagctttgaccgtgccatcgagatggagcgtggcaacttcggaggaagcttcgcaggttcctttggtggagctggaggccatgctcctggggtggccaggaaggcctgccagatatttgtgagaaatctgccattcgatttcacatggaagatgctaaaggacaaattcaacgagtgcggccacgtgctgtacgccgacatcaagatggagaatgggaagtccaaggggtgtggtgtggttaagttcgagtcgccagaggtggccgagagagcctgccggatgatgaatggcatgaagctgagtggccgagagattgacgttcgaattgatagaaacgcttaagcagttgccttttttaaacatcgatacgagacctctgaatttgtattttttcttgttaaccattttaatttgttggctggatgtataaagatgtttaaaaaattcagttgctttttggggtaatttgaattacttttttaatgactggggttccatttgactgtttgcattgagattgcaatgtgcgcaattttttttgtagttgtggcatcttgttgacatcgaatatgactttgataataaataccggttcctgaaaacaaaaaaaacaaaagggggagcaggcacaaagaagaatacccactaggggtgacacaacacaaacgagcaccacaaatacaacggcaaacaggtcgcccccaaataggcaaccagaccataaaagcaagacactgacgcggcgacaaaacacacgcaggatggagcgaaacacggaagctggacaatatggagcagacacaacacactgggggggagaccacagggcgacacacgagagagaaagagcacaggaacgatcaataacgcgaaggtgcccccagctaacggacacaaaacaagaggaagacaacctacccgagatcatagcgc

SEQ ID NO: 299845 - DNA, 7168 bp, Homo sapiens
  misc_feature (2162)..(2162): n is a, c, g, or t
  misc_feature (2337)..(2337): n is a, c, g, or t
ccttcttgccgatcctcctctgagggtcccgccctctcgcgctgctcagtcccaaatgtctcctttgataagcacccataacacaggcccacctgctctgacagactcctctgcaggccttccctctccgctgactcattccctgagaaggaccactattcatcacccatctgcctcatcccaatgtctcctttggccacgctctctccataggaccctaccatgattctggagagtgcattttacatgcatgtcttttgatgtgaaatggcagtcacttaaagacctggttaaagaaaaagttggtgaggtaacatacgtggagctcttaatggacgctgaaggaaagtcaaggggatgtgctctgagagaatttcttctgtggatttactacatgaaaaatgtaactgtatggtggcgtggaatcgaatgaaatcaggaaggcagtgagtgctcatgttacagtagctatgtttgattttgccaaacatttgagtggggtgggaggggatttgcaaatgggagtcccgcttttccaaatggctggccaaagagctttttggtattctgtttggatgcccaatttggataactggggaccaatagcagcattgtctctttgttaacagaggaattggctgtgtgtgaattatgcatggaattttagcggtggtataattaatgtaaaacgtgtgttcttgtctagaaaatgttactcttggttgtttgctgaatttgaaagttgtgtgaaccaaagattccgaaaagttgcctttgtgccagtaaattgtaaaccaaatattaaaaacctgaatgttcaaaattggcctagtttaaagagaacataaactattttctgtcgtgcaatagaatggcttagaataatcaaaaggatgagcttaacttacggaagggatggatttaggaggaatatggtaaggactcgattgagtacagagggaagcagatctaaagttggtgtgatttcttggagaccctgaatttaggtctgcttattaaatgtcagcagctctagtgcaatgctggtaacgcgtaggagaaggagatattaaggagcccagcttttaacaaggaaggcgaggcgaggcacttctgtcagcttccccttagaagggttcattttaaaagactaactttgtgacataaatcatatttttagtttgtttataactgtcattggtatttactatttttttcttttctttttccccttccttgctcttctgactggtctctggcttcctccaaagggatgtgcgtaagtatcgtctagttacttattggtatttgagccttctaacttgtaggactggtttcactcgactcgtttccttttgactctatagtgttgttgaattcaagatggaagagagcatgaaaaaagctgcggaagtcctaaacaagcatagtctgagcggaagaccactgaaagtcaaagaagtaagctcttgcttaacactgcggatactgtgtgtaattgttgagtgatcctactttggaattagggaaagacggtcatggtcccagacggcatttacaaagcaagtgccagcctgttgtttctaatgaagagtgtcggtcatagcctacagcagccattccctgcaaggactttggggtggtggccaagcagatcctgagtggctgctgaccaccttctaatatctgtgatttgtctgaggccttgttgtctcagggactctcaaaccatgagcccgtgggtttgtgccattaagttttactccatctgacccttcttcttggcccatcttttttctttttttaaaaagtgagtttgttccagcctgggcaacatggtgaaaccccctctctacaaaaggtacaaaaattagccaggcatggtggcgcatgcctgtagtcctagctacttgggaggctgaggcaggaggatcatttgagcccaggatgtggaggttgcagtgagctgagattgcaccattgcactccagcccgggcaacagtgagaccctgtctaaaaaataaaaaataaagtgagtttgttattcctcaaacctgctttcacatctcatctgaatcaaatatattccttgaggaagaaggtttttttgttgattaaatccctcttggctgggcgcagtggctcacgcctgtaatccccngcactttgggaggctgaggtgggtggatcaaggtcatgagttcaagaccagcttgaccaacatggtgaaaccctgtctactaaaaatacaaaaaattagctgggcgtagtggggggtgcctgtaatccatctactcgggaggctgaggcaggagaatcgctggaacccaggaggnggaggttgcagtgagccgagatcgcgccattgaactccagcctgggcagtaagagcaaagctctgtctcaaaaaaacatccctcttaacttcttttcacctcttctcttggggaggaagatgagtagattcagagtgaagcttggtagggtctaaggtctctcatgtgttatgatgtcttttttagtgctgatggtggtaattgacaggacagagagttgaagaagagagtcagtacagagcttcacagaccttcccagatgttgttttactgcgcagccctcacacacacgcctccaacacctgaaggacttgaaggatgggggcgcttgtgtggtctagaactgtttctcaaacttctggaagccattgacggggtttgcagaagttacaaaaccccattgatgaattagtaagattcagctataccaagcccatgaagctctaatttcagtctggcggttctacattatatcagctaatcatgtttccctccctaccctgcttttcttttttacttagtgcaattgagagctgtgtttttagtgctacacttcatgccttttcttcctttcctatttctttagctggactcttctaagctggtagttgagttcatttgactttcttgttaatagatttgagagatgctttccaaacaacctttcagtttctaagtcttgagaatatcatttactgtgcaagcatggtttgcgttgtactgggtcagttaaacgtaacaccttttgtgcttgttttaggatcctgatggtgaacatgccaggagagcaatgcaaaaggtgatggctacgactggtgggatgggtatgggaccaggtggcccaggaatgattactatcccacccagtatcctaaataatcccaacatcccaaatgagattatccatgcattacaggctggaagacttggaagcacagtatttgtagcaaatgtaagtaaacagaaccatcgtctaaagtagaaaatcagaactttatgaaatgaccttgtcaatatgttataaaagtaattctcacatttgagaagaaaaatgtaaagaagggttttgttcttgatttctttaaaaatcagccttataggcgggctttgtctgcattcctaagtcacaggcttgaccgtggtctcgttggggctgtgattcctgagtttcgcaggtgtttccacaagcagtaaccgagtctgcattctccgttggtttattttatgcagttttggtgcagagtaagactgtacgagcagaagtgcactgacaccttcctcttgttgtgtctggggtgaatgataatacctccaccatctgcaaggggaaatatttagaataaagtaggttgggtggggtggggagtggtaaagcttatcagggaaacaattttttaaaaatgttcagaaaatgagtattaatttgaagtatgaggtgacttaagtttctgagaaaagagacaatatatttactataggtacagtttatttacagtgaaggccaggctttataatcctattttaaaatttccattgcagttgattagtttttgtgacattatttcctaatacttttttccaaccaaagcatgtatcattcatgtagtaaaaatgttgtgtttcttaagatgtttacattgaggtttttaccccgttctctctcgattagctggattataaagttggctggaagaaactgaaggaagtatttagtatggctggtgtggtggtccgagcagacattcttgaagataaagatggaaaaagtcgtggaataggcactgttacttttgaacagtccattgaagctgtgcaagctatatgtatccttctgcaggaattcaacttatgaacagtttgacctaaattgctgtgttagtaatgtaggtttgtgtgaggaagaggtgactgtgtgtattcatgttttttatgtgactagggggagtgcattactgtggaattaagaggttctctgggccggaccggtcacggtggctcacgcctgtaatcccagcacttcgggaggccaaggcgggcggatcacttgaggtcagttcgagaccagcctggccaacatggtgaaaccccggctctactaaaaaatgcaaaaattagctgggcgcagtggtgggtgcctgtaatcccagctactcgggaggctgaggcacaagaatcgcttgaacccgggaggtggaggttgcagtgagccgagattgcgccactgcacaccaccagcctgggtgatagagtgagactcagtctcaaaaaaaaaaaaaaaaaaaaaaaaaaaggttctctgggggtggaattgattcaatacagtgtggatagaggggatggttacaacatgggcatatgcccatgagtctttctactgttttcttttcagaagagtctaggtttgaaggaggaagtccaaagaatgtgctactagagagaaagtggggttgttgtttcatgtgtaatacatccttataggacctcactctttccagtgagtagacatcattttggagaggccacttctccttgaccctaggcttagcctagagtttttaatcccttggagagtaccccacaggagcacattcatacaactcagacaagaccgtcactgcatgtcttacccagaaaacatggtccttcagtttagatagtggtagatgcctggcccattggtcacattcagagaaccttgatgccactgcttaagaggatggtttggtgaaattgtaaggttacgaatgaagcttcacacctaaggaataagcagaagttgtcttgtcctccccgccagctttatttattgttccttttatgtttattgttgaaagtataatgaagaattgaaattgctcataaattcatcacttagagggactggtagcagttggagtatttttctttctttttgtatttctcttgtgcacatttttagaattgcaagaaatagccttaattgtaataccagctatgttcaatggccagctgctatttgatagaccaatgcacgtcaagatggatgagagggccttaccaaaaggagatttcttccctcctgagcgtccacaacaacttccccatggccttggtggtattggcatggggttaggaccaggagggcaacccattgatgccaatcacctgaataaaggcatcggaatgggaaacataggtcccgcaggaatgggaatggaaggcataggatttggaataaataaaatgggaggaatggaggggccctttggtggtggtatggaaaacatgggtcgatttggatctgggatgaacatgggcaggataaatgaaatcctaagtaatgcactgaagagaggagagatcattgcaaagcagggaggaggtggaggtggaggaagcgtccctgggatcgagaggatgggtcctggcattgaccgcctcgggggtgccggcatggagcgcatgggcgcgggcctgggccacggcatggatcgcgtgggctccgagatcgagcgcatgggcctggtcatggaccgcatgggctccgtggagcgcatgggctccggcattgagcgcatgggcccgctgggcctcgaccacatggcctccagcattgagcgcatgggccagaccatggagcgcattggctctggcgtggagcgcatgggtgccggcatgggcttcggccttgagcgcatggccgctcccatcgaccgtgtgggccagaccattgagcgcatgggctctggcgtggagcgcatgggccctgccatcgagcgcatgggcctgagcatggagcgcatggtgcccgcaggtatgggagctggcctggagcgcatgggccccgtgatggatcgcatggccaccggcctggagcgcatgggcgccaacaatctggagcggatgggcctggagcgcatgggcgccaacagcctcgagcgcatgggcctggagcgcatgggtgccaacagcctcgagcgcatgggccccgccatgggcccggccctgggcgctggcattgagcgcatgggcctggccatgggtggcggtggcggtgccagctttgaccgtgccatcgagatggagcgtggcaacttcggaggaagcttcgcaggttcctttggtggagctggaggccatgctcctggggtggccaggaaggcctgccagatatttgtgagaaatctgccattcgatttcacatggaagatgctaaaggacaaattcaacgagtgcggccacgtgctgtacgccgacatcaagatggagaatgggaagtccaaggggtgtggtgtggttaagttcgagtcgccagaggtggccgagagagcctgccggatgatgaatggcatgaagctgagtggccgagagattgacgttcgaattgatagaaacgcttaagcagttgccttttttaaacatcgatacgagacctctgaatttgtattttttcttgttaaccattttaatttgttggctggatgtataaagatgtttaaaaaattcagttgctttttggggtaatttgaattacttttttaatgactggggttccatttgactgtttgcattgagattgcaatgtgcgcaattttttttgtagttgtggcatcttgttgacatcgaatatgactttgataataaataccggttcctgaaaaaaaaaaaaaatactcacgcgactcatacgctatgcggtcgacgaacaccaaggtactcaaacgggacccatggggcaaaaatcggggtcccatgaaccaacattcttctggtcacacgtggtgaaaattctgccggacacccctattgataagtcgaacaacttacgaaaaagcggagtacccgtctcaaa

SEQ ID NO: 299846 - DNA, 7290 bp, Homo sapiens
  misc_feature (2162)..(2162): n is a, c, g, or t
  misc_feature (2337)..(2337): n is a, c, g, or t
ccttcttgccgatcctcctctgagggtcccgccctctcgcgctgctcagtcccaaatgtctcctttgataagcacccataacacaggcccacctgctctgacagactcctctgcaggccttccctctccgctgactcattccctgagaaggaccactattcatcacccatctgcctcatcccaatgtctcctttggccacgctctctccataggaccctaccatgattctggagagtgcattttacatgcatgtcttttgatgtgaaatggcagtcacttaaagacctggttaaagaaaaagttggtgaggtaacatacgtggagctcttaatggacgctgaaggaaagtcaaggggatgtgctctgagagaatttcttctgtggatttactacatgaaaaatgtaactgtatggtggcgtggaatcgaatgaaatcaggaaggcagtgagtgctcatgttacagtagctatgtttgattttgccaaacatttgagtggggtgggaggggatttgcaaatgggagtcccgcttttccaaatggctggccaaagagctttttggtattctgtttggatgcccaatttggataactggggaccaatagcagcattgtctctttgttaacagaggaattggctgtgtgtgaattatgcatggaattttagcggtggtataattaatgtaaaacgtgtgttcttgtctagaaaatgttactcttggttgtttgctgaatttgaaagttgtgtgaaccaaagattccgaaaagttgcctttgtgccagtaaattgtaaaccaaatattaaaaacctgaatgttcaaaattggcctagtttaaagagaacataaactattttctgtcgtgcaatagaatggcttagaataatcaaaaggatgagcttaacttacggaagggatggatttaggaggaatatggtaaggactcgattgagtacagagggaagcagatctaaagttggtgtgatttcttggagaccctgaatttaggtctgcttattaaatgtcagcagctctagtgcaatgctggtaacgcgtaggagaaggagatattaaggagcccagcttttaacaaggaaggcgaggcgaggcacttctgtcagcttccccttagaagggttcattttaaaagactaactttgtgacataaatcatatttttagtttgtttataactgtcattggtatttactatttttttcttttctttttccccttccttgctcttctgactggtctctggcttcctccaaagggatgtgcgtaagtatcgtctagttacttattggtatttgagccttctaacttgtaggactggtttcactcgactcgtttccttttgactctatagtgttgttgaattcaagatggaagagagcatgaaaaaagctgcggaagtcctaaacaagcatagtctgagcggaagaccactgaaagtcaaagaagtaagctcttgcttaacactgcggatactgtgtgtaattgttgagtgatcctactttggaattagggaaagacggtcatggtcccagacggcatttacaaagcaagtgccagcctgttgtttctaatgaagagtgtcggtcatagcctacagcagccattccctgcaaggactttggggtggtggccaagcagatcctgagtggctgctgaccaccttctaatatctgtgatttgtctgaggccttgttgtctcagggactctcaaaccatgagcccgtgggtttgtgccattaagttttactccatctgacccttcttcttggcccatcttttttctttttttaaaaagtgagtttgttccagcctgggcaacatggtgaaaccccctctctacaaaaggtacaaaaattagccaggcatggtggcgcatgcctgtagtcctagctacttgggaggctgaggcaggaggatcatttgagcccaggatgtggaggttgcagtgagctgagattgcaccattgcactccagcccgggcaacagtgagaccctgtctaaaaaataaaaaataaagtgagtttgttattcctcaaacctgctttcacatctcatctgaatcaaatatattccttgaggaagaaggtttttttgttgattaaatccctcttggctgggcgcagtggctcacgcctgtaatccccngcactttgggaggctgaggtgggtggatcaaggtcatgagttcaagaccagcttgaccaacatggtgaaaccctgtctactaaaaatacaaaaaattagctgggcgtagtggggggtgcctgtaatccatctactcgggaggctgaggcaggagaatcgctggaacccaggaggnggaggttgcagtgagccgagatcgcgccattgaactccagcctgggcagtaagagcaaagctctgtctcaaaaaaacatccctcttaacttcttttcacctcttctcttggggaggaagatgagtagattcagagtgaagcttggtagggtctaaggtctctcatgtgttatgatgtcttttttagtgctgatggtggtaattgacaggacagagagttgaagaagagagtcagtacagagcttcacagaccttcccagatgttgttttactgcgcagccctcacacacacgcctccaacacctgaaggacttgaaggatgggggcgcttgtgtggtctagaactgtttctcaaacttctggaagccattgacggggtttgcagaagttacaaaaccccattgatgaattagtaagattcagctataccaagcccatgaagctctaatttcagtctggcggttctacattatatcagctaatcatgtttccctccctaccctgcttttcttttttacttagtgcaattgagagctgtgtttttagtgctacacttcatgccttttcttcctttcctatttctttagctggactcttctaagctggtagttgagttcatttgactttcttgttaatagatttgagagatgctttccaaacaacctttcagtttctaagtcttgagaatatcatttactgtgcaagcatggtttgcgttgtactgggtcagttaaacgtaacaccttttgtgcttgttttaggatcctgatggtgaacatgccaggagagcaatgcaaaaggtgatggctacgactggtgggatgggtatgggaccaggtggcccaggaatgattactatcccacccagtatcctaaataatcccaacatcccaaatgagattatccatgcattacaggctggaagacttggaagcacagtatttgtagcaaatgtaagtaaacagaaccatcgtctaaagtagaaaatcagaactttatgaaatgaccttgtcaatatgttataaaagtaattctcacatttgagaagaaaaatgtaaagaagggttttgttcttgatttctttaaaaatcagccttataggcgggctttgtctgcattcctaagtcacaggcttgaccgtggtctcgttggggctgtgattcctgagtttcgcaggtgtttccacaagcagtaaccgagtctgcattctccgttggtttattttatgcagttttggtgcagagtaagactgtacgagcagaagtgcactgacaccttcctcttgttgtgtctggggtgaatgataatacctccaccatctgcaaggggaaatatttagaataaagtaggttgggtggggtggggagtggtaaagcttatcagggaaacaattttttaaaaatgttcagaaaatgagtattaatttgaagtatgaggtgacttaagtttctgagaaaagagacaatatatttactataggtacagtttatttacagtgaaggccaggctttataatcctattttaaaatttccattgcagttgattagtttttgtgacattatttcctaatacttttttccaaccaaagcatgtatcattcatgtagtaaaaatgttgtgtttcttaagatgtttacattgaggtttttaccccgttctctctcgattagctggattataaagttggctggaagaaactgaaggaagtatttagtatggctggtgtggtggtccgagcagacattcttgaagataaagatggaaaaagtcgtggaataggcactgttacttttgaacagtccattgaagctgtgcaagctatatgtatccttctgcaggaattcaacttatgaacagtttgacctaaattgctgtgttagtaatgtaggtttgtgtgaggaagaggtgactgtgtgtattcatgttttttatgtgactagggggagtgcattactgtggaattaagaggttctctgggccggaccggtcacggtggctcacgcctgtaatcccagcacttcgggaggccaaggcgggcggatcacttgaggtcagttcgagaccagcctggccaacatggtgaaaccccggctctactaaaaaatgcaaaaattagctgggcgcagtggtgggtgcctgtaatcccagctactcgggaggctgaggcacaagaatcgcttgaacccgggaggtggaggttgcagtgagccgagattgcgccactgcacaccaccagcctgggtgatagagtgagactcagtctcaaaaaaaaaaaaaaaaaaaaaaaaaaaggttctctgggggtggaattgattcaatacagtgtggatagaggggatggttacaacatgggcatatgcccatgagtctttctactgttttcttttcagaagagtctaggtttgaaggaggaagtccaaagaatgtgctactagagagaaagtggggttgttgtttcatgtgtaatacatccttataggacctcactctttccagtgagtagacatcattttggagaggccacttctccttgaccctaggcttagcctagagtttttaatcccttggagagtaccccacaggagcacattcatacaactcagacaagaccgtcactgcatgtcttacccagaaaacatggtccttcagtttagatagtggtagatgcctggcccattggtcacattcagagaaccttgatgccactgcttaagaggatggtttggtgaaattgtaaggttacgaatgaagcttcacacctaaggaataagcagaagttgtcttgtcctccccgccagctttatttattgttccttttatgtttattgttgaaagtataatgaagaattgaaattgctcataaattcatcacttagagggactggtagcagttggagtatttttctttctttttgtatttctcttgtgcacatttttagaattgcaagaaatagccttaattgtaataccagctatgttcaatggccagctgctatttgatagaccaatgcacgtcaagatggatgagagggccttaccaaaaggagatttcttccctcctgagcgtccacaacaacttccccatggccttggtggtattggcatggggttaggaccaggagggcaacccattgatgccaatcacctgaataaaggcatcggaatgggaaacataggtcccgcaggaatgggaatggaaggcataggatttggaataaataaaatgggaggaatggaggggccctttggtggtggtatggaaaacatgggtcgatttggatctgggatgaacatgggcaggataaatgaaatcctaagtaatgcactgaagagaggagagatcattgcaaagcagggaggaggtggaggtggaggaagcgtccctgggatcgagaggatgggtcctggcattgaccgcctcgggggtgccggcatggagcgcatgggcgcgggcctgggccacggcatggatcgcgtgggctccgagatcgagcgcatgggcctggtcatggaccgcatgggctccgtggagcgcatgggctccggcattgagcgcatgggcccgctgggcctcgaccacatggcctccagcattgagcgcatgggccagaccatggagcgcattggctctggcgtggagcgcatgggtgccggcatgggcttcggccttgagcgcatggccgctcccatcgaccgtgtgggccagaccattgagcgcatgggctctggcgtggagcgcatgggccctgccatcgagcgcatgggcctgagcatggagcgcatggtgcccgcaggtatgggagctggcctggagcgcatgggccccgtgatggatcgcatggccaccggcctggagcgcatgggcgccaacaatctggagcggatgggcctggagcgcatgggcgccaacagcctcgagcgcatgggcctggagcgcatgggtgccaacagcctcgagcgcatgggccccgccatgggcccggccctgggcgctggcattgagcgcatgggcctggccatgggtggcggtggcggtgccagctttgaccgtgccatcgagatggagcgtggcaacttcggaggaagcttcgcaggttcctttggtggagctggaggccatgctcctggggtggccaggaaggcctgccagatatttgtgagaaatctgccattcgatttcacatggaagatgctaaaggacaaattcaacgagtgcggccacgtgctgtacgccgacatcaagatggagaatgggaagtccaaggggtgtggtgtggttaagttcgagtcgccagaggtggccgagagagcctgccggatgatgaatggcatgaagctgagtggccgagagattgacgttcgaattgatagaaacgcttaagcagttgccttttttaaacatcgatacgagacctctgaatttgtattttttcttgttaaccattttaatttgttggctggatgtataaagatgtttaaaaaattcagttgctttttggggtaatttgaattacttttttaatgactggggttccatttgactgtttgcattgagattgcaatgtgcgcaattttttttgtagttgtggcatcttgttgacatcgaatatgactttgataataaataccggttcctgaaaaaaacacggacaagacaccacccaccacagagacgacagacaaaaacaggacccaaagagaacagcccagcgaccaacgccaaacaaacactactgcaaaaaaaggagcccacaaaagggcacagcctctaacccgcacaaacgatggcaggacgtaaacaagccacacaacggcacacaccgcccacccgcccatccgagacacaacccaaacgaggcaggcgagaacgggcaacacgcacagagagaaaggcagggacaacacaccagagcaacaagcgacacaccaatcaacaggaaaaggcgagccagta

SEQ ID NO: 299847 - DNA, 7122 bp, Homo sapiens
  misc_feature (2162)..(2162): n is a, c, g, or t
  misc_feature (2337)..(2337): n is a, c, g, or t
ccttcttgccgatcctcctctgagggtcccgccctctcgcgctgctcagtcccaaatgtctcctttgataagcacccataacacaggcccacctgctctgacagactcctctgcaggccttccctctccgctgactcattccctgagaaggaccactattcatcacccatctgcctcatcccaatgtctcctttggccacgctctctccataggaccctaccatgattctggagagtgcattttacatgcatgtcttttgatgtgaaatggcagtcacttaaagacctggttaaagaaaaagttggtgaggtaacatacgtggagctcttaatggacgctgaaggaaagtcaaggggatgtgctctgagagaatttcttctgtggatttactacatgaaaaatgtaactgtatggtggcgtggaatcgaatgaaatcaggaaggcagtgagtgctcatgttacagtagctatgtttgattttgccaaacatttgagtggggtgggaggggatttgcaaatgggagtcccgcttttccaaatggctggccaaagagctttttggtattctgtttggatgcccaatttggataactggggaccaatagcagcattgtctctttgttaacagaggaattggctgtgtgtgaattatgcatggaattttagcggtggtataattaatgtaaaacgtgtgttcttgtctagaaaatgttactcttggttgtttgctgaatttgaaagttgtgtgaaccaaagattccgaaaagttgcctttgtgccagtaaattgtaaaccaaatattaaaaacctgaatgttcaaaattggcctagtttaaagagaacataaactattttctgtcgtgcaatagaatggcttagaataatcaaaaggatgagcttaacttacggaagggatggatttaggaggaatatggtaaggactcgattgagtacagagggaagcagatctaaagttggtgtgatttcttggagaccctgaatttaggtctgcttattaaatgtcagcagctctagtgcaatgctggtaacgcgtaggagaaggagatattaaggagcccagcttttaacaaggaaggcgaggcgaggcacttctgtcagcttccccttagaagggttcattttaaaagactaactttgtgacataaatcatatttttagtttgtttataactgtcattggtatttactatttttttcttttctttttccccttccttgctcttctgactggtctctggcttcctccaaagggatgtgcgtaagtatcgtctagttacttattggtatttgagccttctaacttgtaggactggtttcactcgactcgtttccttttgactctatagtgttgttgaattcaagatggaagagagcatgaaaaaagctgcggaagtcctaaacaagcatagtctgagcggaagaccactgaaagtcaaagaagtaagctcttgcttaacactgcggatactgtgtgtaattgttgagtgatcctactttggaattagggaaagacggtcatggtcccagacggcatttacaaagcaagtgccagcctgttgtttctaatgaagagtgtcggtcatagcctacagcagccattccctgcaaggactttggggtggtggccaagcagatcctgagtggctgctgaccaccttctaatatctgtgatttgtctgaggccttgttgtctcagggactctcaaaccatgagcccgtgggtttgtgccattaagttttactccatctgacccttcttcttggcccatcttttttctttttttaaaaagtgagtttgttccagcctgggcaacatggtgaaaccccctctctacaaaaggtacaaaaattagccaggcatggtggcgcatgcctgtagtcctagctacttgggaggctgaggcaggaggatcatttgagcccaggatgtggaggttgcagtgagctgagattgcaccattgcactccagcccgggcaacagtgagaccctgtctaaaaaataaaaaataaagtgagtttgttattcctcaaacctgctttcacatctcatctgaatcaaatatattccttgaggaagaaggtttttttgttgattaaatccctcttggctgggcgcagtggctcacgcctgtaatccccngcactttgggaggctgaggtgggtggatcaaggtcatgagttcaagaccagcttgaccaacatggtgaaaccctgtctactaaaaatacaaaaaattagctgggcgtagtggggggtgcctgtaatccatctactcgggaggctgaggcaggagaatcgctggaacccaggaggnggaggttgcagtgagccgagatcgcgccattgaactccagcctgggcagtaagagcaaagctctgtctcaaaaaaacatccctcttaacttcttttcacctcttctcttggggaggaagatgagtagattcagagtgaagcttggtagggtctaaggtctctcatgtgttatgatgtcttttttagtgctgatggtggtaattgacaggacagagagttgaagaagagagtcagtacagagcttcacagaccttcccagatgttgttttactgcgcagccctcacacacacgcctccaacacctgaaggacttgaaggatgggggcgcttgtgtggtctagaactgtttctcaaacttctggaagccattgacggggtttgcagaagttacaaaaccccattgatgaattagtaagattcagctataccaagcccatgaagctctaatttcagtctggcggttctacattatatcagctaatcatgtttccctccctaccctgcttttcttttttacttagtgcaattgagagctgtgtttttagtgctacacttcatgccttttcttcctttcctatttctttagctggactcttctaagctggtagttgagttcatttgactttcttgttaatagatttgagagatgctttccaaacaacctttcagtttctaagtcttgagaatatcatttactgtgcaagcatggtttgcgttgtactgggtcagttaaacgtaacaccttttgtgcttgttttaggatcctgatggtgaacatgccaggagagcaatgcaaaaggtgatggctacgactggtgggatgggtatgggaccaggtggcccaggaatgattactatcccacccagtatcctaaataatcccaacatcccaaatgagattatccatgcattacaggctggaagacttggaagcacagtatttgtagcaaatgtaagtaaacagaaccatcgtctaaagtagaaaatcagaactttatgaaatgaccttgtcaatatgttataaaagtaattctcacatttgagaagaaaaatgtaaagaagggttttgttcttgatttctttaaaaatcagccttataggcgggctttgtctgcattcctaagtcacaggcttgaccgtggtctcgttggggctgtgattcctgagtttcgcaggtgtttccacaagcagtaaccgagtctgcattctccgttggtttattttatgcagttttggtgcagagtaagactgtacgagcagaagtgcactgacaccttcctcttgttgtgtctggggtgaatgataatacctccaccatctgcaaggggaaatatttagaataaagtaggttgggtggggtggggagtggtaaagcttatcagggaaacaattttttaaaaatgttcagaaaatgagtattaatttgaagtatgaggtgacttaagtttctgagaaaagagacaatatatttactataggtacagtttatttacagtgaaggccaggctttataatcctattttaaaatttccattgcagttgattagtttttgtgacattatttcctaatacttttttccaaccaaagcatgtatcattcatgtagtaaaaatgttgtgtttcttaagatgtttacattgaggtttttaccccgttctctctcgattagctggattataaagttggctggaagaaactgaaggaagtatttagtatggctggtgtggtggtccgagcagacattcttgaagataaagatggaaaaagtcgtggaataggcactgttacttttgaacagtccattgaagctgtgcaagctatatgtatccttctgcaggaattcaacttatgaacagtttgacctaaattgctgtgttagtaatgtaggtttgtgtgaggaagaggtgactgtgtgtattcatgttttttatgtgactagggggagtgcattactgtggaattaagaggttctctgggccggaccggtcacggtggctcacgcctgtaatcccagcacttcgggaggccaaggcgggcggatcacttgaggtcagttcgagaccagcctggccaacatggtgaaaccccggctctactaaaaaatgcaaaaattagctgggcgcagtggtgggtgcctgtaatcccagctactcgggaggctgaggcacaagaatcgcttgaacccgggaggtggaggttgcagtgagccgagattgcgccactgcacaccaccagcctgggtgatagagtgagactcagtctcaaaaaaaaaaaaaaaaaaaaaaaaaaaggttctctgggggtggaattgattcaatacagtgtggatagaggggatggttacaacatgggcatatgcccatgagtctttctactgttttcttttcagaagagtctaggtttgaaggaggaagtccaaagaatgtgctactagagagaaagtggggttgttgtttcatgtgtaatacatccttataggacctcactctttccagtgagtagacatcattttggagaggccacttctccttgaccctaggcttagcctagagtttttaatcccttggagagtaccccacaggagcacattcatacaactcagacaagaccgtcactgcatgtcttacccagaaaacatggtccttcagtttagatagtggtagatgcctggcccattggtcacattcagagaaccttgatgccactgcttaagaggatggtttggtgaaattgtaaggttacgaatgaagcttcacacctaaggaataagcagaagttgtcttgtcctccccgccagctttatttattgttccttttatgtttattgttgaaagtataatgaagaattgaaattgctcataaattcatcacttagagggactggtagcagttggagtatttttctttctttttgtatttctcttgtgcacatttttagaattgcaagaaatagccttaattgtaataccagctatgttcaatggccagctgctatttgatagaccaatgcacgtcaagatggatgagagggccttaccaaaaggagatttcttccctcctgagcgtccacaacaacttccccatggccttggtggtattggcatggggttaggaccaggagggcaacccattgatgccaatcacctgaataaaggcatcggaatgggaaacataggtcccgcaggaatgggaatggaaggcataggatttggaataaataaaatgggaggaatggaggggccctttggtggtggtatggaaaacatgggtcgatttggatctgggatgaacatgggcaggataaatgaaatcctaagtaatgcactgaagagaggagagatcattgcaaagcagggaggaggtggaggtggaggaagcgtccctgggatcgagaggatgggtcctggcattgaccgcctcgggggtgccggcatggagcgcatgggcgcgggcctgggccacggcatggatcgcgtgggctccgagatcgagcgcatgggcctggtcatggaccgcatgggctccgtggagcgcatgggctccggcattgagcgcatgggcccgctgggcctcgaccacatggcctccagcattgagcgcatgggccagaccatggagcgcattggctctggcgtggagcgcatgggtgccggcatgggcttcggccttgagcgcatggccgctcccatcgaccgtgtgggccagaccattgagcgcatgggctctggcgtggagcgcatgggccctgccatcgagcgcatgggcctgagcatggagcgcatggtgcccgcaggtatgggagctggcctggagcgcatgggccccgtgatggatcgcatggccaccggcctggagcgcatgggcgccaacaatctggagcggatgggcctggagcgcatgggcgccaacagcctcgagcgcatgggcctggagcgcatgggtgccaacagcctcgagcgcatgggccccgccatgggcccggccctgggcgctggcattgagcgcatgggcctggccatgggtggcggtggcggtgccagctttgaccgtgccatcgagatggagcgtggcaacttcggaggaagcttcgcaggttcctttggtggagctggaggccatgctcctggggtggccaggaaggcctgccagatatttgtgagaaatctgccattcgatttcacatggaagatgctaaaggacaaattcaacgagtgcggccacgtgctgtacgccgacatcaagatggagaatgggaagtccaaggggtgtggtgtggttaagttcgagtcgccagaggtggccgagagagcctgccggatgatgaatggcatgaagctgagtggccgagagattgacgttcgaattgatagaaacgcttaagcagttgccttttttaaacatcgatacgagacctctgaatttgtattttttcttgttaaccattttaatttgttggctggatgtataaagatgtttaaaaaattcagttgctttttggggtaatttgaattacttttttaatgactggggttccatttgactgtttgcattgagattgcaatgtgcgcaattttttttgtagttgtggcatcttgttgacatcgaatatgactttgataataaataccggttcctgaaaaaaaaaaaaaaacaaaaaaaaaaaaaaaaaaacaaaaaaactatttaaaaacaaaaacaaaacaaacaaacaaaaaaaaccaacaactcaacacacaaaacaaaaaccacaaaaaacaacacaacaaacaactatacaaaccgatg

SEQ ID NO: 299848 - DNA, 6998 bp, Homo sapiens
  misc_feature (2162)..(2162): n is a, c, g, or t
  misc_feature (2337)..(2337): n is a, c, g, or t
ccttcttgccgatcctcctctgagggtcccgccctctcgcgctgctcagtcccaaatgtctcctttgataagcacccataacacaggcccacctgctctgacagactcctctgcaggccttccctctccgctgactcattccctgagaaggaccactattcatcacccatctgcctcatcccaatgtctcctttggccacgctctctccataggaccctaccatgattctggagagtgcattttacatgcatgtcttttgatgtgaaatggcagtcacttaaagacctggttaaagaaaaagttggtgaggtaacatacgtggagctcttaatggacgctgaaggaaagtcaaggggatgtgctctgagagaatttcttctgtggatttactacatgaaaaatgtaactgtatggtggcgtggaatcgaatgaaatcaggaaggcagtgagtgctcatgttacagtagctatgtttgattttgccaaacatttgagtggggtgggaggggatttgcaaatgggagtcccgcttttccaaatggctggccaaagagctttttggtattctgtttggatgcccaatttggataactggggaccaatagcagcattgtctctttgttaacagaggaattggctgtgtgtgaattatgcatggaattttagcggtggtataattaatgtaaaacgtgtgttcttgtctagaaaatgttactcttggttgtttgctgaatttgaaagttgtgtgaaccaaagattccgaaaagttgcctttgtgccagtaaattgtaaaccaaatattaaaaacctgaatgttcaaaattggcctagtttaaagagaacataaactattttctgtcgtgcaatagaatggcttagaataatcaaaaggatgagcttaacttacggaagggatggatttaggaggaatatggtaaggactcgattgagtacagagggaagcagatctaaagttggtgtgatttcttggagaccctgaatttaggtctgcttattaaatgtcagcagctctagtgcaatgctggtaacgcgtaggagaaggagatattaaggagcccagcttttaacaaggaaggcgaggcgaggcacttctgtcagcttccccttagaagggttcattttaaaagactaactttgtgacataaatcatatttttagtttgtttataactgtcattggtatttactatttttttcttttctttttccccttccttgctcttctgactggtctctggcttcctccaaagggatgtgcgtaagtatcgtctagttacttattggtatttgagccttctaacttgtaggactggtttcactcgactcgtttccttttgactctatagtgttgttgaattcaagatggaagagagcatgaaaaaagctgcggaagtcctaaacaagcatagtctgagcggaagaccactgaaagtcaaagaagtaagctcttgcttaacactgcggatactgtgtgtaattgttgagtgatcctactttggaattagggaaagacggtcatggtcccagacggcatttacaaagcaagtgccagcctgttgtttctaatgaagagtgtcggtcatagcctacagcagccattccctgcaaggactttggggtggtggccaagcagatcctgagtggctgctgaccaccttctaatatctgtgatttgtctgaggccttgttgtctcagggactctcaaaccatgagcccgtgggtttgtgccattaagttttactccatctgacccttcttcttggcccatcttttttctttttttaaaaagtgagtttgttccagcctgggcaacatggtgaaaccccctctctacaaaaggtacaaaaattagccaggcatggtggcgcatgcctgtagtcctagctacttgggaggctgaggcaggaggatcatttgagcccaggatgtggaggttgcagtgagctgagattgcaccattgcactccagcccgggcaacagtgagaccctgtctaaaaaataaaaaataaagtgagtttgttattcctcaaacctgctttcacatctcatctgaatcaaatatattccttgaggaagaaggtttttttgttgattaaatccctcttggctgggcgcagtggctcacgcctgtaatccccngcactttgggaggctgaggtgggtggatcaaggtcatgagttcaagaccagcttgaccaacatggtgaaaccctgtctactaaaaatacaaaaaattagctgggcgtagtggggggtgcctgtaatccatctactcgggaggctgaggcaggagaatcgctggaacccaggaggnggaggttgcagtgagccgagatcgcgccattgaactccagcctgggcagtaagagcaaagctctgtctcaaaaaaacatccctcttaacttcttttcacctcttctcttggggaggaagatgagtagattcagagtgaagcttggtagggtctaaggtctctcatgtgttatgatgtcttttttagtgctgatggtggtaattgacaggacagagagttgaagaagagagtcagtacagagcttcacagaccttcccagatgttgttttactgcgcagccctcacacacacgcctccaacacctgaaggacttgaaggatgggggcgcttgtgtggtctagaactgtttctcaaacttctggaagccattgacggggtttgcagaagttacaaaaccccattgatgaattagtaagattcagctataccaagcccatgaagctctaatttcagtctggcggttctacattatatcagctaatcatgtttccctccctaccctgcttttcttttttacttagtgcaattgagagctgtgtttttagtgctacacttcatgccttttcttcctttcctatttctttagctggactcttctaagctggtagttgagttcatttgactttcttgttaatagatttgagagatgctttccaaacaacctttcagtttctaagtcttgagaatatcatttactgtgcaagcatggtttgcgttgtactgggtcagttaaacgtaacaccttttgtgcttgttttaggatcctgatggtgaacatgccaggagagcaatgcaaaaggtgatggctacgactggtgggatgggtatgggaccaggtggcccaggaatgattactatcccacccagtatcctaaataatcccaacatcccaaatgagattatccatgcattacaggctggaagacttggaagcacagtatttgtagcaaatgtaagtaaacagaaccatcgtctaaagtagaaaatcagaactttatgaaatgaccttgtcaatatgttataaaagtaattctcacatttgagaagaaaaatgtaaagaagggttttgttcttgatttctttaaaaatcagccttataggcgggctttgtctgcattcctaagtcacaggcttgaccgtggtctcgttggggctgtgattcctgagtttcgcaggtgtttccacaagcagtaaccgagtctgcattctccgttggtttattttatgcagttttggtgcagagtaagactgtacgagcagaagtgcactgacaccttcctcttgttgtgtctggggtgaatgataatacctccaccatctgcaaggggaaatatttagaataaagtaggttgggtggggtggggagtggtaaagcttatcagggaaacaattttttaaaaatgttcagaaaatgagtattaatttgaagtatgaggtgacttaagtttctgagaaaagagacaatatatttactataggtacagtttatttacagtgaaggccaggctttataatcctattttaaaatttccattgcagttgattagtttttgtgacattatttcctaatacttttttccaaccaaagcatgtatcattcatgtagtaaaaatgttgtgtttcttaagatgtttacattgaggtttttaccccgttctctctcgattagctggattataaagttggctggaagaaactgaaggaagtatttagtatggctggtgtggtggtccgagcagacattcttgaagataaagatggaaaaagtcgtggaataggcactgttacttttgaacagtccattgaagctgtgcaagctatatgtatccttctgcaggaattcaacttatgaacagtttgacctaaattgctgtgttagtaatgtaggtttgtgtgaggaagaggtgactgtgtgtattcatgttttttatgtgactagggggagtgcattactgtggaattaagaggttctctgggccggaccggtcacggtggctcacgcctgtaatcccagcacttcgggaggccaaggcgggcggatcacttgaggtcagttcgagaccagcctggccaacatggtgaaaccccggctctactaaaaaatgcaaaaattagctgggcgcagtggtgggtgcctgtaatcccagctactcgggaggctgaggcacaagaatcgcttgaacccgggaggtggaggttgcagtgagccgagattgcgccactgcacaccaccagcctgggtgatagagtgagactcagtctcaaaaaaaaaaaaaaaaaaaaaaaaaaaggttctctgggggtggaattgattcaatacagtgtggatagaggggatggttacaacatgggcatatgcccatgagtctttctactgttttcttttcagaagagtctaggtttgaaggaggaagtccaaagaatgtgctactagagagaaagtggggttgttgtttcatgtgtaatacatccttataggacctcactctttccagtgagtagacatcattttggagaggccacttctccttgaccctaggcttagcctagagtttttaatcccttggagagtaccccacaggagcacattcatacaactcagacaagaccgtcactgcatgtcttacccagaaaacatggtccttcagtttagatagtggtagatgcctggcccattggtcacattcagagaaccttgatgccactgcttaagaggatggtttggtgaaattgtaaggttacgaatgaagcttcacacctaaggaataagcagaagttgtcttgtcctccccgccagctttatttattgttccttttatgtttattgttgaaagtataatgaagaattgaaattgctcataaattcatcacttagagggactggtagcagttggagtatttttctttctttttgtatttctcttgtgcacatttttagaattgcaagaaatagccttaattgtaataccagctatgttcaatggccagctgctatttgatagaccaatgcacgtcaagatggatgagagggccttaccaaaaggagatttcttccctcctgagcgtccacaacaacttccccatggccttggtggtattggcatggggttaggaccaggagggcaacccattgatgccaatcacctgaataaaggcatcggaatgggaaacataggtcccgcaggaatgggaatggaaggcataggatttggaataaataaaatgggaggaatggaggggccctttggtggtggtatggaaaacatgggtcgatttggatctgggatgaacatgggcaggataaatgaaatcctaagtaatgcactgaagagaggagagatcattgcaaagcagggaggaggtggaggtggaggaagcgtccctgggatcgagaggatgggtcctggcattgaccgcctcgggggtgccggcatggagcgcatgggcgcgggcctgggccacggcatggatcgcgtgggctccgagatcgagcgcatgggcctggtcatggaccgcatgggctccgtggagcgcatgggctccggcattgagcgcatgggcccgctgggcctcgaccacatggcctccagcattgagcgcatgggccagaccatggagcgcattggctctggcgtggagcgcatgggtgccggcatgggcttcggccttgagcgcatggccgctcccatcgaccgtgtgggccagaccattgagcgcatgggctctggcgtggagcgcatgggccctgccatcgagcgcatgggcctgagcatggagcgcatggtgcccgcaggtatgggagctggcctggagcgcatgggccccgtgatggatcgcatggccaccggcctggagcgcatgggcgccaacaatctggagcggatgggcctggagcgcatgggcgccaacagcctcgagcgcatgggcctggagcgcatgggtgccaacagcctcgagcgcatgggccccgccatgggcccggccctgggcgctggcattgagcgcatgggcctggccatgggtggcggtggcggtgccagctttgaccgtgccatcgagatggagcgtggcaacttcggaggaagcttcgcaggttcctttggtggagctggaggccatgctcctggggtggccaggaaggcctgccagatatttgtgagaaatctgccattcgatttcacatggaagatgctaaaggacaaattcaacgagtgcggccacgtgctgtacgccgacatcaagatggagaatgggaagtccaaggggtgtggtgtggttaagttcgagtcgccagaggtggccgagagagcctgccggatgatgaatggcatgaagctgagtggccgagagattgacgttcgaattgatagaaacgcttaagcagttgccttttttaaacatcgatacgagacctctgaatttgtattttttcttgttaaccattttaatttgttggctggatgtataaagatgtttaaaaaattcagttgctttttggggtaatttgaattacttttttaatgactggggttccatttgactgtttgcattgagattgcaatgtgcgcaattttttttgtagttgtggcatcttgttgactacatcacccccgacaccatcacctgtaaccccggccgacgcgcgcggcgtgggcgcggcg

SEQ ID NO: 299849 - DNA, 7022 bp, Homo sapiens
  misc_feature (2162)..(2162): n is a, c, g, or t
  misc_feature (2337)..(2337): n is a, c, g, or t
ccttcttgccgatcctcctctgagggtcccgccctctcgcgctgctcagtcccaaatgtctcctttgataagcacccataacacaggcccacctgctctgacagactcctctgcaggccttccctctccgctgactcattccctgagaaggaccactattcatcacccatctgcctcatcccaatgtctcctttggccacgctctctccataggaccctaccatgattctggagagtgcattttacatgcatgtcttttgatgtgaaatggcagtcacttaaagacctggttaaagaaaaagttggtgaggtaacatacgtggagctcttaatggacgctgaaggaaagtcaaggggatgtgctctgagagaatttcttctgtggatttactacatgaaaaatgtaactgtatggtggcgtggaatcgaatgaaatcaggaaggcagtgagtgctcatgttacagtagctatgtttgattttgccaaacatttgagtggggtgggaggggatttgcaaatgggagtcccgcttttccaaatggctggccaaagagctttttggtattctgtttggatgcccaatttggataactggggaccaatagcagcattgtctctttgttaacagaggaattggctgtgtgtgaattatgcatggaattttagcggtggtataattaatgtaaaacgtgtgttcttgtctagaaaatgttactcttggttgtttgctgaatttgaaagttgtgtgaaccaaagattccgaaaagttgcctttgtgccagtaaattgtaaaccaaatattaaaaacctgaatgttcaaaattggcctagtttaaagagaacataaactattttctgtcgtgcaatagaatggcttagaataatcaaaaggatgagcttaacttacggaagggatggatttaggaggaatatggtaaggactcgattgagtacagagggaagcagatctaaagttggtgtgatttcttggagaccctgaatttaggtctgcttattaaatgtcagcagctctagtgcaatgctggtaacgcgtaggagaaggagatattaaggagcccagcttttaacaaggaaggcgaggcgaggcacttctgtcagcttccccttagaagggttcattttaaaagactaactttgtgacataaatcatatttttagtttgtttataactgtcattggtatttactatttttttcttttctttttccccttccttgctcttctgactggtctctggcttcctccaaagggatgtgcgtaagtatcgtctagttacttattggtatttgagccttctaacttgtaggactggtttcactcgactcgtttccttttgactctatagtgttgttgaattcaagatggaagagagcatgaaaaaagctgcggaagtcctaaacaagcatagtctgagcggaagaccactgaaagtcaaagaagtaagctcttgcttaacactgcggatactgtgtgtaattgttgagtgatcctactttggaattagggaaagacggtcatggtcccagacggcatttacaaagcaagtgccagcctgttgtttctaatgaagagtgtcggtcatagcctacagcagccattccctgcaaggactttggggtggtggccaagcagatcctgagtggctgctgaccaccttctaatatctgtgatttgtctgaggccttgttgtctcagggactctcaaaccatgagcccgtgggtttgtgccattaagttttactccatctgacccttcttcttggcccatcttttttctttttttaaaaagtgagtttgttccagcctgggcaacatggtgaaaccccctctctacaaaaggtacaaaaattagccaggcatggtggcgcatgcctgtagtcctagctacttgggaggctgaggcaggaggatcatttgagcccaggatgtggaggttgcagtgagctgagattgcaccattgcactccagcccgggcaacagtgagaccctgtctaaaaaataaaaaataaagtgagtttgttattcctcaaacctgctttcacatctcatctgaatcaaatatattccttgaggaagaaggtttttttgttgattaaatccctcttggctgggcgcagtggctcacgcctgtaatccccngcactttgggaggctgaggtgggtggatcaaggtcatgagttcaagaccagcttgaccaacatggtgaaaccctgtctactaaaaatacaaaaaattagctgggcgtagtggggggtgcctgtaatccatctactcgggaggctgaggcaggagaatcgctggaacccaggaggnggaggttgcagtgagccgagatcgcgccattgaactccagcctgggcagtaagagcaaagctctgtctcaaaaaaacatccctcttaacttcttttcacctcttctcttggggaggaagatgagtagattcagagtgaagcttggtagggtctaaggtctctcatgtgttatgatgtcttttttagtgctgatggtggtaattgacaggacagagagttgaagaagagagtcagtacagagcttcacagaccttcccagatgttgttttactgcgcagccctcacacacacgcctccaacacctgaaggacttgaaggatgggggcgcttgtgtggtctagaactgtttctcaaacttctggaagccattgacggggtttgcagaagttacaaaaccccattgatgaattagtaagattcagctataccaagcccatgaagctctaatttcagtctggcggttctacattatatcagctaatcatgtttccctccctaccctgcttttcttttttacttagtgcaattgagagctgtgtttttagtgctacacttcatgccttttcttcctttcctatttctttagctggactcttctaagctggtagttgagttcatttgactttcttgttaatagatttgagagatgctttccaaacaacctttcagtttctaagtcttgagaatatcatttactgtgcaagcatggtttgcgttgtactgggtcagttaaacgtaacaccttttgtgcttgttttaggatcctgatggtgaacatgccaggagagcaatgcaaaaggtgatggctacgactggtgggatgggtatgggaccaggtggcccaggaatgattactatcccacccagtatcctaaataatcccaacatcccaaatgagattatccatgcattacaggctggaagacttggaagcacagtatttgtagcaaatgtaagtaaacagaaccatcgtctaaagtagaaaatcagaactttatgaaatgaccttgtcaatatgttataaaagtaattctcacatttgagaagaaaaatgtaaagaagggttttgttcttgatttctttaaaaatcagccttataggcgggctttgtctgcattcctaagtcacaggcttgaccgtggtctcgttggggctgtgattcctgagtttcgcaggtgtttccacaagcagtaaccgagtctgcattctccgttggtttattttatgcagttttggtgcagagtaagactgtacgagcagaagtgcactgacaccttcctcttgttgtgtctggggtgaatgataatacctccaccatctgcaaggggaaatatttagaataaagtaggttgggtggggtggggagtggtaaagcttatcagggaaacaattttttaaaaatgttcagaaaatgagtattaatttgaagtatgaggtgacttaagtttctgagaaaagagacaatatatttactataggtacagtttatttacagtgaaggccaggctttataatcctattttaaaatttccattgcagttgattagtttttgtgacattatttcctaatacttttttccaaccaaagcatgtatcattcatgtagtaaaaatgttgtgtttcttaagatgtttacattgaggtttttaccccgttctctctcgattagctggattataaagttggctggaagaaactgaaggaagtatttagtatggctggtgtggtggtccgagcagacattcttgaagataaagatggaaaaagtcgtggaataggcactgttacttttgaacagtccattgaagctgtgcaagctatatgtatccttctgcaggaattcaacttatgaacagtttgacctaaattgctgtgttagtaatgtaggtttgtgtgaggaagaggtgactgtgtgtattcatgttttttatgtgactagggggagtgcattactgtggaattaagaggttctctgggccggaccggtcacggtggctcacgcctgtaatcccagcacttcgggaggccaaggcgggcggatcacttgaggtcagttcgagaccagcctggccaacatggtgaaaccccggctctactaaaaaatgcaaaaattagctgggcgcagtggtgggtgcctgtaatcccagctactcgggaggctgaggcacaagaatcgcttgaacccgggaggtggaggttgcagtgagccgagattgcgccactgcacaccaccagcctgggtgatagagtgagactcagtctcaaaaaaaaaaaaaaaaaaaaaaaaaaaggttctctgggggtggaattgattcaatacagtgtggatagaggggatggttacaacatgggcatatgcccatgagtctttctactgttttcttttcagaagagtctaggtttgaaggaggaagtccaaagaatgtgctactagagagaaagtggggttgttgtttcatgtgtaatacatccttataggacctcactctttccagtgagtagacatcattttggagaggccacttctccttgaccctaggcttagcctagagtttttaatcccttggagagtaccccacaggagcacattcatacaactcagacaagaccgtcactgcatgtcttacccagaaaacatggtccttcagtttagatagtggtagatgcctggcccattggtcacattcagagaaccttgatgccactgcttaagaggatggtttggtgaaattgtaaggttacgaatgaagcttcacacctaaggaataagcagaagttgtcttgtcctccccgccagctttatttattgttccttttatgtttattgttgaaagtataatgaagaattgaaattgctcataaattcatcacttagagggactggtagcagttggagtatttttctttctttttgtatttctcttgtgcacatttttagaattgcaagaaatagccttaattgtaataccagctatgttcaatggccagctgctatttgatagaccaatgcacgtcaagatggatgagagggccttaccaaaaggagatttcttccctcctgagcgtccacaacaacttccccatggccttggtggtattggcatggggttaggaccaggagggcaacccattgatgccaatcacctgaataaaggcatcggaatgggaaacataggtcccgcaggaatgggaatggaaggcataggatttggaataaataaaatgggaggaatggaggggccctttggtggtggtatggaaaacatgggtcgatttggatctgggatgaacatgggcaggataaatgaaatcctaagtaatgcactgaagagaggagagatcattgcaaagcagggaggaggtggaggtggaggaagcgtccctgggatcgagaggatgggtcctggcattgaccgcctcgggggtgccggcatggagcgcatgggcgcgggcctgggccacggcatggatcgcgtgggctccgagatcgagcgcatgggcctggtcatggaccgcatgggctccgtggagcgcatgggctccggcattgagcgcatgggcccgctgggcctcgaccacatggcctccagcattgagcgcatgggccagaccatggagcgcattggctctggcgtggagcgcatgggtgccggcatgggcttcggccttgagcgcatggccgctcccatcgaccgtgtgggccagaccattgagcgcatgggctctggcgtggagcgcatgggccctgccatcgagcgcatgggcctgagcatggagcgcatggtgcccgcaggtatgggagctggcctggagcgcatgggccccgtgatggatcgcatggccaccggcctggagcgcatgggcgccaacaatctggagcggatgggcctggagcgcatgggcgccaacagcctcgagcgcatgggcctggagcgcatgggtgccaacagcctcgagcgcatgggccccgccatgggcccggccctgggcgctggcattgagcgcatgggcctggccatgggtggcggtggcggtgccagctttgaccgtgccatcgagatggagcgtggcaacttcggaggaagcttcgcaggttcctttggtggagctggaggccatgctcctggggtggccaggaaggcctgccagatatttgtgagaaatctgccattcgatttcacatggaagatgctaaaggacaaattcaacgagtgcggccacgtgctgtacgccgacatcaagatggagaatgggaagtccaaggggtgtggtgtggttaagttcgagtcgccagaggtggccgagagagcctgccggatgatgaatggcatgaagctgagtggccgagagattgacgttcgaattgatagaaacgcttaagcagttgccttttttaaacatcgatacgagacctctgaatttgtattttttcttgttaaccattttaatttgttggctggatgtataaagatgtttaaaaaattcagttgctttttggggtaatttgaattacttttttaatgactggggttccatttgactgtttgcattgagattgcaatgtgcgcaattttttttgtagttgtggcatcttgttgacgtcctccccccccccgggttagtgctgagtgggggttgcggcggggggagaagggtagggacggcaaagacagacggcggccgct

SEQ ID NO: 299850 - DNA, 6798 bp, Homo sapiens
  misc_feature (2162)..(2162): n is a, c, g, or t
  misc_feature (2337)..(2337): n is a, c, g, or t
ccttcttgccgatcctcctctgagggtcccgccctctcgcgctgctcagtcccaaatgtctcctttgataagcacccataacacaggcccacctgctctgacagactcctctgcaggccttccctctccgctgactcattccctgagaaggaccactattcatcacccatctgcctcatcccaatgtctcctttggccacgctctctccataggaccctaccatgattctggagagtgcattttacatgcatgtcttttgatgtgaaatggcagtcacttaaagacctggttaaagaaaaagttggtgaggtaacatacgtggagctcttaatggacgctgaaggaaagtcaaggggatgtgctctgagagaatttcttctgtggatttactacatgaaaaatgtaactgtatggtggcgtggaatcgaatgaaatcaggaaggcagtgagtgctcatgttacagtagctatgtttgattttgccaaacatttgagtggggtgggaggggatttgcaaatgggagtcccgcttttccaaatggctggccaaagagctttttggtattctgtttggatgcccaatttggataactggggaccaatagcagcattgtctctttgttaacagaggaattggctgtgtgtgaattatgcatggaattttagcggtggtataattaatgtaaaacgtgtgttcttgtctagaaaatgttactcttggttgtttgctgaatttgaaagttgtgtgaaccaaagattccgaaaagttgcctttgtgccagtaaattgtaaaccaaatattaaaaacctgaatgttcaaaattggcctagtttaaagagaacataaactattttctgtcgtgcaatagaatggcttagaataatcaaaaggatgagcttaacttacggaagggatggatttaggaggaatatggtaaggactcgattgagtacagagggaagcagatctaaagttggtgtgatttcttggagaccctgaatttaggtctgcttattaaatgtcagcagctctagtgcaatgctggtaacgcgtaggagaaggagatattaaggagcccagcttttaacaaggaaggcgaggcgaggcacttctgtcagcttccccttagaagggttcattttaaaagactaactttgtgacataaatcatatttttagtttgtttataactgtcattggtatttactatttttttcttttctttttccccttccttgctcttctgactggtctctggcttcctccaaagggatgtgcgtaagtatcgtctagttacttattggtatttgagccttctaacttgtaggactggtttcactcgactcgtttccttttgactctatagtgttgttgaattcaagatggaagagagcatgaaaaaagctgcggaagtcctaaacaagcatagtctgagcggaagaccactgaaagtcaaagaagtaagctcttgcttaacactgcggatactgtgtgtaattgttgagtgatcctactttggaattagggaaagacggtcatggtcccagacggcatttacaaagcaagtgccagcctgttgtttctaatgaagagtgtcggtcatagcctacagcagccattccctgcaaggactttggggtggtggccaagcagatcctgagtggctgctgaccaccttctaatatctgtgatttgtctgaggccttgttgtctcagggactctcaaaccatgagcccgtgggtttgtgccattaagttttactccatctgacccttcttcttggcccatcttttttctttttttaaaaagtgagtttgttccagcctgggcaacatggtgaaaccccctctctacaaaaggtacaaaaattagccaggcatggtggcgcatgcctgtagtcctagctacttgggaggctgaggcaggaggatcatttgagcccaggatgtggaggttgcagtgagctgagattgcaccattgcactccagcccgggcaacagtgagaccctgtctaaaaaataaaaaataaagtgagtttgttattcctcaaacctgctttcacatctcatctgaatcaaatatattccttgaggaagaaggtttttttgttgattaaatccctcttggctgggcgcagtggctcacgcctgtaatccccngcactttgggaggctgaggtgggtggatcaaggtcatgagttcaagaccagcttgaccaacatggtgaaaccctgtctactaaaaatacaaaaaattagctgggcgtagtggggggtgcctgtaatccatctactcgggaggctgaggcaggagaatcgctggaacccaggaggnggaggttgcagtgagccgagatcgcgccattgaactccagcctgggcagtaagagcaaagctctgtctcaaaaaaacatccctcttaacttcttttcacctcttctcttggggaggaagatgagtagattcagagtgaagcttggtagggtctaaggtctctcatgtgttatgatgtcttttttagtgctgatggtggtaattgacaggacagagagttgaagaagagagtcagtacagagcttcacagaccttcccagatgttgttttactgcgcagccctcacacacacgcctccaacacctgaaggacttgaaggatgggggcgcttgtgtggtctagaactgtttctcaaacttctggaagccattgacggggtttgcagaagttacaaaaccccattgatgaattagtaagattcagctataccaagcccatgaagctctaatttcagtctggcggttctacattatatcagctaatcatgtttccctccctaccctgcttttcttttttacttagtgcaattgagagctgtgtttttagtgctacacttcatgccttttcttcctttcctatttctttagctggactcttctaagctggtagttgagttcatttgactttcttgttaatagatttgagagatgctttccaaacaacctttcagtttctaagtcttgagaatatcatttactgtgcaagcatggtttgcgttgtactgggtcagttaaacgtaacaccttttgtgcttgttttaggatcctgatggtgaacatgccaggagagcaatgcaaaaggtgatggctacgactggtgggatgggtatgggaccaggtggcccaggaatgattactatcccacccagtatcctaaataatcccaacatcccaaatgagattatccatgcattacaggctggaagacttggaagcacagtatttgtagcaaatgtaagtaaacagaaccatcgtctaaagtagaaaatcagaactttatgaaatgaccttgtcaatatgttataaaagtaattctcacatttgagaagaaaaatgtaaagaagggttttgttcttgatttctttaaaaatcagccttataggcgggctttgtctgcattcctaagtcacaggcttgaccgtggtctcgttggggctgtgattcctgagtttcgcaggtgtttccacaagcagtaaccgagtctgcattctccgttggtttattttatgcagttttggtgcagagtaagactgtacgagcagaagtgcactgacaccttcctcttgttgtgtctggggtgaatgataatacctccaccatctgcaaggggaaatatttagaataaagtaggttgggtggggtggggagtggtaaagcttatcagggaaacaattttttaaaaatgttcagaaaatgagtattaatttgaagtatgaggtgacttaagtttctgagaaaagagacaatatatttactataggtacagtttatttacagtgaaggccaggctttataatcctattttaaaatttccattgcagttgattagtttttgtgacattatttcctaatacttttttccaaccaaagcatgtatcattcatgtagtaaaaatgttgtgtttcttaagatgtttacattgaggtttttaccccgttctctctcgattagctggattataaagttggctggaagaaactgaaggaagtatttagtatggctggtgtggtggtccgagcagacattcttgaagataaagatggaaaaagtcgtggaataggcactgttacttttgaacagtccattgaagctgtgcaagctatatgtatccttctgcaggaattcaacttatgaacagtttgacctaaattgctgtgttagtaatgtaggtttgtgtgaggaagaggtgactgtgtgtattcatgttttttatgtgactagggggagtgcattactgtggaattaagaggttctctgggccggaccggtcacggtggctcacgcctgtaatcccagcacttcgggaggccaaggcgggcggatcacttgaggtcagttcgagaccagcctggccaacatggtgaaaccccggctctactaaaaaatgcaaaaattagctgggcgcagtggtgggtgcctgtaatcccagctactcgggaggctgaggcacaagaatcgcttgaacccgggaggtggaggttgcagtgagccgagattgcgccactgcacaccaccagcctgggtgatagagtgagactcagtctcaaaaaaaaaaaaaaaaaaaaaaaaaaaggttctctgggggtggaattgattcaatacagtgtggatagaggggatggttacaacatgggcatatgcccatgagtctttctactgttttcttttcagaagagtctaggtttgaaggaggaagtccaaagaatgtgctactagagagaaagtggggttgttgtttcatgtgtaatacatccttataggacctcactctttccagtgagtagacatcattttggagaggccacttctccttgaccctaggcttagcctagagtttttaatcccttggagagtaccccacaggagcacattcatacaactcagacaagaccgtcactgcatgtcttacccagaaaacatggtccttcagtttagatagtggtagatgcctggcccattggtcacattcagagaaccttgatgccactgcttaagaggatggtttggtgaaattgtaaggttacgaatgaagcttcacacctaaggaataagcagaagttgtcttgtcctccccgccagctttatttattgttccttttatgtttattgttgaaagtataatgaagaattgaaattgctcataaattcatcacttagagggactggtagcagttggagtatttttctttctttttgtatttctcttgtgcacatttttagaattgcaagaaatagccttaattgtaataccagctatgttcaatggccagctgctatttgatagaccaatgcacgtcaagatggatgagagggccttaccaaaaggagatttcttccctcctgagcgtccacaacaacttccccatggccttggtggtattggcatggggttaggaccaggagggcaacccattgatgccaatcacctgaataaaggcatcggaatgggaaacataggtcccgcaggaatgggaatggaaggcataggatttggaataaataaaatgggaggaatggaggggccctttggtggtggtatggaaaacatgggtcgatttggatctgggatgaacatgggcaggataaatgaaatcctaagtaatgcactgaagagaggagagatcattgcaaagcagggaggaggtggaggtggaggaagcgtccctgggatcgagaggatgggtcctggcattgaccgcctcgggggtgccggcatggagcgcatgggcgcgggcctgggccacggcatggatcgcgtgggctccgagatcgagcgcatgggcctggtcatggaccgcatgggctccgtggagcgcatgggctccggcattgagcgcatgggcccgctgggcctcgaccacatggcctccagcattgagcgcatgggccagaccatggagcgcattggctctggcgtggagcgcatgggtgccggcatgggcttcggccttgagcgcatggccgctcccatcgaccgtgtgggccagaccattgagcgcatgggctctggcgtggagcgcatgggccctgccatcgagcgcatgggcctgagcatggagcgcatggtgcccgcaggtatgggagctggcctggagcgcatgggccccgtgatggatcgcatggccaccggcctggagcgcatgggcgccaacaatctggagcggatgggcctggagcgcatgggcgccaacagcctcgagcgcatgggcctggagcgcatgggtgccaacagcctcgagcgcatgggccccgccatgggcccggccctgggcgctggcattgagcgcatgggcctggccatgggtggcggtggcggtgccagctttgaccgtgccatcgagatggagcgtggcaacttcggaggaagcttcgcaggttcctttggtggagctggaggccatgctcctggggtggccaggaaggcctgccagatatttgtgagaaatctgccattcgatttcacatggaagatgctaaaggacaaattcaacgagtgcggccacgtgctgtacgccgacatcaagatggagaatgggaagtccaaggggtgtggtgtggttaagttcgagtcgccagaggtggccgagagagcctgccggatgatgaatggcatgaagctgagtggccgagagattgacgttcgaattgatagaaacgcttaagcagttgccttttttaaacatcgatacggaggacccctcttggaaaatttttgggttaaatttttttttttttctttgtta

SEQ ID NO: 299851 - DNA, 7197 bp, Homo sapiens
  misc_feature (2162)..(2162): n is a, c, g, or t
  misc_feature (2337)..(2337): n is a, c, g, or t
ccttcttgccgatcctcctctgagggtcccgccctctcgcgctgctcagtcccaaatgtctcctttgataagcacccataacacaggcccacctgctctgacagactcctctgcaggccttccctctccgctgactcattccctgagaaggaccactattcatcacccatctgcctcatcccaatgtctcctttggccacgctctctccataggaccctaccatgattctggagagtgcattttacatgcatgtcttttgatgtgaaatggcagtcacttaaagacctggttaaagaaaaagttggtgaggtaacatacgtggagctcttaatggacgctgaaggaaagtcaaggggatgtgctctgagagaatttcttctgtggatttactacatgaaaaatgtaactgtatggtggcgtggaatcgaatgaaatcaggaaggcagtgagtgctcatgttacagtagctatgtttgattttgccaaacatttgagtggggtgggaggggatttgcaaatgggagtcccgcttttccaaatggctggccaaagagctttttggtattctgtttggatgcccaatttggataactggggaccaatagcagcattgtctctttgttaacagaggaattggctgtgtgtgaattatgcatggaattttagcggtggtataattaatgtaaaacgtgtgttcttgtctagaaaatgttactcttggttgtttgctgaatttgaaagttgtgtgaaccaaagattccgaaaagttgcctttgtgccagtaaattgtaaaccaaatattaaaaacctgaatgttcaaaattggcctagtttaaagagaacataaactattttctgtcgtgcaatagaatggcttagaataatcaaaaggatgagcttaacttacggaagggatggatttaggaggaatatggtaaggactcgattgagtacagagggaagcagatctaaagttggtgtgatttcttggagaccctgaatttaggtctgcttattaaatgtcagcagctctagtgcaatgctggtaacgcgtaggagaaggagatattaaggagcccagcttttaacaaggaaggcgaggcgaggcacttctgtcagcttccccttagaagggttcattttaaaagactaactttgtgacataaatcatatttttagtttgtttataactgtcattggtatttactatttttttcttttctttttccccttccttgctcttctgactggtctctggcttcctccaaagggatgtgcgtaagtatcgtctagttacttattggtatttgagccttctaacttgtaggactggtttcactcgactcgtttccttttgactctatagtgttgttgaattcaagatggaagagagcatgaaaaaagctgcggaagtcctaaacaagcatagtctgagcggaagaccactgaaagtcaaagaagtaagctcttgcttaacactgcggatactgtgtgtaattgttgagtgatcctactttggaattagggaaagacggtcatggtcccagacggcatttacaaagcaagtgccagcctgttgtttctaatgaagagtgtcggtcatagcctacagcagccattccctgcaaggactttggggtggtggccaagcagatcctgagtggctgctgaccaccttctaatatctgtgatttgtctgaggccttgttgtctcagggactctcaaaccatgagcccgtgggtttgtgccattaagttttactccatctgacccttcttcttggcccatcttttttctttttttaaaaagtgagtttgttccagcctgggcaacatggtgaaaccccctctctacaaaaggtacaaaaattagccaggcatggtggcgcatgcctgtagtcctagctacttgggaggctgaggcaggaggatcatttgagcccaggatgtggaggttgcagtgagctgagattgcaccattgcactccagcccgggcaacagtgagaccctgtctaaaaaataaaaaataaagtgagtttgttattcctcaaacctgctttcacatctcatctgaatcaaatatattccttgaggaagaaggtttttttgttgattaaatccctcttggctgggcgcagtggctcacgcctgtaatccccngcactttgggaggctgaggtgggtggatcaaggtcatgagttcaagaccagcttgaccaacatggtgaaaccctgtctactaaaaatacaaaaaattagctgggcgtagtggggggtgcctgtaatccatctactcgggaggctgaggcaggagaatcgctggaacccaggaggnggaggttgcagtgagccgagatcgcgccattgaactccagcctgggcagtaagagcaaagctctgtctcaaaaaaacatccctcttaacttcttttcacctcttctcttggggaggaagatgagtagattcagagtgaagcttggtagggtctaaggtctctcatgtgttatgatgtcttttttagtgctgatggtggtaattgacaggacagagagttgaagaagagagtcagtacagagcttcacagaccttcccagatgttgttttactgcgcagccctcacacacacgcctccaacacctgaaggacttgaaggatgggggcgcttgtgtggtctagaactgtttctcaaacttctggaagccattgacggggtttgcagaagttacaaaaccccattgatgaattagtaagattcagctataccaagcccatgaagctctaatttcagtctggcggttctacattatatcagctaatcatgtttccctccctaccctgcttttcttttttacttagtgcaattgagagctgtgtttttagtgctacacttcatgccttttcttcctttcctatttctttagctggactcttctaagctggtagttgagttcatttgactttcttgttaatagatttgagagatgctttccaaacaacctttcagtttctaagtcttgagaatatcatttactgtgcaagcatggtttgcgttgtactgggtcagttaaacgtaacaccttttgtgcttgttttaggatcctgatggtgaacatgccaggagagcaatgcaaaaggtgatggctacgactggtgggatgggtatgggaccaggtggcccaggaatgattactatcccacccagtatcctaaataatcccaacatcccaaatgagattatccatgcattacaggctggaagacttggaagcacagtatttgtagcaaatgtaagtaaacagaaccatcgtctaaagtagaaaatcagaactttatgaaatgaccttgtcaatatgttataaaagtaattctcacatttgagaagaaaaatgtaaagaagggttttgttcttgatttctttaaaaatcagccttataggcgggctttgtctgcattcctaagtcacaggcttgaccgtggtctcgttggggctgtgattcctgagtttcgcaggtgtttccacaagcagtaaccgagtctgcattctccgttggtttattttatgcagttttggtgcagagtaagactgtacgagcagaagtgcactgacaccttcctcttgttgtgtctggggtgaatgataatacctccaccatctgcaaggggaaatatttagaataaagtaggttgggtggggtggggagtggtaaagcttatcagggaaacaattttttaaaaatgttcagaaaatgagtattaatttgaagtatgaggtgacttaagtttctgagaaaagagacaatatatttactataggtacagtttatttacagtgaaggccaggctttataatcctattttaaaatttccattgcagttgattagtttttgtgacattatttcctaatacttttttccaaccaaagcatgtatcattcatgtagtaaaaatgttgtgtttcttaagatgtttacattgaggtttttaccccgttctctctcgattagctggattataaagttggctggaagaaactgaaggaagtatttagtatggctggtgtggtggtccgagcagacattcttgaagataaagatggaaaaagtcgtggaataggcactgttacttttgaacagtccattgaagctgtgcaagctatatgtatccttctgcaggaattcaacttatgaacagtttgacctaaattgctgtgttagtaatgtaggtttgtgtgaggaagaggtgactgtgtgtattcatgttttttatgtgactagggggagtgcattactgtggaattaagaggttctctgggccggaccggtcacggtggctcacgcctgtaatcccagcacttcgggaggccaaggcgggcggatcacttgaggtcagttcgagaccagcctggccaacatggtgaaaccccggctctactaaaaaatgcaaaaattagctgggcgcagtggtgggtgcctgtaatcccagctactcgggaggctgaggcacaagaatcgcttgaacccgggaggtggaggttgcagtgagccgagattgcgccactgcacaccaccagcctgggtgatagagtgagactcagtctcaaaaaaaaaaaaaaaaaaaaaaaaaaaggttctctgggggtggaattgattcaatacagtgtggatagaggggatggttacaacatgggcatatgcccatgagtctttctactgttttcttttcagaagagtctaggtttgaaggaggaagtccaaagaatgtgctactagagagaaagtggggttgttgtttcatgtgtaatacatccttataggacctcactctttccagtgagtagacatcattttggagaggccacttctccttgaccctaggcttagcctagagtttttaatcccttggagagtaccccacaggagcacattcatacaactcagacaagaccgtcactgcatgtcttacccagaaaacatggtccttcagtttagatagtggtagatgcctggcccattggtcacattcagagaaccttgatgccactgcttaagaggatggtttggtgaaattgtaaggttacgaatgaagcttcacacctaaggaataagcagaagttgtcttgtcctccccgccagctttatttattgttccttttatgtttattgttgaaagtataatgaagaattgaaattgctcataaattcatcacttagagggactggtagcagttggagtatttttctttctttttgtatttctcttgtgcacatttttagaattgcaagaaatagccttaattgtaataccagctatgttcaatggccagctgctatttgatagaccaatgcacgtcaagatggatgagagggccttaccaaaaggagatttcttccctcctgagcgtccacaacaacttccccatggccttggtggtattggcatggggttaggaccaggagggcaacccattgatgccaatcacctgaataaaggcatcggaatgggaaacataggtcccgcaggaatgggaatggaaggcataggatttggaataaataaaatgggaggaatggaggggccctttggtggtggtatggaaaacatgggtcgatttggatctgggatgaacatgggcaggataaatgaaatcctaagtaatgcactgaagagaggagagatcattgcaaagcagggaggaggtggaggtggaggaagcgtccctgggatcgagaggatgggtcctggcattgaccgcctcgggggtgccggcatggagcgcatgggcgcgggcctgggccacggcatggatcgcgtgggctccgagatcgagcgcatgggcctggtcatggaccgcatgggctccgtggagcgcatgggctccggcattgagcgcatgggcccgctgggcctcgaccacatggcctccagcattgagcgcatgggccagaccatggagcgcattggctctggcgtggagcgcatgggtgccggcatgggcttcggccttgagcgcatggccgctcccatcgaccgtgtgggccagaccattgagcgcatgggctctggcgtggagcgcatgggccctgccatcgagcgcatgggcctgagcatggagcgcatggtgcccgcaggtatgggagctggcctggagcgcatgggccccgtgatggatcgcatggccaccggcctggagcgcatgggcgccaacaatctggagcggatgggcctggagcgcatgggcgccaacagcctcgagcgcatgggcctggagcgcatgggtgccagctttgaccgtgccatcgagatggagcgtggcaacttcggaggaagcttcgcaggttcctttggtggagctggaggccatgctcctggggtggccaggaaggcctgccagatatttgtgagaaatctgccattcgatttcacatggaagatgctaaaggacaaattcaacgagtgcggccacgtgctgtacgccgacatcaagatggagaatgggaagtccaaggggtgtggtgtggttaagttcgagtcgccagaggtggccgagagagcctgccggatgatgaatggcatgaagctgagtggccgagagattgacgttcgaattgatagaaacgcttaagcagttgccttttttaaacatcgatacgagacctctgaatttgtattttttcttgttaaccattttaatttgttggctggatgtataaagatgtttaaaaaattcagttgctttttggggtaatttgaattacttttttaatgactggggttccatttgactgtttgcattgagattgcaatgtgcgcaattttttttgtagttgtggcatcttgttgacatcgaatatgactttgataataaataccggttcctgaaaaaaacacggacaagacaccacccaccacagagacgacagacaaaaacaggacccaaagagaacagcccagcgaccaacgccaaacaaacactactgcaaaaaaaggagcccacaaaagggcacagcctctaacccgcacaaacgatggcaggacgtaaacaagccacacaacggcacacaccgcccacccgcccatccgagacacaacccaaacgaggcaggcgagaacgggcaacacgcacagagagaaaggcagggacaacacaccagagcaacaagcgacacaccaatcaacaggaaaaggcgagccagta

SEQ ID NO: 299852 - DNA, 7460 bp, Homo sapiens
  misc_feature (2162)..(2162): n is a, c, g, or t
  misc_feature (2337)..(2337): n is a, c, g, or t
ccttcttgccgatcctcctctgagggtcccgccctctcgcgctgctcagtcccaaatgtctcctttgataagcacccataacacaggcccacctgctctgacagactcctctgcaggccttccctctccgctgactcattccctgagaaggaccactattcatcacccatctgcctcatcccaatgtctcctttggccacgctctctccataggaccctaccatgattctggagagtgcattttacatgcatgtcttttgatgtgaaatggcagtcacttaaagacctggttaaagaaaaagttggtgaggtaacatacgtggagctcttaatggacgctgaaggaaagtcaaggggatgtgctctgagagaatttcttctgtggatttactacatgaaaaatgtaactgtatggtggcgtggaatcgaatgaaatcaggaaggcagtgagtgctcatgttacagtagctatgtttgattttgccaaacatttgagtggggtgggaggggatttgcaaatgggagtcccgcttttccaaatggctggccaaagagctttttggtattctgtttggatgcccaatttggataactggggaccaatagcagcattgtctctttgttaacagaggaattggctgtgtgtgaattatgcatggaattttagcggtggtataattaatgtaaaacgtgtgttcttgtctagaaaatgttactcttggttgtttgctgaatttgaaagttgtgtgaaccaaagattccgaaaagttgcctttgtgccagtaaattgtaaaccaaatattaaaaacctgaatgttcaaaattggcctagtttaaagagaacataaactattttctgtcgtgcaatagaatggcttagaataatcaaaaggatgagcttaacttacggaagggatggatttaggaggaatatggtaaggactcgattgagtacagagggaagcagatctaaagttggtgtgatttcttggagaccctgaatttaggtctgcttattaaatgtcagcagctctagtgcaatgctggtaacgcgtaggagaaggagatattaaggagcccagcttttaacaaggaaggcgaggcgaggcacttctgtcagcttccccttagaagggttcattttaaaagactaactttgtgacataaatcatatttttagtttgtttataactgtcattggtatttactatttttttcttttctttttccccttccttgctcttctgactggtctctggcttcctccaaagggatgtgcgtaagtatcgtctagttacttattggtatttgagccttctaacttgtaggactggtttcactcgactcgtttccttttgactctatagtgttgttgaattcaagatggaagagagcatgaaaaaagctgcggaagtcctaaacaagcatagtctgagcggaagaccactgaaagtcaaagaagtaagctcttgcttaacactgcggatactgtgtgtaattgttgagtgatcctactttggaattagggaaagacggtcatggtcccagacggcatttacaaagcaagtgccagcctgttgtttctaatgaagagtgtcggtcatagcctacagcagccattccctgcaaggactttggggtggtggccaagcagatcctgagtggctgctgaccaccttctaatatctgtgatttgtctgaggccttgttgtctcagggactctcaaaccatgagcccgtgggtttgtgccattaagttttactccatctgacccttcttcttggcccatcttttttctttttttaaaaagtgagtttgttccagcctgggcaacatggtgaaaccccctctctacaaaaggtacaaaaattagccaggcatggtggcgcatgcctgtagtcctagctacttgggaggctgaggcaggaggatcatttgagcccaggatgtggaggttgcagtgagctgagattgcaccattgcactccagcccgggcaacagtgagaccctgtctaaaaaataaaaaataaagtgagtttgttattcctcaaacctgctttcacatctcatctgaatcaaatatattccttgaggaagaaggtttttttgttgattaaatccctcttggctgggcgcagtggctcacgcctgtaatccccngcactttgggaggctgaggtgggtggatcaaggtcatgagttcaagaccagcttgaccaacatggtgaaaccctgtctactaaaaatacaaaaaattagctgggcgtagtggggggtgcctgtaatccatctactcgggaggctgaggcaggagaatcgctggaacccaggaggnggaggttgcagtgagccgagatcgcgccattgaactccagcctgggcagtaagagcaaagctctgtctcaaaaaaacatccctcttaacttcttttcacctcttctcttggggaggaagatgagtagattcagagtgaagcttggtagggtctaaggtctctcatgtgttatgatgtcttttttagtgctgatggtggtaattgacaggacagagagttgaagaagagagtcagtacagagcttcacagaccttcccagatgttgttttactgcgcagccctcacacacacgcctccaacacctgaaggacttgaaggatgggggcgcttgtgtggtctagaactgtttctcaaacttctggaagccattgacggggtttgcagaagttacaaaaccccattgatgaattagtaagattcagctataccaagcccatgaagctctaatttcagtctggcggttctacattatatcagctaatcatgtttccctccctaccctgcttttcttttttacttagtgcaattgagagctgtgtttttagtgctacacttcatgccttttcttcctttcctatttctttagctggactcttctaagctggtagttgagttcatttgactttcttgttaatagatttgagagatgctttccaaacaacctttcagtttctaagtcttgagaatatcatttactgtgcaagcatggtttgcgttgtactgggtcagttaaacgtaacaccttttgtgcttgttttaggatcctgatggtgaacatgccaggagagcaatgcaaaaggtgatggctacgactggtgggatgggtatgggaccaggtggcccaggaatgattactatcccacccagtatcctaaataatcccaacatcccaaatgagattatccatgcattacaggctggaagacttggaagcacagtatttgtagcaaatgtaagtaaacagaaccatcgtctaaagtagaaaatcagaactttatgaaatgaccttgtcaatatgttataaaagtaattctcacatttgagaagaaaaatgtaaagaagggttttgttcttgatttctttaaaaatcagccttataggcgggctttgtctgcattcctaagtcacaggcttgaccgtggtctcgttggggctgtgattcctgagtttcgcaggtgtttccacaagcagtaaccgagtctgcattctccgttggtttattttatgcagttttggtgcagagtaagactgtacgagcagaagtgcactgacaccttcctcttgttgtgtctggggtgaatgataatacctccaccatctgcaaggggaaatatttagaataaagtaggttgggtggggtggggagtggtaaagcttatcagggaaacaattttttaaaaatgttcagaaaatgagtattaatttgaagtatgaggtgacttaagtttctgagaaaagagacaatatatttactataggtacagtttatttacagtgaaggccaggctttataatcctattttaaaatttccattgcagttgattagtttttgtgacattatttcctaatacttttttccaaccaaagcatgtatcattcatgtagtaaaaatgttgtgtttcttaagatgtttacattgaggtttttaccccgttctctctcgattagctggattataaagttggctggaagaaactgaaggaagtatttagtatggctggtgtggtggtccgagcagacattcttgaagataaagatggaaaaagtcgtggaataggcactgttacttttgaacagtccattgaagctgtgcaagctatatgtatccttctgcaggaattcaacttatgaacagtttgacctaaattgctgtgttagtaatgtaggtttgtgtgaggaagaggtgactgtgtgtattcatgttttttatgtgactagggggagtgcattactgtggaattaagaggttctctgggccggaccggtcacggtggctcacgcctgtaatcccagcacttcgggaggccaaggcgggcggatcacttgaggtcagttcgagaccagcctggccaacatggtgaaaccccggctctactaaaaaatgcaaaaattagctgggcgcagtggtgggtgcctgtaatcccagctactcgggaggctgaggcacaagaatcgcttgaacccgggaggtggaggttgcagtgagccgagattgcgccactgcacaccaccagcctgggtgatagagtgagactcagtctcaaaaaaaaaaaaaaaaaaaaaaaaaaaggttctctgggggtggaattgattcaatacagtgtggatagaggggatggttacaacatgggcatatgcccatgagtctttctactgttttcttttcagaagagtctaggtttgaaggaggaagtccaaagaatgtgctactagagagaaagtggggttgttgtttcatgtgtaatacatccttataggacctcactctttccagtgagtagacatcattttggagaggccacttctccttgaccctaggcttagcctagagtttttaatcccttggagagtaccccacaggagcacattcatacaactcagacaagaccgtcactgcatgtcttacccagaaaacatggtccttcagtttagatagtggtagatgcctggcccattggtcacattcagagaaccttgatgccactgcttaagaggatggtttggtgaaattgtaaggttacgaatgaagcttcacacctaaggaataagcagaagttgtcttgtcctccccgccagctttatttattgttccttttatgtttattgttgaaagtataatgaagaattgaaattgctcataaattcatcacttagagggactggtagcagttggagtatttttctttctttttgtatttctcttgtgcacatttttagaattgcaagaaatagccttaattgtaataccagctatgttcaatggccagctgctatttgatagaccaatgcacgtcaagatggatgagagggccttaccaaaaggagatttcttccctcctgagcgtccacaacaacttccccatggccttggtggtattggcatggggttaggaccaggagggcaacccattgatgccaatcacctgaataaaggcatcggaatgggaaacataggtcccgcaggaatgggaatggaaggcataggatttggaataaataaaatgggaggaatggaggggccctttggtggtggtatggaaaacatgggtcgatttggatctgggatgaacatgggcaggataaatgaaatcctaagtaatgcactgaagagaggagagatcattgcaaagcagggaggaggtggaggtggaggaagcgtccctgggatcgagaggatgggtcctggcattgaccgcctcgggggtgccggcatggagcgcatgggcgcgggcctgggccacggcatggatcgcgtgggctccgagatcgagcgcatgggcctggtcatggaccgcatgggctccgtggagcgcatgggctccggcattgagcgcatgggcccgctgggcctcgaccacatggcctccagcattgagcgcatgggccagaccatggagcgcattggctctggcgtggagcgcatgggtgccggcatgggcttcggccttgagcgcatggccgctcccatcgaccgtgtgggccagaccattgagcgcatgggctctggcgtggagcgcatgggccctgccatcgagcgcatgggcctgagcatggagcgcatggtgcccgcaggtatgggagctggcctggagcgcatgggccccgtgatggatcgcatggccaccggcctggagcgcatgggcgccaacaatctggagcggatgggcctggagcgcatgggcgccaacagcctcgagcgcatgggcctggagcgcatgggtgccaacagcctcgagcgcatgggccccgccatgggcccggccctgggcgctggcattgagcgcatgggcctggccatgggtggcggtggcggtgccagctttgaccgtgccatcgagatggagcgtggcaacttcggaggaagcttcgcaggttcctttggtggagctggaggccatgctcctggggtggccaggaaggcctgccagatatttgtgagaaatctgccattcgatttcacatggaagatgctaaaggacaaattcaacgagtgcggtaagtgttgggaacggctttgtaggtgcttccctcgtgcttgttggtgacgcagccgagtcagcagcaaaacctccctcccagccccctccgtcggctcaggacccatggccttgccatgttctgcccacgccaatgctcaggcaggttgttgagtgtcctgtgatgtgtcacatgtttttcagctgtgttctcatttcatccttatttccttttttctttttgagtctttgaaacaaggtagtagtgtccccatttcacagatgagtcaggcagagtcttccttctgaggttacctggcttctaggtggcaaggctaaataaatacatcccagacgaggtcgctttcccctcagcacagctggtgtggggcctcggagagaacacagcccagcaggtgccatggggaggcggtgcaggctctgggcacacagcagctcctgtgagggtgaggctaaggtcttgtggtttcctggcacatcgggcaactcttctggagggctctgtctgtggctgaaagcaagttgtcttccttccctgccctccagggtgagcccccaccccgcatgcaccacctctgttctttttagctagaggggcctgagctagaggtctgggcagctgcttccgcactgtcctcccgcttcctgtttcagcagtggctccgatttcaccaccattgctgcttctccatggttcttggggcaagccgttgagtcatgatctgcctctttgctccattcttcacctctttccccactcctgagttcccatgttgtagctagatattctgaaaaggccagtgggatcagagcgcccccagcccccacttttgcaatgcctggagcggccctgtgccttcaagaggaagtccagactcacaagccccttgaagacctggtcctat

SEQ ID NO: 299853 - DNA, 6268 bp, Homo sapiens
  misc_feature (2162)..(2162): n is a, c, g, or t
  misc_feature (2337)..(2337): n is a, c, g, or t
ccttcttgccgatcctcctctgagggtcccgccctctcgcgctgctcagtcccaaatgtctcctttgataagcacccataacacaggcccacctgctctgacagactcctctgcaggccttccctctccgctgactcattccctgagaaggaccactattcatcacccatctgcctcatcccaatgtctcctttggccacgctctctccataggaccctaccatgattctggagagtgcattttacatgcatgtcttttgatgtgaaatggcagtcacttaaagacctggttaaagaaaaagttggtgaggtaacatacgtggagctcttaatggacgctgaaggaaagtcaaggggatgtgctctgagagaatttcttctgtggatttactacatgaaaaatgtaactgtatggtggcgtggaatcgaatgaaatcaggaaggcagtgagtgctcatgttacagtagctatgtttgattttgccaaacatttgagtggggtgggaggggatttgcaaatgggagtcccgcttttccaaatggctggccaaagagctttttggtattctgtttggatgcccaatttggataactggggaccaatagcagcattgtctctttgttaacagaggaattggctgtgtgtgaattatgcatggaattttagcggtggtataattaatgtaaaacgtgtgttcttgtctagaaaatgttactcttggttgtttgctgaatttgaaagttgtgtgaaccaaagattccgaaaagttgcctttgtgccagtaaattgtaaaccaaatattaaaaacctgaatgttcaaaattggcctagtttaaagagaacataaactattttctgtcgtgcaatagaatggcttagaataatcaaaaggatgagcttaacttacggaagggatggatttaggaggaatatggtaaggactcgattgagtacagagggaagcagatctaaagttggtgtgatttcttggagaccctgaatttaggtctgcttattaaatgtcagcagctctagtgcaatgctggtaacgcgtaggagaaggagatattaaggagcccagcttttaacaaggaaggcgaggcgaggcacttctgtcagcttccccttagaagggttcattttaaaagactaactttgtgacataaatcatatttttagtttgtttataactgtcattggtatttactatttttttcttttctttttccccttccttgctcttctgactggtctctggcttcctccaaagggatgtgcgtaagtatcgtctagttacttattggtatttgagccttctaacttgtaggactggtttcactcgactcgtttccttttgactctatagtgttgttgaattcaagatggaagagagcatgaaaaaagctgcggaagtcctaaacaagcatagtctgagcggaagaccactgaaagtcaaagaagtaagctcttgcttaacactgcggatactgtgtgtaattgttgagtgatcctactttggaattagggaaagacggtcatggtcccagacggcatttacaaagcaagtgccagcctgttgtttctaatgaagagtgtcggtcatagcctacagcagccattccctgcaaggactttggggtggtggccaagcagatcctgagtggctgctgaccaccttctaatatctgtgatttgtctgaggccttgttgtctcagggactctcaaaccatgagcccgtgggtttgtgccattaagttttactccatctgacccttcttcttggcccatcttttttctttttttaaaaagtgagtttgttccagcctgggcaacatggtgaaaccccctctctacaaaaggtacaaaaattagccaggcatggtggcgcatgcctgtagtcctagctacttgggaggctgaggcaggaggatcatttgagcccaggatgtggaggttgcagtgagctgagattgcaccattgcactccagcccgggcaacagtgagaccctgtctaaaaaataaaaaataaagtgagtttgttattcctcaaacctgctttcacatctcatctgaatcaaatatattccttgaggaagaaggtttttttgttgattaaatccctcttggctgggcgcagtggctcacgcctgtaatccccngcactttgggaggctgaggtgggtggatcaaggtcatgagttcaagaccagcttgaccaacatggtgaaaccctgtctactaaaaatacaaaaaattagctgggcgtagtggggggtgcctgtaatccatctactcgggaggctgaggcaggagaatcgctggaacccaggaggnggaggttgcagtgagccgagatcgcgccattgaactccagcctgggcagtaagagcaaagctctgtctcaaaaaaacatccctcttaacttcttttcacctcttctcttggggaggaagatgagtagattcagagtgaagcttggtagggtctaaggtctctcatgtgttatgatgtcttttttagtgctgatggtggtaattgacaggacagagagttgaagaagagagtcagtacagagcttcacagaccttcccagatgttgttttactgcgcagccctcacacacacgcctccaacacctgaaggacttgaaggatgggggcgcttgtgtggtctagaactgtttctcaaacttctggaagccattgacggggtttgcagaagttacaaaaccccattgatgaattagtaagattcagctataccaagcccatgaagctctaatttcagtctggcggttctacattatatcagctaatcatgtttccctccctaccctgcttttcttttttacttagtgcaattgagagctgtgtttttagtgctacacttcatgccttttcttcctttcctatttctttagctggactcttctaagctggtagttgagttcatttgactttcttgttaatagatttgagagatgctttccaaacaacctttcagtttctaagtcttgagaatatcatttactgtgcaagcatggtttgcgttgtactgggtcagttaaacgtaacaccttttgtgcttgttttaggatcctgatggtgaacatgccaggagagcaatgcaaaaggtgatggctacgactggtgggatgggtatgggaccaggtggcccaggaatgattactatcccacccagtatcctaaataatcccaacatcccaaatgagattatccatgcattacaggctggaagacttggaagcacagtatttgtagcaaatgtaagtaaacagaaccatcgtctaaagtagaaaatcagaactttatgaaatgaccttgtcaatatgttataaaagtaattctcacatttgagaagaaaaatgtaaagaagggttttgttcttgatttctttaaaaatcagccttataggcgggctttgtctgcattcctaagtcacaggcttgaccgtggtctcgttggggctgtgattcctgagtttcgcaggtgtttccacaagcagtaaccgagtctgcattctccgttggtttattttatgcagttttggtgcagagtaagactgtacgagcagaagtgcactgacaccttcctcttgttgtgtctggggtgaatgataatacctccaccatctgcaaggggaaatatttagaataaagtaggttgggtggggtggggagtggtaaagcttatcagggaaacaattttttaaaaatgttcagaaaatgagtattaatttgaagtatgaggtgacttaagtttctgagaaaagagacaatatatttactataggtacagtttatttacagtgaaggccaggctttataatcctattttaaaatttccattgcagttgattagtttttgtgacattatttcctaatacttttttccaaccaaagcatgtatcattcatgtagtaaaaatgttgtgtttcttaagatgtttacattgaggtttttaccccgttctctctcgattagctggattataaagttggctggaagaaactgaaggaagtatttagtatggctggtgtggtggtccgagcagacattcttgaagataaagatggaaaaagtcgtggaataggcactgttacttttgaacagtccattgaagctgtgcaagctatatgtatccttctgcaggaattcaacttatgaacagtttgacctaaattgctgtgttagtaatgtaggtttgtgtgaggaagaggtgactgtgtgtattcatgttttttatgtgactagggggagtgcattactgtggaattaagaggttctctgggccggaccggtcacggtggctcacgcctgtaatcccagcacttcgggaggccaaggcgggcggatcacttgaggtcagttcgagaccagcctggccaacatggtgaaaccccggctctactaaaaaatgcaaaaattagctgggcgcagtggtgggtgcctgtaatcccagctactcgggaggctgaggcacaagaatcgcttgaacccgggaggtggaggttgcagtgagccgagattgcgccactgcacaccaccagcctgggtgatagagtgagactcagtctcaaaaaaaaaaaaaaaaaaaaaaaaaaaggttctctgggggtggaattgattcaatacagtgtggatagaggggatggttacaacatgggcatatgcccatgagtctttctactgttttcttttcagaagagtctaggtttgaaggaggaagtccaaagaatgtgctactagagagaaagtggggttgttgtttcatgtgtaatacatccttataggacctcactctttccagtgagtagacatcattttggagaggccacttctccttgaccctaggcttagcctagagtttttaatcccttggagagtaccccacaggagcacattcatacaactcagacaagaccgtcactgcatgtcttacccagaaaacatggtccttcagtttagatagtggtagatgcctggcccattggtcacattcagagaaccttgatgccactgcttaagaggatggtttggtgaaattgtaaggttacgaatgaagcttcacacctaaggaataagcagaagttgtcttgtcctccccgccagctttatttattgttccttttatgtttattgttgaaagtataatgaagaattgaaattgctcataaattcatcacttagagggactggtagcagttggagtatttttctttctttttgtatttctcttgtgcacatttttagaattgcaagaaatagccttaattgtaataccagctatgttcaatggccagctgctatttgatagaccaatgcacgtcaagatggatgagagggccttaccaaaaggagatttcttccctcctgagcgtccacaacaacttccccatggccttggtggtattggcatggggttaggaccaggagggcaacccattgatgccaatcacctgaataaaggcatcggaatgggaaacataggtcccgcaggtgagaatgacagtgcaccttgcttggtggtttggggaagtgaaaattattaattattggggcaactggactttgagtagtttaaatggaataaatatttaactgggacaaaattccctccttattcatctctgcctcattttgaataaaggcagtattttgtatttttatcaagttgagtcattttttaaaaagtcattatgctttttcattgtaacctcacaacaaccttctaagctgaaatagttgtgccatttgataagaggaggcaagccatagagttgatcttgctcaaggtcacactgtcagttactgacaggctgcaggtctcctgaccacgggaccatagcactgccgcagtgccctgaaaagtgtcttaccaagacccctttgggccctcctggtgtttgcacagctgctgctagagagctaggggcattgacagatgcaaaaaaggtggagaggccaggcacggtggctcacgcctgtaatcccagcactttgggaggccgaggtgggcggatcacaaggtcaggagtttgagaccatcctggccaacatggtgaaaccccatctctactaaaaataaaacaattagccgggcgtggtggcgcacgcctgtaatcccagttactcaagaggctgaggcaggagaattgcttgaacccgggaggcggaggttgcagtgagctgagatcacatgactgcacttcagcctggcaacagagcgagagtccgtctccagaa

SEQ ID NO: 299854 - DNA, 2287 bp, Homo sapiens
ccttcttgccgatcctcctctgagggtcccgccctctcgcgctgctcagtcccaaatgtctcctttgataagcacccataacacaggcccacctgctctgacagactcctctgcaggccttccctctccgctgactcattccctgagaaggaccactattcatcacccatctgcctcatcccaatgtctcctttggccacgctctctccataggaccctaccatgattctggagagtgcattttacatgcatgtcttttgatgtgaaatggcagtcacttaaagacctggttaaagaaaaagttggtgaggtaacatacgtggagctcttaatggacgctgaaggaaagtcaaggggatgtgctctgagagaatttcttctgtggatttactacatgaaaaatgtaactgtatggtggcgtggaatcgaatgaaatcaggaaggcagtgagtgctcatgttacagtagctatgtttgattttgccaaacatttgagtggggtgggaggggatttgcaaatgggagtcccgcttttccaaatggctggccaaagagctttttggtattctgtttggatgcccaatttggataactggggaccaatagcagcattgtctctttgttaacagaggaattggctgtgtgtgaattatgcatggaattttagcggtggtataattaatgtaaaacgtgtgttcttgtctagaaaatgttactcttggttgtttgctgaatttgaaagttgtgtgaaccaaagattccgaaaagttgcctttgtgccagtaaattgtaaaccaaatattaaaaacctgaatgttcaaaattggcctagtttaaagagaacataaactattttctgtcgtgcaatagaatggcttagaataatcaaaaggatgagcttaacttacggaagggatggatttaggaggaatatggtaaggactcgattgagtacagagggaagcagatctaaagttggtgtgatttcttggagaccctgaatttaggtctgcttattaaatgtcagcagctctagtgcaatgctggtaacgcgtaggagaaggagatattaaggagcccagcttttaacaaggaaggcgaggcgaggcacttctgtcagcttccccttagaagggttcattttaaaagactaactttgtgacataaatcatatttttagtttgtttataactgtcattggtatttactatttttttcttttctttttccccttccttgctcttctgactggtctctggcttcctccaaagggatgtgcgtaagtatcgtctagttacttattggtatttgagccttctaacttgtaggactggtttcactcgactcgtttccttttgactctatagtgttgttgaattcaagatggaagagagcatgaaaaaagctgcggaagtcctaaacaagcatagtctgagcggaagaccactgaaagtcaaagaagatcctgatggtgaacatgccaggagagcaatgcaaaaggtgatggctacgactggtgggatgggtatgggaccaggtggcccaggaatgattactatcccacccagtatcctaaataatcccaacatcccaaatgagattatccatgcattacaggctggaagacttggaagcacagtatttgtagcaaatctggattataaagttggctggaagaaactgaaggaagtatttagtatggctggtgtggtggtccgagcagacattcttgaagataaagatggaaaaagtcgtggaataggcactgttacttttgaacagtccattgaagctgtgcaagctatatctatgttcaatggccagctgctatttgatagaccaatgcacgtcaagatggatgagagggccttaccaaaaggagatttcttccctcctgagcgtccacaacaacttccccatggccttggtggtattggcatggggttaggaccaggagggcaacccattgatgccaatcacctgaataaaggcatcggaatgggaaacataggtcccgcaggaatgggaatggaaggcataggatttggaataaataaaatgggaggaatggaggggccctttggtggtggtatggaaaacatgggtcgatttggatctgggatgaacatgggcaggataaatgcggggtcgaaacggcggcggaggtggcggcgacggagatccaaatggaggaagagagcggcgcgcccggcgtgccgagcggcaacggggctccgggccctaagggtgaaggagaacgacctgctccgaatgagaagaggaagga

SEQ ID NO: 299855 - DNA, 3586 bp, Homo sapiens
  misc_feature (2162)..(2162): n is a, c, g, or t
  misc_feature (2337)..(2337): n is a, c, g, or t
ccttcttgccgatcctcctctgagggtcccgccctctcgcgctgctcagtcccaaatgtctcctttgataagcacccataacacaggcccacctgctctgacagactcctctgcaggccttccctctccgctgactcattccctgagaaggaccactattcatcacccatctgcctcatcccaatgtctcctttggccacgctctctccataggaccctaccatgattctggagagtgcattttacatgcatgtcttttgatgtgaaatggcagtcacttaaagacctggttaaagaaaaagttggtgaggtaacatacgtggagctcttaatggacgctgaaggaaagtcaaggggatgtgctctgagagaatttcttctgtggatttactacatgaaaaatgtaactgtatggtggcgtggaatcgaatgaaatcaggaaggcagtgagtgctcatgttacagtagctatgtttgattttgccaaacatttgagtggggtgggaggggatttgcaaatgggagtcccgcttttccaaatggctggccaaagagctttttggtattctgtttggatgcccaatttggataactggggaccaatagcagcattgtctctttgttaacagaggaattggctgtgtgtgaattatgcatggaattttagcggtggtataattaatgtaaaacgtgtgttcttgtctagaaaatgttactcttggttgtttgctgaatttgaaagttgtgtgaaccaaagattccgaaaagttgcctttgtgccagtaaattgtaaaccaaatattaaaaacctgaatgttcaaaattggcctagtttaaagagaacataaactattttctgtcgtgcaatagaatggcttagaataatcaaaaggatgagcttaacttacggaagggatggatttaggaggaatatggtaaggactcgattgagtacagagggaagcagatctaaagttggtgtgatttcttggagaccctgaatttaggtctgcttattaaatgtcagcagctctagtgcaatgctggtaacgcgtaggagaaggagatattaaggagcccagcttttaacaaggaaggcgaggcgaggcacttctgtcagcttccccttagaagggttcattttaaaagactaactttgtgacataaatcatatttttagtttgtttataactgtcattggtatttactatttttttcttttctttttccccttccttgctcttctgactggtctctggcttcctccaaagggatgtgcgtaagtatcgtctagttacttattggtatttgagccttctaacttgtaggactggtttcactcgactcgtttccttttgactctatagtgttgttgaattcaagatggaagagagcatgaaaaaagctgcggaagtcctaaacaagcatagtctgagcggaagaccactgaaagtcaaagaagtaagctcttgcttaacactgcggatactgtgtgtaattgttgagtgatcctactttggaattagggaaagacggtcatggtcccagacggcatttacaaagcaagtgccagcctgttgtttctaatgaagagtgtcggtcatagcctacagcagccattccctgcaaggactttggggtggtggccaagcagatcctgagtggctgctgaccaccttctaatatctgtgatttgtctgaggccttgttgtctcagggactctcaaaccatgagcccgtgggtttgtgccattaagttttactccatctgacccttcttcttggcccatcttttttctttttttaaaaagtgagtttgttccagcctgggcaacatggtgaaaccccctctctacaaaaggtacaaaaattagccaggcatggtggcgcatgcctgtagtcctagctacttgggaggctgaggcaggaggatcatttgagcccaggatgtggaggttgcagtgagctgagattgcaccattgcactccagcccgggcaacagtgagaccctgtctaaaaaataaaaaataaagtgagtttgttattcctcaaacctgctttcacatctcatctgaatcaaatatattccttgaggaagaaggtttttttgttgattaaatccctcttggctgggcgcagtggctcacgcctgtaatccccngcactttgggaggctgaggtgggtggatcaaggtcatgagttcaagaccagcttgaccaacatggtgaaaccctgtctactaaaaatacaaaaaattagctgggcgtagtggggggtgcctgtaatccatctactcgggaggctgaggcaggagaatcgctggaacccaggaggnggaggttgcagtgagccgagatcgcgccattgaactccagcctgggcagtaagagcaaagctctgtctcaaaaaaacatccctcttaacttcttttcacctcttctcttggggaggaagatgagtagattcagagtgaagcttggtagggtctaaggtctctcatgtgttatgatgtcttttttagtgctgatggtggtaattgacaggacagagagttgaagaagagagtcagtacagagcttcacagaccttcccagatgttgttttactgcgcagccctcacacacacgcctccaacacctgaaggacttgaaggatgggggcgcttgtgtggtctagaactgtttctcaaacttctggaagccattgacggggtttgcagaagttacaaaaccccattgatgaattagtaagattcagctataccaagcccatgaagctctaatttcagtctggcggttctacattatatcagctaatcatgtttccctccctaccctgcttttcttttttacttagtgcaattgagagctgtgtttttagtgctacacttcatgccttttcttcctttcctatttctttagctggactcttctaagctggtagttgagttcatttgactttcttgttaatagatttgagagatgctttccaaacaacctttcagtttctaagtcttgagaatatcatttactgtgcaagcatggtttgcgttgtactgggtcagttaaacgtaacaccttttgtgcttgttttaggatcctgatggtgaacatgccaggagagcaatgcaaaaggtgatggctacgactggtgggatgggtatgggaccaggtggcccaggaatgattactatcccacccagtatcctaaataatcccaacatcccaaatgagattatccatgcattacaggctggaagacttggaagcacagtatttgtagcaaatctggattataaagttggctggaagaaactgaaggaagtatttagtatggctggtgtggtggtccgagcagacattcttgaagataaagatggaaaaagtcgtggaataggcactgttacttttgaacagtccattgaagctgtgcaagctatatgtatccttctgcaggaattcaacttatgaacagtttgacctaaattgctgtgttagtaatgtaggtttgtgtgaggaagaggtgactgtgtgagccactgcgctggccaagggcaccatcttttagtagttatgtagatatag

SEQ ID NO: 299856 - DNA, 441 bp, Homo sapiens
gaagaattgaaattgctcataaattcatcacttagagggactggtagcagttggagtatttttctttctttttgtatttctcttgtgcacatttttagaattgcaagaaatagccttaattgtaataccagctatgttcaatggccagctgctatttgatagaccaatgcacgtcaagatggtaagtcagtaggatctttctctgtgatatactcaagtctagcaaaaacatggaattaataagagtgtacatatagccactatgaaatatttgtggattagtctaagttaaatagggtgcagtatgttgagcaaaattgtgagagaaataacattttgctggtcaggcgtggtggttcacgcctgtaatcccagcactttgggagtctgaggcaggcggatcatgaggtcagtagttcgacaccagcctgaccaacgtgg

SEQ ID NO: 299857 - DNA, 1232 bp, Homo sapiens
gaaatgagttttctaaggtgtggagattttgacttgatcttttagtcttagaaaaactaagatcctaaacctgtagtttcagaatgcaaaagaagaagctagtgtgctaccttatgttgagacagtatttctttttggtggtggtatctttgccatggccctgtgtcttatttcagatgcattatcctcgtaccgtgactcccacactaacagagtactgacctctccaccgtttcgcctcatgcctttccctccttcctctcctagactgctggttaccttggctgggagagaggatgtagtgggacattcctgtaacactttatccgcacatctactggaaatcgttaccatgttaataacttggttttgaattcatgttaacatgtgtacccatgaacatttttcattttcttttcatagtgcgatacataggtgcatgacagcattaacctggggacgtagaatatgatcaaggcagcattactgctttaactttagaatgacttactatttattaatttaaacagactgctgtttccacaaccttagcattgaaggtctttcattttctcccatcaagctatgttagtttaggtaatgtagaaatatttaccctctggcttaagctggtttagagtaactaactagagctatagtttgcatgggaaagtctgcacgagcttcttgtcagatatttcttgctcttctgtcgcattacttactaaacctcccaactctcatcatattcttcatttaaccacctcctacatgttttcttttggaccatggcctaaaatttaattgtttgtgttttacttgcgttggatttcaaatattatttgatgcttatttttgttttgtgtcttcttgtttctgatttttactctgtcacggctccatctcttacatgtagcttatgtctatgtccttttaacatccccccatcagcctccccctccccctcctgcctctgcctcaccctctgctgttcccaacggcccccagtctcccaagcagcaaaaggaacccctctcccaccgcttcaacgagttcatgacctccaaacccaaaatccactgcttcaggagcctaaagcgtggggtaagttctgctccggaatcctgtctctctggcgtgctttggttgcatgtttggttctgcataactaattttgtttgtgaatgaatccattgtgttttcccataacatataaaaaagttaaaaaaaaa

SEQ ID NO: 299858 - DNA, 757 bp, Homo sapiens
tgagacgggagtccgctctattgttcagactgcattccagcctgggtgacagagtgagactccgtctaaaaaaaaaagattaacacttaaaacagtgaaatgggaatcggaaactggttcttttgatgatttaaaggaaaatctctgttttaccataatcagcagtatgaattttatttcttactcctcaaacgtgtgctcagcaaatctttgttaaaaaaaatttcccaaatgatgtgtttattttcctgaggttaaaccacatacatatacccactagaagcaatcgtaaagaaatagagaaatagttttgcttccctcacttttggtcattctgttcttagggtcagaattaatgttccttcctctaggacatagcagtgcaaaaaaagaggaagcacaagctcaaaaagcaaatctaaagtttggagaaatagatttcatttttaagcagtctcaacatggatcttgcatgggacatccatggcatggctgacagcttccgtgaccaacatgactcagtctttctgttttcacaaagaactcatgaagaggacgatagggaaacccacgtatgcctttgaggctagggactatgttgtaagttcacctgtgatggccaggtcatacagtcatggcacagccactaaccccattcacagcaccaagactggggacccagaggcacttgttatgcttccacactacgaaatgaaattcttaattgagagaactggacaccaggaaaaaaaaaaaa

SEQ ID NO: 299859 - DNA, 809 bp, Homo sapiens
ataatttaactagaaaaagttcctgagagaataacaaatctgtgattttattatgtcttttatcatgttttgcagctttcagattcagatgtcaataatttgtttctatgatcagagtatataaatcccatgcaaacatatctcagcataactgattttgtttctaaataattaaacaggataaaatgttatttgttgtaagctgttgacatttgtaaggaaattttgtttcactgaatatgtttagagatgccgccagaacattaaccattgtttcatttttatgtaagttgaagaaaaatgaagctagatagcatgttctccatttgcagtctacaaaggggaattttattgcttaaattaaagtttcattttctggcctgtgcaagagacttttatatctaaaatatggatgtacgtttttcatattttagagttcattgtatggaaaaataccatcaaagttgaccaaaagattttgaaaatccttaccagttgtttgtcatatgttaaagtcttatggttaattttatttattttatcttgttctcttgctggttattggcagactcagtctttctgttttcacaaagaactcatgaagaggacgatagggaaacccacgtatgcctttgaggctagggactatgttgtaagttcacctgtgatggccaggtcatacagtcatggcacagccactaaccccattcacagcaccaagactggggacccagaggcacttgttatgcttccacactacgaaatgaaattcttaattgagagaactggacaccaggaaaaaaaaaaaa

SEQ ID NO: 299860 - DNA, 566 bp, Homo sapiens
catggaaaatattagtactactttgatcagtttgacaacttagaaaaacacacacagtggggaattgatattcttgagaaatatatcaagtttgtgaaagaaaggacagagattgaactcagctatgcaaagcaactcaggaatctttcaaagaagtaccaacctaaaaagaactcgaaggaggaagaagaatacaagtatacgtcatgtaaagctttcatttccaacctgaacgaaatgaatgattacgcagggcaatcacttgaggtcagaagttcgagaccagcctggcaacgtgatgaaaccccttctctactaaaaatataaaatacattttaaaaaattagctgggcatgatggtgcatgcctgtaatcccagctactcaggaggctgaggtacaagaattgctcgaacctgggaggcggaggttgcagtgagctgagatggcaccactgcactctagcctgggtgacagagtgagaccctgtctcaaaaaaaaaaagaaaaaaaaagaagaggccaggcgcggtggctcatgcctgtaatcccagcactttgggaggcc

SEQ ID NO: 299861 - DNA, 5883 bp, Homo sapiens
  misc_feature (5427)..(5427): n is a, c, g, or t
  misc_feature (5431)..(5432): n is a, c, g, or t
  misc_feature (5434)..(5434): n is a, c, g, or t
  misc_feature (5440)..(5440): n is a, c, g, or t
  misc_feature (5442)..(5442): n is a, c, g, or t
  misc_feature (5445)..(5445): n is a, c, g, or t
  misc_feature (5448)..(5448): n is a, c, g, or t
  misc_feature (5451)..(5451): n is a, c, g, or t
  misc_feature (5453)..(5453): n is a, c, g, or t
  misc_feature (5456)..(5456): n is a, c, g, or t
  misc_feature (5460)..(5460): n is a, c, g, or t
  misc_feature (5465)..(5465): n is a, c, g, or t
  misc_feature (5471)..(5471): n is a, c, g, or t
  misc_feature (5473)..(5473): n is a, c, g, or t
  misc_feature (5477)..(5477): n is a, c, g, or t
  misc_feature (5481)..(5481): n is a, c, g, or t
  misc_feature (5486)..(5486): n is a, c, g, or t
  misc_feature (5490)..(5490): n is a, c, g, or t
  misc_feature (5493)..(5493): n is a, c, g, or t
  misc_feature (5497)..(5498): n is a, c, g, or t
  misc_feature (5501)..(5501): n is a, c, g, or t
  misc_feature (5511)..(5511): n is a, c, g, or t
  misc_feature (5517)..(5517): n is a, c, g, or t
cggccgcggctgctgcttcctcgggccattttgctgtggagcggcggggaggaggagccgccgaggagaccccgggcgaggagctgcgagccggaggaggccgcgcggactccgggctttccgccgtcgcggggatctcggggggcaaagggatcgccggggagggggaccagagagccgcgcccgccgcgcggagcgccccttcgcgtcccctgcaccatgagctggggcaccgagctctgggatcagtttgacaacttagaaaaacacacacagtggggaattgatattcttgagaaatatatcaagtttgtgaaagaaaggacagagattgaactcagctatgcaaagcaactcaggaatctttcaaagaagtaccaacctaaaaagaactcgaaggaggaagaagaatacaagtatacgtcatgtaaagctttcatttccaacctgaacgaaatgaatgattacgcagggcagcatgaagttatctccgagaacatggcatcacagatcattgtggacttggcacgctatgttcaggaactgaaacaggagaggaaatcaaactttcacgatggccgtaaagcacagcagcacatcgagacttgctggaagcagcttgaatctagtaaaaggcgatttgaacgcgattgcaaagaggcggacagggcgcagcagtactttgagaaaatggacgctgacatcaatgtcacaaaagcggatgttgaaaaggcccgacaacaagctcaaatacgtcaccaaatggcagaggacagcaaagcagattactcatccattctccagaaattcaaccatgagcagcatgaatattaccatactcacatccccaacatcttccagaaaatacaagagatggaggaaaggaggattgtgagaatgggagagtccatgaagacatatgcagaggttgatcggcaggtgatcccaatcattgggaagtgcctggatggaatagtaaaagcagccgaatcaattgatcagaaaaatgattcacagctggtaatagaagcttataaatcagggtttgagcctcctggagacattgaatttgaggattacactcagccaatgaagcgcactgtgtcagataacagcctttcaaattccagaggagaaggcaaaccagacctcaaatttggtggcaaatccaaaggaaagttatggccgttcatcaaaaaaaataagctatgtccttttaacatccccccatcagcctccccctccccctcctgcctctgcctcaccctctgctgttcccaacggcccccagtctcccaagcagcaaaaggaacccctctcccaccgcttcaacgagttcatgacctccaaacccaaaatccactgcttcaggagcctaaagcgtgggggtgcaacaccggaggatttcagcaacctcccacctgaacaaagaaggaaaaagctgcagcagaaagtcgatgagttaaataaagaaattcagaaggagatggatcaaagagatgccataacaaaaatgaaagatgtctacctaaagaatcctcagatgggagacccagccagtttggatcacaaattagcagaagtcagccaaaatatagagaaactgcgagtagagacccagaaatttgaggcctggctggctgaggttgaaggccggctcccagcacgcaacgagcaggcgcgccggcagagcggactgtacgacagccagaacccacccacagtcaacaactgcgcccaggaccgtgagagcccagatggcagttacacagaggagcagagtcaggagagtgagatgaaggtgctggccacggattttgacgacgagtttgatgatgaggagcccctccctgccatagggacgtgcaaagctctctacacatttgaaggtcagaatgaaggaacgatttccgtagttgaaggagaaacattgtatgtcatagaggaagacaaaggcgatggctggacccgcattcggagaaatgaagatgaagagggttatgtccccacttcatatgtcgaagtctgtttggacaaaaatgccaaagattcctagaggggagtgcctgcgagcctcgggtgagccttcctggaggagcctccgtctgcttgttcccacaggcctccagcgccctgccctgtggacagcccacccctccgcagccccatccctgcggggcggtctctctctctctctccagcatgctccctgcggccctgccctcccgcccagcccgggccacctcgtgggggacaagtctcgccagcgcccacccccatggctcgggtcagtcctcatcgctccccctccccaccccgcgcaggccactgagacggtgggacacacgcccccacctgctccttcctgggccctcagtccacccgggctcgtcctggcagcccttccgcgcttcacacagtgccttttgtgaaagtgtcatcacgggtcccctgaggagacaaggcaggtccagcgcacatcaggcggactgagcactcgatgtcatccgtgtcgatgtcatccgtgtgtcccagactgcctgctgtagaaaacacttcctcctctcctgagtctgtgaagtcctcagtggtcctttttggattctaggcttgcacctcatactaaacattgaccctttcactatgccctcaacctgggagcatctggcaggcaggggggcaggtacacacacacccacaggcacacccaccagtacacacgcgtgcgcatacacacattttggtttgacgccctgttttcagtggcctggggaggtccacactggaagtcgaattccagctcgccttgttgactcgcctgtgtccaccggccatgaggagcccacgcctgtcctccccatcactttcctgtccctgagaactgtagatcatgcgcttgtgagcgaggccctcccctctgcaccagctcattgcaaagcgaacatcctctcctttccaggagccccaggattagcatctgaaaagggtagcacttccttttttgttgttgttttttttttttttttgagacgggagtctcgctctattgttcagactggagtgcagtggcatgatctcggctcactacaacctccacctcctgggttccagcgattctcctgcctcagcctcccaaatagctgtgattacaggcgtgcaccaccacgcccggctaatgtttgtatttttagtagagacagggtttcaccgtgttggtcaggctggtctcaaactcctgacctcaggtgatccgcccgcctcagcctcccaaagtgctgagattacaggtgtgagctaccgcaccccgccgaggttagcactttcatcaccaaagaccccgtgcctctcgtggtcctttgagggatcccgccgccaccacccttgtattttatcacgtgctcttcagggcatgtggaattcgttgagtttgcttttagagccaagtttctttccctgtgtgggtttttgaggaaaacctgaggtcccctaatctgtggccaccaccccccccccgccgccacgccttagagcagagcagcccctcctctcatttggtgcagaaacagtcaagaggaaccattggcctagagctcctgtgaccgagagcgccacggaagcctggggatgatgtcgggcagctttattctttgcttggctttggtaactaggtggtcccctcaagcatcctcagttcctcttgctgtttatgaatctaagacaaggaagtcctatagaagccaaagggacagggacggaaaggacaggtcccaagggatggggctgtctttacttgtggaaaccaggaaattgctcctctcagccaaccaaggttgaccacacaccacccttccggagcagctcagtcagccctcggggacgagaaaccacaagcgcagagacgctgaggcccaggcaggtgaagaggaagtggctttgggtttttaaagtaggtgagcgtgagcctctctgactgcttcttccccgggggggactgcaaaccgctcagggttgcggcagagccatggacttccggtccctgcaacgggtgacctaagcgtggtgcacccatcagtcacgcaggaggactgacttgacagacgaaagacaagcccggatgacacagggtgagaagagtcagggccgcacctctgtccctgcaaaccaacaggtgcatggtgagtgtggcagtccccacagctccacaatgggctcccccgccaacggggacgacagggatcttcaggaacttctgacctcaccaagtcaagtggaccactctccactccacgaggatgtgaaacggttctttaaaatgggattttagagcctcgggaatgcatgtgcgtcgcatctttcatattatgggtcaggatagattcatttcttgcaacatagtggaaaagatataagctgcagtaatttgctctttgaatgaccgtcacccccagtataggatatgcttgtatccccccgtcactcctccgcctgttttttaaacttttccaccacctgcgtccaaaaagaatgttatagcgagtgctcttaaatgttgaacctgggtgttgcttccgggccagtctgcgtggctccatgaaaagctcactgctgccccagccgggcttcttagaggaggtcagttgtcctatgtatcatcatttactctgggaatcctactgtgaaatcatgtctgtatttttctggagcagttcacatagagtagaatgtggaatttcccgtgaacgtctccttcctcccccgtatctgccgcctgtcacttcgccaccgtgctagaatactgttgtgttgtaagatgactaattttaaaagaacctgccctgaaaagttcttagaaacgcaatgaaagggaggaacttgtcctttacccagtttttcctttgtaggatgggaaagtataaaaaggcacagaaggttgtcatgggctgttccttgggggtttttatcctgctcaccgtggagataagcctgcggcttgtctaaccagcgcagcgcaaaggtctcaatgccttttggtaacatccgtcattgcagaagaaagtttacacgacgtcaaaaagtgacgttcatgctaagtgtttttccagaaatattggtttcatgtttcttattggctctgcctcctgtgcttatatcatccaaaaactttttaaaaaggtccagaattctattttaacctgatgttgagcacctttaaaacgttcgtatgtgtgttgcactaattctaaactttggaggcattttgctgtgtgaggccgatcgccactgtaaaggtcctagagttgcctgtttgtctctggagatggaattaaaccaaataaagagcttccactggaggcttgtattgaccttgtaactatatgttaatctcgtgttaaaataaaatataacttgtgaaaaaaaaaaaaaaanaaannanaaaaananaanaanaananaanaaanaaaanaaaaananaaanaaanaaaanaaanaanaaannaanaaaaaaaaanaacaanaaaaatttaaattaaataaaatttatttatacattcaaatttaaatctcatcttccaatttacccctataaaaacccatttaacaatcaactgactcgccttttacaacattcccaattgtaaaaaccttccctttaccaacctaaatcaccttgttcaaatcccccttattcacctgctaatacttaaaaacccccccgacgactttctaacaatttgcaccaaatggctatggaaatttaagctcacttttgttaccgctaaattttgtaaacactaatttttaccataagccgaactgcaatcccttatagtaacgtggctcccacgcccgggcacttttttaggggggccccccctgacctc

SEQ ID NO: 299862 - DNA, 5306 bp, Homo sapiens
attttcttctagctgctgtcaagtcagtgctgcagcagttcatgtgatagtgagagcgtgggggcatcctcaggtttcacagagcatcaaaagaactctgctatagtcacaaacaagcaccagctcatttgttactgagatcagtttgacaacttagaaaaacacacacagtggggaattgatattcttgagaaatatatcaagtttgtgaaagaaaggacagagattgaactcagctatgcaaagcaactcaggaatctttcaaagaagtaccaacctaaaaagaactcgaaggaggaagaagaatacaagtatacgtcatgtaaagctttcatttccaacctgaacgaaatgaatgattacgcagggcagcatgaagttatctccgagaacatggcatcacagatcattgtggacttggcacgctatgttcaggaactgaaacaggagaggaaatcaaactttcacgatggccgtaaagcacagcagcacatcgagacttgctggaagcagcttgaatctagtaaaaggcgatttgaacgcgattgcaaagaggcggacagggcgcagcagtactttgagaaaatggacgctgacatcaatgtcacaaaagcggatgttgaaaaggcccgacaacaagctcaaatacgtcaccaaatggcagaggacagcaaagcagattactcatccattctccagaaattcaaccatgagcagcatgaatattaccatactcacatccccaacatcttccagaaaatacaagagatggaggaaaggaggattgtgagaatgggagagtccatgaagacatatgcagaggttgatcggcaggtgatcccaatcattgggaagtgcctggatggaatagtaaaagcagccgaatcaattgatcagaaaaatgattcacagctggtaatagaagcttataaatcagggtttgagcctcctggagacattgaatttgaggattacactcagccaatgaagcgcactgtgtcagataacagcctttcaaattccagaggagaaggcaaaccagacctcaaatttggtggcaaatccaaaggaaagttatggccgttcatcaaaaaaaataagctatgtccttttaacatccccccatcagcctccccctccccctcctgcctctgcctcaccctctgctgttcccaacggcccccagtctcccaagcagcaaaaggaacccctctcccaccgcttcaacgagttcatgacctccaaacccaaaatccactgcttcaggagcctaaagcgtgggggtgcaacaccggaggatttcagcaacctcccacctgaacaaagaaggaaaaagctgcagcagaaagtcgatgagttaaataaagaaattcagaaggagatggatcaaagagatgccataacaaaaatgaaagatgtctacctaaagaatcctcagatgggagacccagccagtttggatcacaaattagcagaagtcagccaaaatatagagaaactgcgagtagagacccagaaatttgaggcctggctggctgaggttgaaggccggctcccagcacgcaacgagcaggcgcgccggcagagcggactgtacgacagccagaacccacccacagtcaacaactgcgcccaggaccgtgagagcccagatggcagttacacagaggagcagagtcaggagagtgagatgaaggtgctggccacggattttgacgacgagtttgatgatgaggagcccctccctgccatagggacgtgcaaagctctctacacatttgaaggtcagaatgaaggaacgatttccgtagttgaaggagaaacattgtatgtcatagaggaagacaaaggcgatggctggacccgcattcggagaaatgaagatgaagagggttatgtccccacttcatatgtcgaagtctgtttggacaaaaatgccaaagattcctagaggggagtgcctgcgagcctcgggtgagccttcctggaggagcctccgtctgcttgttcccacaggcctccagcgccctgccctgtggacagcccacccctccgcagccccatccctgcggggcggtctctctctctctctccagcatgctccctgcggccctgccctcccgcccagcccgggccacctcgtgggggacaagtctcgccagcgcccacccccatggctcgggtcagtcctcatcgctccccctccccaccccgcgcaggccactgagacggtgggacacacgcccccacctgctccttcctgggccctcagtccacccgggctcgtcctggcagcccttccgcgcttcacacagtgccttttgtgaaagtgtcatcacgggtcccctgaggagacaaggcaggtccagcgcacatcaggcggactgagcactcgatgtcatccgtgtcgatgtcatccgtgtgtcccagactgcctgctgtagaaaacacttcctcctctcctgagtctgtgaagtcctcagtggtcctttttggattctaggcttgcacctcatactaaacattgaccctttcactatgccctcaacctgggagcatctggcaggcaggggggcaggtacacacacacccacaggcacacccaccagtacacacgcgtgcgcatacacacattttggtttgacgccctgttttcagtggcctggggaggtccacactggaagtcgaattccagctcgccttgttgactcgcctgtgtccaccggccatgaggagcccacgcctgtcctccccatcactttcctgtccctgagaactgtagatcatgcgcttgtgagcgaggccctcccctctgcaccagctcattgcaaagcgaacatcctctcctttccaggagccccaggattagcatctgaaaagggtagcacttccttttttgttgttgttttttttttttttttgagacgggagtctcgctctattgttcagactggagtgcagtggcatgatctcggctcactacaacctccacctcctgggttccagcgattctcctgcctcagcctcccaaatagctgtgattacaggcgtgcaccaccacgcccggctaatgtttgtatttttagtagagacagggtttcaccgtgttggtcaggctggtctcaaactcctgacctcaggtgatccgcccgcctcagcctcccaaagtgctgagattacaggtgtgagctaccgcaccccgccgaggttagcactttcatcaccaaagaccccgtgcctctcgtggtcctttgagggatcccgccgccaccacccttgtattttatcacgtgctcttcagggcatgtggaattcgttgagtttgcttttagagccaagtttctttccctgtgtgggtttttgaggaaaacctgaggtcccctaatctgtggccaccaccccccccccgccgccacgccttagagcagagcagcccctcctctcatttggtgcagaaacagtcaagaggaaccattggcctagagctcctgtgaccgagagcgccacggaagcctggggatgatgtcgggcagctttattctttgcttggctttggtaactaggtggtcccctcaagcatcctcagttcctcttgctgtttatgaatctaagacaaggaagtcctatagaagccaaagggacagggacggaaaggacaggtcccaagggatggggctgtctttacttgtggaaaccaggaaattgctcctctcagccaaccaaggttgaccacacaccacccttccggagcagctcagtcagccctcggggacgagaaaccacaagcgcagagacgctgaggcccaggcaggtgaagaggaagtggctttgggtttttaaagtaggtgagcgtgagcctctctgactgcttcttccccgggggggactgcaaaccgctcagggttgcggcagagccatggacttccggtccctgcaacgggtgacctaagcgtggtgcacccatcagtcacgcaggaggactgacttgacagacgaaagacaagcccggatgacacagggtgagaagagtcagggccgcacctctgtccctgcaaaccaacaggtgcatggtgagtgtggcagtccccacagctccacaatgggctcccccgccaacggggacgacagggatcttcaggaacttctgacctcaccaagtcaagtggaccactctccactccacgaggatgtgaaacggttctttaaaatgggattttagagcctcgggaatgcatgtgcgtcgcatctttcatattatgggtcaggatagattcatttcttgcaacatagtggaaaagatataagctgcagtaatttgctctttgaatgaccgtcacccccagtataggatatgcttgtatccccccgtcactcctccgcctgttttttaaacttttccaccacctgcgtccaaaaagaatgttatagcgagtgctcttaaatgttgaacctgggtgttgcttccgggccagtctgcgtggctccatgaaaagctcactgctgccccagccgggcttcttagaggaggtcagttgtcctatgtatcatcatttactctgggaatcctactgtgaaatcatgtctgtatttttctggagcagttcacatagagtagaatgtggaatttcccgtgaacgtctccttcctcccccgtatctgccgcctgtcacttcgccaccgtgctagaatactgttgtgttgtaagatgactaattttaaaagaacctgccctgaaaagttcttagaaacgcaatgaaagggaggaacttgtcctttacccagtttttcctttgtaggatgggaaagtataaaaaggcacagaaggttgtcatgggctgttccttgggggtttttatcctgctcaccgtggagataagcctgcggcttgtctaaccagcgcagcgcaaaggtctcaatgccttttggtaacatccgtcattgcagaagaaagtttacacgacgtcaaaaagtgacgttcatgctaagtgtttttccagaaatattggtttcatgtttcttattggctctgcctcctgtgcttatatcatccaaaaactttttaaaaaggtccagaattctattttaacctgatgttgagcacctttaaaacgttcgtatgtgtgttgcactaattctaaactttggaggcattttgctgtgtgaggccgatcgccactgtaaaggtcctagagttgcctgtttgtctctggagatggaattaaaccaaataaagagcttccactggaggcttgtattgaccttgtaactatatgttaatctcgtgttaaaataaaatataacttgtg

SEQ ID NO: 299863 - DNA, 4263 bp, Homo sapiens
cagaaaccctccttttctatctgatctttggctctggcaatgtggagcctaagaaaaatgttattagggagcagcccttcttgtgaacttttgcacagatctgctacaagtcatttttataaatcagcgggtagacgtgtgtgttattttaatatggcggaactgaccaagttcctcttcttctgatgtgttgttgtttttttttctctttctctctctctttctctctatttttcccatacctctccaatttttacatgaagctttctctcaagctgggtgcaacaccggaggatttcagcaacctcccacctgaacaaagaaggaaaaagctgcagcagaaagtcgatgagttaaataaagaaattcagaaggagatggatcaaagagatgccataacaaaaatgaaagatgtctacctaaagaatcctcagatgggagacccagccagtttggatcacaaattagcagaagtcagccaagcctggctggctgaggttgaaggccggctcccagcacgcaacgagcaggcgcgccggcagagcggactgtacgacagccagaacccacccacagtcaacaactgcgcccaggaccgtgagagcccagatggcagttacacagaggagcagagtcaggagagtgagatgaaggtgctggccacggattttgacgacgagtttgatgatgaggagcccctccctgccatagggacgtgcaaagctctctacacatttgaaggtcagaatgaaggaacgatttccgtagttgaaggagaaacattgtatgtcatagaggaagacaaaggcgatggctggacccgcattcggagaaatgaagatgaagagggttatgtccccacttcatatgtcgaagtctgtttggacaaaaatgccaaagattcctagaggggagtgcctgcgagcctcgggtgagccttcctggaggagcctccgtctgcttgttcccacaggcctccagcgccctgccctgtggacagcccacccctccgcagccccatccctgcggggcggtctctctctctctctccagcatgctccctgcggccctgccctcccgcccagcccgggccacctcgtgggggacaagtctcgccagcgcccacccccatggctcgggtcagtcctcatcgctccccctccccaccccgcgcaggccactgagacggtgggacacacgcccccacctgctccttcctgggccctcagtccacccgggctcgtcctggcagcccttccgcgcttcacacagtgccttttgtgaaagtgtcatcacgggtcccctgaggagacaaggcaggtccagcgcacatcaggcggactgagcactcgatgtcatccgtgtcgatgtcatccgtgtgtcccagactgcctgctgtagaaaacacttcctcctctcctgagtctgtgaagtcctcagtggtcctttttggattctaggcttgcacctcatactaaacattgaccctttcactatgccctcaacctgggagcatctggcaggcaggggggcaggtacacacacacccacaggcacacccaccagtacacacgcgtgcgcatacacacattttggtttgacgccctgttttcagtggcctggggaggtccacactggaagtcgaattccagctcgccttgttgactcgcctgtgtccaccggccatgaggagcccacgcctgtcctccccatcactttcctgtccctgagaactgtagatcatgcgcttgtgagcgaggccctcccctctgcaccagctcattgcaaagcgaacatcctctcctttccaggagccccaggattagcatctgaaaagggtagcacttccttttttgttgttgttttttttttttttttgagacgggagtctcgctctattgttcagactggagtgcagtggcatgatctcggctcactacaacctccacctcctgggttccagcgattctcctgcctcagcctcccaaatagctgtgattacaggcgtgcaccaccacgcccggctaatgtttgtatttttagtagagacagggtttcaccgtgttggtcaggctggtctcaaactcctgacctcaggtgatccgcccgcctcagcctcccaaagtgctgagattacaggtgtgagctaccgcaccccgccgaggttagcactttcatcaccaaagaccccgtgcctctcgtggtcctttgagggatcccgccgccaccacccttgtattttatcacgtgctcttcagggcatgtggaattcgttgagtttgcttttagagccaagtttctttccctgtgtgggtttttgaggaaaacctgaggtcccctaatctgtggccaccaccccccccccgccgccacgccttagagcagagcagcccctcctctcatttggtgcagaaacagtcaagaggaaccattggcctagagctcctgtgaccgagagcgccacggaagcctggggatgatgtcgggcagctttattctttgcttggctttggtaactaggtggtcccctcaagcatcctcagttcctcttgctgtttatgaatctaagacaaggaagtcctatagaagccaaagggacagggacggaaaggacaggtcccaagggatggggctgtctttacttgtggaaaccaggaaattgctcctctcagccaaccaaggttgaccacacaccacccttccggagcagctcagtcagccctcggggacgagaaaccacaagcgcagagacgctgaggcccaggcaggtgaagaggaagtggctttgggtttttaaagtaggtgagcgtgagcctctctgactgcttcttccccgggggggactgcaaaccgctcagggttgcggcagagccatggacttccggtccctgcaacgggtgacctaagcgtggtgcacccatcagtcacgcaggaggactgacttgacagacgaaagacaagcccggatgacacagggtgagaagagtcagggccgcacctctgtccctgcaaaccaacaggtgcatggtgagtgtggcagtccccacagctccacaatgggctcccccgccaacggggacgacagggatcttcaggaacttctgacctcaccaagtcaagtggaccactctccactccacgaggatgtgaaacggttctttaaaatgggattttagagcctcgggaatgcatgtgcgtcgcatctttcatattatgggtcaggatagattcatttcttgcaacatagtggaaaagatataagctgcagtaatttgctctttgaatgaccgtcacccccagtataggatatgcttgtatccccccgtcactcctccgcctgttttttaaacttttccaccacctgcgtccaaaaagaatgttatagcgagtgctcttaaatgttgaacctgggtgttgcttccgggccagtctgcgtggctccatgaaaagctcactgctgccccagccgggcttcttagaggaggtcagttgtcctatgtatcatcatttactctgggaatcctactgtgaaatcatgtctgtatttttctggagcagttcacatagagtagaatgtggaatttcccgtgaacgtctccttcctcccccgtatctgccgcctgtcacttcgccaccgtgctagaatactgttgtgttgtaagatgactaattttaaaagaacctgccctgaaaagttcttagaaacgcaatgaaagggaggaacttgtcctttacccagtttttcctttgtaggatgggaaagtataaaaaggcacagaaggttgtcatgggctgttccttgggggtttttatcctgctcaccgtggagataagcctgcggcttgtctaaccagcgcagcgcaaaggtctcaatgccttttggtaacatccgtcattgcagaagaaagtttacacgacgtcaaaaagtgacgttcatgctaagtgtttttccagaaatattggtttcatgtttcttattggctctgcctcctgtgcttatatcatccaaaaactttttaaaaaggtccagaattctattttaacctgatgttgagcacctttaaaacgttcgtatgtgtgttgcactaattctaaactttggaggcattttgctgtgtgaggccgatcgccactgtaaaggtcctagagttgcctgtttgtctctggagatggaattaaaccaaataaagagcttccactggaggcttgtattgaccttgtaactatatgttaatctcgtgttaaaataaaatataacttgtg

SEQ ID NO: 299864 - DNA, 3507 bp, Homo sapiens
tgagcagcccagatggcagttacacagaggagcagagtcaggagagtgagatgaaggtgctggccacggattttgacgacgagtttgatgatgaggagcccctccctgccatagggacgtgcaaagctctctacacatttgaagattcctagaggggagtgcctgcgagcctcgggtgagccttcctggaggagcctccgtctgcttgttcccacaggcctccagcgccctgccctgtggacagcccacccctccgcagccccatccctgcggggcggtctctctctctctctccagcatgctccctgcggccctgccctcccgcccagcccgggccacctcgtgggggacaagtctcgccagcgcccacccccatggctcgggtcagtcctcatcgctccccctccccaccccgcgcaggccactgagacggtgggacacacgcccccacctgctccttcctgggccctcagtccacccgggctcgtcctggcagcccttccgcgcttcacacagtgccttttgtgaaagtgtcatcacgggtcccctgaggagacaaggcaggtccagcgcacatcaggcggactgagcactcgatgtcatccgtgtcgatgtcatccgtgtgtcccagactgcctgctgtagaaaacacttcctcctctcctgagtctgtgaagtcctcagtggtcctttttggattctaggcttgcacctcatactaaacattgaccctttcactatgccctcaacctgggagcatctggcaggcaggggggcaggtacacacacacccacaggcacacccaccagtacacacgcgtgcgcatacacacattttggtttgacgccctgttttcagtggcctggggaggtccacactggaagtcgaattccagctcgccttgttgactcgcctgtgtccaccggccatgaggagcccacgcctgtcctccccatcactttcctgtccctgagaactgtagatcatgcgcttgtgagcgaggccctcccctctgcaccagctcattgcaaagcgaacatcctctcctttccaggagccccaggattagcatctgaaaagggtagcacttccttttttgttgttgttttttttttttttttgagacgggagtctcgctctattgttcagactggagtgcagtggcatgatctcggctcactacaacctccacctcctgggttccagcgattctcctgcctcagcctcccaaatagctgtgattacaggcgtgcaccaccacgcccggctaatgtttgtatttttagtagagacagggtttcaccgtgttggtcaggctggtctcaaactcctgacctcaggtgatccgcccgcctcagcctcccaaagtgctgagattacaggtgtgagctaccgcaccccgccgaggttagcactttcatcaccaaagaccccgtgcctctcgtggtcctttgagggatcccgccgccaccacccttgtattttatcacgtgctcttcagggcatgtggaattcgttgagtttgcttttagagccaagtttctttccctgtgtgggtttttgaggaaaacctgaggtcccctaatctgtggccaccaccccccccccgccgccacgccttagagcagagcagcccctcctctcatttggtgcagaaacagtcaagaggaaccattggcctagagctcctgtgaccgagagcgccacggaagcctggggatgatgtcgggcagctttattctttgcttggctttggtaactaggtggtcccctcaagcatcctcagttcctcttgctgtttatgaatctaagacaaggaagtcctatagaagccaaagggacagggacggaaaggacaggtcccaagggatggggctgtctttacttgtggaaaccaggaaattgctcctctcagccaaccaaggttgaccacacaccacccttccggagcagctcagtcagccctcggggacgagaaaccacaagcgcagagacgctgaggcccaggcaggtgaagaggaagtggctttgggtttttaaagtaggtgagcgtgagcctctctgactgcttcttccccgggggggactgcaaaccgctcagggttgcggcagagccatggacttccggtccctgcaacgggtgacctaagcgtggtgcacccatcagtcacgcaggaggactgacttgacagacgaaagacaagcccggatgacacagggtgagaagagtcagggccgcacctctgtccctgcaaaccaacaggtgcatggtgagtgtggcagtccccacagctccacaatgggctcccccgccaacggggacgacagggatcttcaggaacttctgacctcaccaagtcaagtggaccactctccactccacgaggatgtgaaacggttctttaaaatgggattttagagcctcgggaatgcatgtgcgtcgcatctttcatattatgggtcaggatagattcatttcttgcaacatagtggaaaagatataagctgcagtaatttgctctttgaatgaccgtcacccccagtataggatatgcttgtatccccccgtcactcctccgcctgttttttaaacttttccaccacctgcgtccaaaaagaatgttatagcgagtgctcttaaatgttgaacctgggtgttgcttccgggccagtctgcgtggctccatgaaaagctcactgctgccccagccgggcttcttagaggaggtcagttgtcctatgtatcatcatttactctgggaatcctactgtgaaatcatgtctgtatttttctggagcagttcacatagagtagaatgtggaatttcccgtgaacgtctccttcctcccccgtatctgccgcctgtcacttcgccaccgtgctagaatactgttgtgttgtaagatgactaattttaaaagaacctgccctgaaaagttcttagaaacgcaatgaaagggaggaacttgtcctttacccagtttttcctttgtaggatgggaaagtataaaaaggcacagaaggttgtcatgggctgttccttgggggtttttatcctgctcaccgtggagataagcctgcggcttgtctaaccagcgcagcgcaaaggtctcaatgccttttggtaacatccgtcattgcagaagaaagtttacacgacgtcaaaaagtgacgttcatgctaagtgtttttccagaaatattggtttcatgtttcttattggctctgcctcctgtgcttatatcatccaaaaactttttaaaaaggtccagaattctattttaacctgatgttgagcacctttaaaacgttcgtatgtgtgttgcactaattctaaactttggaggcattttgctgtgtgaggccgatcgccactgtaaaggtcctagagttgcctgtttgtctctggagatggaattaaaccaaataaagagcttccactggaggcttgtattgaccttgtaactatatgttaatctcgtgttaaaataaaatataacttgtg

SEQ ID NO: 299865 - DNA, 3142 bp, Homo sapiens
cggccgcggctgctgcttcctcgggccattttgctgtggagcggcggggaggaggagccgccgaggagaccccgggcgaggagctgcgagccggaggaggccgcgcggactccgggctttccgccgtcgcggggatctcggggggcaaagggatcgccggggagggggaccagagagccgcgcccgccgcgcggagcgccccttcgcgtcccctgcaccatgagctggggcaccgagctctgggatcagtttgacaacttagaaaaacacacacagtggggaattgatattcttgagaaatatatcaagtttgtgaaagaaaggacagagattgaactcagctatgcaaagcaactcaggaatctttcaaagaagtaccaacctaaaaagaactcgaaggaggaagaagaatacaagtatacgtcatgtaaagctttcatttccaacctgaacgaaatgaatgattacgcagggcagcatgaagttatctccgagaacatggcatcacagatcattgtggacttggcacgctatgttcaggaactgaaacaggagaggaaatcaaactttcacgatggccgtaaagcacagcagcacatcgagacttgctggaagcagcttgaatctagtaaaaggcgatttgaacgcgattgcaaagaggcggacagggcgcagcagtactttgagaaaatggacgctgacatcaatgtcacaaaagcggatgttgaaaaggcccgacaacaagctcaaatacgtcaccaaatggcagaggacagcaaagcagattactcatccattctccagaaattcaaccatgagcagcatgaatattaccatactcacatccccaacatcttccagaaaatacaagagatggaggaaaggaggattgtgagaatgggagagtccatgaagacatatgcagaggttgatcggcaggtgatcccaatcattgggaagtgcctggatggaatagtaaaagcagccgaatcaattgatcagaaaaatgattcacagctggtaatagaagcttataaatcagggtttgagcctcctggagacattgaatttgaggattacactcagccaatgaagcgcactgtgtcagataacagcctttcaaattccagaggagaaggcaaaccagacctcaaatttggtggcaaatccaaaggaaagttatggccgttcatcaaaaaaaataagctatgtccttttaacatccccccatcagcctccccctccccctcctgcctctgcctcaccctctgctgttcccaacggcccccagtctcccaagcagcaaaaggaacccctctcccaccgcttcaacgagttcatgacctccaaacccaaaatccactgcttcaggagcctaaagcgtgggggtgcaacaccggaggatttcagcaacctcccacctgaacaaagaaggaaaaagctgcagcagaaagtcgatgagttaaataaagaaattcagaaggagatggatcaaagagatgccataacaaaaatgaaagatgtctacctaaagaatcctcagatgggagacccagccagtttggatcacaaattagcagaagtcagccaaaatatagagaaactgcgagtagagacccagaaatttgaggcctggctggctgaggttgaaggccggctcccagcacgcaacgagcaggcgcgccggcagagcggactgtacgacagccagaacccacccacagtcaacaactgcgcccaggaccgtgagagcccagatggcagttacacagaggagcagagtcaggagagtgagatgaaggtgctggccacggattttgacgacgagtttgatgatgaggagcccctccctgccatagggacgtgcaaagctctctacacatttgaaggtcagaatgaaggaacgatttccgtagttgaaggagaaacattgtatgtcatagaggaagacaaaggcgatggctggacccgcattcggagaaatgaagatgaagagggttatgtccccacttcatatgtcgaagtctgtttggacaaaaatgccaaaggtgctaagacttatatttaataccataaaaaaaaaaaacttaaaaaaaatggagttgtttctccccacaaccgtgactgttacaggcagttcctcaagagactggctggcaagcaccataatgcacgttctcctgtagtctcacgtggacttcagggtccgggcacctgaattgccttgtctagtttgggctgtaatcaagtttcacttgctgatgaaattttatgtggaaagctgccaaccgccaacttacagctatgtcattcaaaatctgataaacatttcttcttttggcggtatctgtagattaaaaaaaaagttgcattgtagcttctcatctttctgaatttaaaagccggcacgcatcatgcaggtgccaaagacttccctactcttgtttatatctagtatccaccatacactgagctacattaggtggttacagattgtaacttaataaactgaactgtgttagtttgttaaattgtatactcattcacttgggaggaagtcacaagtgaaataacatctccttcttgactaaagcagtaaataagattcttatattggcaccaaaagtgtgtgtttttacttaaacctggtcagcatccttggtagggcatcacgagtaccctgttccatctacatgatcccagacaaccagctgaaatctggaaaagtttggtgaattgaccacttgatttttacattgcattgctgattttccaagtgtcatcaaattgacaggtttttgttgttgtgtaagagtaaaaggtggtagatggtggtttggagacagagtctgggcaacaagagcaagactccatcccccaaaaaccccccaaaaaataacagacaaaagagaagcagttggagccacgagggtaccttgctcctgagagagatccaagtgagacagaagaagactagagagagagaccaaagatttatcccagtgagaaaatacttacattctgggagggaggagaaagaggcctggaggacttagagaggtcctagagagacagaggtaaacctggacattctgtgcagaaggagatggtttgaagcagaggagtgagggtcgggctttga

SEQ ID NO: 299866 - DNA, 5001 bp, Homo sapiens
  misc_feature (4336)..(4336): n is a, c, g, or t
  misc_feature (4340)..(4341): n is a, c, g, or t
  misc_feature (4343)..(4343): n is a, c, g, or t
  misc_feature (4349)..(4349): n is a, c, g, or t
  misc_feature (4351)..(4351): n is a, c, g, or t
  misc_feature (4354)..(4354): n is a, c, g, or t
  misc_feature (4357)..(4357): n is a, c, g, or t
  misc_feature (4360)..(4360): n is a, c, g, or t
  misc_feature (4362)..(4362): n is a, c, g, or t
  misc_feature (4365)..(4365): n is a, c, g, or t
  misc_feature (4369)..(4369): n is a, c, g, or t
  misc_feature (4374)..(4374): n is a, c, g, or t
  misc_feature (4380)..(4380): n is a, c, g, or t
  misc_feature (4382)..(4382): n is a, c, g, or t
  misc_feature (4386)..(4386): n is a, c, g, or t
  misc_feature (4390)..(4390): n is a, c, g, or t
  misc_feature (4395)..(4395): n is a, c, g, or t
  misc_feature (4399)..(4399): n is a, c, g, or t
  misc_feature (4402)..(4402): n is a, c, g, or t
  misc_feature (4406)..(4407): n is a, c, g, or t
  misc_feature (4410)..(4410): n is a, c, g, or t
  misc_feature (4420)..(4420): n is a, c, g, or t
  misc_feature (4426)..(4426): n is a, c, g, or t
cggccgcggctgctgcttcctcgggccattttgctgtggagcggcggggaggaggagccgccgaggagaccccgggcgaggagctgcgagccggaggaggccgcgcggactccgggctttccgccgtcgcggggatctcggggggcaaagggatcgccggggagggggaccagagagccgcgcccgccgcgcggagcgccccttcgcgtcccctgcaccatgagctggggcaccgagctctgggatcagtttgacaacttagaaaaacacacacagtggggaattgatattcttgagaaatatatcaagtttgtgaaagaaaggacagagattgaactcagctatgcaaagcaactcaggaatctttcaaagaagtaccaacctaaaaagaactcgaaggaggaagaagaatacaagtatacgtcatgtaaagctttcatttccaacctgaacgaaatgaatgattacgcagggcagcatgaagttatctccgagaacatggcatcacagatcattgtggacttggcacgctatgttcaggaactgaaacaggagaggaaatcaaactttcacgatggccgtaaagcacagcagcacatcgagacttgctggaagcagcttgaatctagtaaaaggcgatttgaacgcgattgcaaagaggcggacagggcgcagcagtactttgagaaaatggacgctgacatcaatgtcacaaaagcggatgttgaaaaggcccgacaacaagctcaaatacgtcaccaaatggcagaggacagcaaagcagattactcatccattctccagaaattcaaccatgagcagcatgaatattaccatactcacatccccaacatcttccagaaaatacaagagatggaggaaaggaggattgtgagaatgggagagtccatgaagacatatgcagaggttgatcggcaggtgatcccaatcattgggaagtgcctggatggaatagtaaaagcagccgaatcaattgatcagaaaaatgattcacagctggtaatagaagcttataaatcagggtttgagcctcctggagacattgaatttgaggattacactcagccaatgaagcgcactgtgtcagataacagcctttcaaattccagaggagaaggcaaaccagacctcaaatttggtggcaaatccaaaggaaagttatggccgttcatcaaaaaaaataagctatgtccttttaacatccccccatcagcctccccctccccctcctgcctctgcctcaccctctgctgttcccaacggcccccagtctcccaagcagcaaaaggaacccctctcccaccgcttcaacgagttcatgacctccaaacccaaaatccactgcttcaggagcctaaagcgtgggggtgcaacaccggaggatttcagcaacctcccacctgaacaaagaaggaaaaagctgcagcagaaagtcgatgagttaaataaagaaattcagaaggagatggatcaaagagatgccataacaaaaatgaaagatgtctacctaaagaatcctcagatgggagacccagccagtttggatcacaaattagcagaagtcagccaaaatatagagaaactgcgagtagagacccagaaatttgaggcctggctggctgaggttgaaggccggctcccagcacgcaacgagcaggcgcgccggcagagcggactgtacgacagccagaacccacccacagtcaacaactgcgcccaggaccgtgagagcccagatggcagttacacagaggagcagagtcaggagagtgagatgaaggtgctggccacggattttgacgacgagtttgatgatgaggagcccctccctgccatagggacgtgcaaagctctctacacatttgaaggtcagaatgaaggaacgatttccgtagttgaaggagaaacattgtatgtcatagaggaagacaaaggcgatggctggacccgcattcggagaaatgaagatgaagagggttatgtccccacttcatatgtcgaagtctgtttggacaaaaatgccaaagattcctagaggggagtgcctgcgagcctcgggtgagccttcctggaggagcctccgtctgcttgttcccacaggcctccagcgccctgccctgtggacagcccacccctccgcagccccatccctgcggggcggtctctctctctctctccagcatgctccctgcggccctgccctcccgcccagcccgggccacctcgtgggggacaagtctcgccagcgcccacccccatggctcgggtcagtcctcatcgctccccctccccaccccgcgcaggccactgagacggtgggacacacgcccccacctgctccttcctgggccctcagtccacccgggctcgtcctggcagcccttccgcgcttcacacagtgccttttgtgaaagtgtcatcacgggtcccctgaggagacaaggcaggtccagcgcacatcaggcggactgagcactcgatgtcatccgtgtcgatgtcatccgtgtgtcccagactgcctgctgtagaaaacacttcctcctctcctgagtctgtgaagtcctcagtggtcctttttggattctaggcttgcacctcatactaaacattgaccctttcactatgccctcaacctgggagcatctggcaggcaggggggcaggtacacacacacccacaggcacacccaccagtacacacgcgtgcgcatacacacattttggtttgacgccctgttttcagtggcctggggaggtccacactggaagtcgaattccagctcgccttgttgactcgcctgtgtccaccggccatgaggagcccacgcctgtcctccccatcactttcctgtccctgagaactgtagatcatgcgcttgtgagcgaggccctcccctctgcaccagctcattgcaaagcgaacatcctctcctttccaggagccccaggattagcatctgaaaagggtagcacttccttttttgttgttgttttttttttttttttgagacgggagtctcgctctattgttcagactggagtgcagtggcatgatctcggctcactacaacctccacctcctgggttccagcgattctcctgcctcagcctcccaaatagctgtgattacaggcgtgcaccaccacgcccggctaatgtttgtatttttagtagagacagggtttcaccgtgttggtcaggctggtctcaaactcctgacctcaggtgatccgcccgcctcagcctcccaaagtgctgagattacaggtgtgagctaccgcaccccgccgaggttagcactttcatcaccaaagaccccgtgcctctcgtggtcctttgagggatcccgccgccaccacccttgtattttatcacgtgctcttcagggcatgtggaattcgttgagtttgcttttagagccaagtttctttccctgtgtgggtttttgaggaaaacctgaggtcccctaatctgtggccaccaccccccccccgccgccacgccttagagcagagcagcccctcctctcatttggtgcagaaacagtcaagaggaaccattggcctagagctcctgtgaccgagagcgccacggaagcctggggatgatgtcgggcagctttattctttgcttggctttggtaactaggtggtcccctcaagcatcctcagttcctcttgctgtttatgaatctaagacaaggaagtcctatagaagccaaagggacagggacggaaaggacaggtcccaagggatggggctgtctttacttgtggaaaccaggaaattgctcctctcagccaaccaaggttgaccacacaccacccttccggagcagctcagtcagccctcggggacgagaaaccacaagcgcagagacgctgaggcccaggcaggtgaagaggaagtggctttgggtttttaaagtaggtgagcgtgagcctctctgactgcttcttccccgggggggactgcaaaccgctcagggttgcggcagagccatggacttccggtccctgcaacgggtgacctaagcgtggtgcacccatcagtcacgcaggaggactgacttgacagacgaaagacaagcccggatgacacagggtgagaagagtcagggccgcacctctgtccctgcaaaccaacaggtgcatggtgagtgtggcagtccccacagctccacaataaagacacccccaccaacaagagagacgaacagggggatactacaaaaacaacaaaccacaccaaagacaaagaaaccacacaccacaccacagaggatgtagaaacaagtatcaaaaaaaaaaaaaaanaaannanaaaaananaanaanaananaanaaanaaaanaaaaananaaanaaanaaaanaaanaanaaannaanaaaaaaaaanaacaanaaaattggctcttttgaaaaagaccagtcacccccagtataaggatatagctaagaatccccccgtacactacctccggtctggttttttaagacttttccatcctacctatcgtaccaataagaatagaacaatcaaatactacgagaaagaaagaaaccaaagagaaagacaaccaatagcagtgcaacaaagctaccaagaaaatcacacaataaccccaaccagacaacaaaaaagaagtaacatgataccaaatagacaacagatagacgaggaaaccgacggaggagagcggacgagggggtcgggagcggggaggagagggaggggtggtgccggaaacggtgcgaggagcgtggaaggtcgcgggggggtgcgcgtagtagaatactgagtagaggtttgaggagagattaatgttgacgtataaccaggccgtagatatgtgcggaaaattgctgtaactgttggtgctcgatgcggggccgtggtgtcctttgtattggttgcggttgtgggtgtgggtgagtggtggtgtggagtcgaagttgtgttgcgattctctttataat

SEQ ID NO: 299867 - DNA, 2752 bp, Homo sapiens
cggccgcggctgctgcttcctcgggccattttgctgtggagcggcggggaggaggagccgccgaggagaccccgggcgaggagctgcgagccggaggaggccgcgcggactccgggctttccgccgtcgcggggatctcggggggcaaagggatcgccggggagggggaccagagagccgcgcccgccgcgcggagcgccccttcgcgtcccctgcaccatgagctggggcaccgagctctgggatcagtttgacaacttagaaaaacacacacagtggggaattgatattcttgagaaatatatcaagtttgtgaaagaaaggacagagattgaactcagctatgcaaagcaactcaggaatctttcaaagaagtaccaacctaaaaagaactcgaaggaggaagaagaatacaagtatacgtcatgtaaagctttcatttccaacctgaacgaaatgaatgattacgcagggcagcatgaagttatctccgagaacatggcatcacagatcattgtggacttggcacgctatgttcaggaactgaaacaggagaggaaatcaaactttcacgatggccgtaaagcacagcagcacatcgagacttgctggaagcagcttgaatctagtaaaaggcgatttgaacgcgattgcaaagaggcggacagggcgcagcagtactttgagaaaatggacgctgacatcaatgtcacaaaagcggatgttgaaaaggcccgacaacaagctcaaatacgtcaccaaatggcagaggacagcaaagcagattactcatccattctccagaaattcaaccatgagcagcatgaatattaccatactcacatccccaacatcttccagaaaatacaagagatggaggaaaggaggattgtgagaatgggagagtccatgaagacatatgcagaggttgatcggcaggtgatcccaatcattgggaagtgcctggatggaatagtaaaagcagccgaatcaattgatcagaaaaatgattcacagctggtaatagaagcttataaatcagggtttgagcctcctggagacattgaatttgaggattacactcagccaatgaagcgcactgtgtcagataacagcctttcaaattccagaggagaaggcaaaccagacctcaaatttggtggcaaatccaaaggaaagttatggccgttcatcaaaaaaaataagctatgtccttttaacatccccccatcagcctccccctccccctcctgcctctgcctcaccctctgctgttcccaacggcccccagtctcccaagcagcaaaaggaacccctctcccaccgcttcaacgagttcatgacctccaaacccaaaatccactgcttcaggagcctaaagcgtgggggtgcaacaccggaggatttcagcaacctcccacctgaacaaagaaggaaaaagctgcagcagaaagtcgatgagttaaataaagaaattcagaaggagatggatcaaagagatgccataacaaaaatgaaagatgtctacctaaagaatcctcagatgggagacccagccagtttggatcacaaattagcagaagtcagccaaaatatagagaaactgcgagtagagacccagaaatttgaggcctggctggctgaggttgaaggccggctcccagcacgcaacgagcaggcgcgccggcagagcggactgtacgacagccagaacccacccacagtcaacaactgcgcccaggaccgtgagagcccagatggcagttacacagaggagcagagtcaggagagtgagatgaaggtgctggccacggattttgacgacgagtttgatgatgaggagcccctccctgccatagggacgtgcaaagctctctacacatttgaaggtcagaatgaaggaacgatttccgtagttgaaggagaaacattgtatgtcatagaggaagacaaaggcgatggctggacccgcattcggagaaatgaagatgaagagggttatgtccccacttcatatgtcgaagtctgtttggacaaaaatgccaaagattcctagaggggagtgcctgcgagcctcgggtgagccttcctggaggagcctccgtctgcttgttcccacaggcctccagcgccctgccctgtggacagcccacccctccgcagccccatccctgcggggcggtctctctctctctctccagcatgctccctgcggccctgccctcccgcccagcccgggccacctcgtgggggacaagtctcgccagcgcccacccccatggctcgggtcagtcctcatcgctccccctccccaccccgcgcaggccactgagacggtgggacacacgcccccacctgctccttcctgggccctcagtccacccgggctcgtcctggcagcccttccgcgcttcacacagtgccttttgtgaaagtgtcatcacgggtcccctgaggagacaaggcaggtccagcgcacatcaggcggactgagcactcgatgtcatccgtgtcgatgtcatccgtgtgtcccagactgcctgctgtagaaaacacttcctcctctcctgagtctgtgaagtcctcagtggtcctttttggattctaggcttgcacctcatactaaacattgaccctttcactatgccctcaacctgggagcatctggcaggcaggggggcaggtacacacacacccacaggcacaccctcctacgtcgacgcggccgttaattttagtagtagtactccga

SEQ ID NO: 299868 - DNA, 2789 bp, Homo sapiens
cggccgcggctgctgcttcctcgggccattttgctgtggagcggcggggaggaggagccgccgaggagaccccgggcgaggagctgcgagccggaggaggccgcgcggactccgggctttccgccgtcgcggggatctcggggggcaaagggatcgccggggagggggaccagagagccgcgcccgccgcgcggagcgccccttcgcgtcccctgcaccatgagctggggcaccgagctctgggatcagtttgacaacttagaaaaacacacacagtggggaattgatattcttgagaaatatatcaagtttgtgaaagaaaggacagagattgaactcagctatgcaaagcaactcaggaatctttcaaagaagtaccaacctaaaaagaactcgaaggaggaagaagaatacaagtatacgtcatgtaaagctttcatttccaacctgaacgaaatgaatgattacgcagggcagcatgaagttatctccgagaacatggcatcacagatcattgtggacttggcacgctatgttcaggaactgaaacaggagaggaaatcaaactttcacgatggccgtaaagcacagcagcacatcgagacttgctggaagcagcttgaatctagtaaaaggcgatttgaacgcgattgcaaagaggcggacagggcgcagcagtactttgagaaaatggacgctgacatcaatgtcacaaaagcggatgttgaaaaggcccgacaacaagctcaaatacgtcaccaaatggcagaggacagcaaagcagattactcatccattctccagaaattcaaccatgagcagcatgaatattaccatactcacatccccaacatcttccagaaaatacaagagatggaggaaaggaggattgtgagaatgggagagtccatgaagacatatgcagaggttgatcggcaggtgatcccaatcattgggaagtgcctggatggaatagtaaaagcagccgaatcaattgatcagaaaaatgattcacagctggtaatagaagcttataaatcagggtttgagcctcctggagacattgaatttgaggattacactcagccaatgaagcgcactgtgtcagataacagcctttcaaattccagaggagaaggcaaaccagacctcaaatttggtggcaaatccaaaggaaagttatggccgttcatcaaaaaaaataagctatgtccttttaacatccccccatcagcctccccctccccctcctgcctctgcctcaccctctgctgttcccaacggcccccagtctcccaagcagcaaaaggaacccctctcccaccgcttcaacgagttcatgacctccaaacccaaaatccactgcttcaggagcctaaagcgtgggggtgcaacaccggaggatttcagcaacctcccacctgaacaaagaaggaaaaagctgcagcagaaagtcgatgagttaaataaagaaattcagaaggagatggatcaaagagatgccataacaaaaatgaaagatgtctacctaaagaatcctcagatgggagacccagccagtttggatcacaaattagcagaagtcagccaaaatatagagaaactgcgagtagagacccagaaatttgaggcctggctggctgaggttgaaggccggctcccagcacgcaacgagcaggcgcgccggcagagcggactgtacgacagccagaacccacccacagtcaacaactgcgcccaggaccgtgagagcccagatggcagttacacagaggagcagagtcaggagagtgagatgaaggtgctggccacggattttgacgacgagtttgatgatgaggagcccctccctgccatagggacgtgcaaagctctctacacatttgaaggtcagaatgaaggaacgatttccgtagttgaaggagaaacattgtatgtcatagaggaagacaaaggcgatggctggacccgcattcggagaaatgaagatgaagagggttatgtccccacttcatatgtcgaagtctgtttggacaaaaatgccaaagattcctagaggggagtgcctgcgagcctcgggtgagccttcctggaggagcctccgtctgcttgttcccacaggcctccagcgccctgccctgtggacagcccacccctccgcagccccatccctgcggggcggtctctctctctctctccagcatgctccctgcggccctgccctcccgcccagcccgggccacctcgtgggggacaagtctcgccagcgcccacccccatggctcgggtcagtcctcatcgctccccctccccaccccgcgcaggccactgagacggtgggacacacgcccccacctgctccttcctgggccctcagtccacccgggctcgtcctggcagcccttccgcgcttcacacagtgccttttgtgaaagtgtcatcacgggtcccctgaggagacaaggcaggtccagcgcacatcaggcggactgagcactcgatgtcatccgtgtcgatgtcatccgtgtgtcccagactgcctgctgtagaaaacacttcctcctctcctgagtctgtgaagtcctcagtggtcctttttggattctaggcttgcacctcatactaaacattgaccctttcactatgccctgtggacagcccacccctccgcagccccatccctgcggggcggtctctctctctctccagcatgctccctgcggccctgccctcccgcccagcccgggccacctcgtgggggacaagtctcgccagcgcccacccccatg

SEQ ID NO: 299869 - DNA, 1515 bp, Homo sapiens
cggccgcggctgctgcttcctcgggccattttgctgtggagcggcggggaggaggagccgccgaggagaccccgggcgaggagctgcgagccggaggaggccgcgcggactccgggctttccgccgtcgcggggatctcggggggcaaagggatcgccggggagggggaccagagagccgcgcccgccgcgcggagcgccccttcgcgtcccctgcaccatgagctggggcaccgagctctgggatcagtttgacaacttagaaaaacacacacagtggggaattgatattcttgagaaatatatcaagtttgtgaaagaaaggacagagattgaactcagctatgcaaagcaactcaggaatctttcaaagaagtaccaacctaaaaagaactcgaaggaggaagaagaatacaagtatacgtcatgtaaagctttcatttccaacctgaacgaaatgaatgattacgcagggcagcatgaagttatctccgagaacatggcatcacagatcattgtggacttggcacgctatgttcaggaactgaaacaggagaggaaatcaaactttcacgatggccgtaaagcacagcagcacatcgagacttgctggaagcagcttgaatctagtaaaaggcgatttgaacgcgattgcaaagaggcggacagggcgcagcagtactttgagaaaatggacgctgacatcaatgtcacaaaagcggatgttgaaaaggcccgacaacaagctcaaatacgtcaccaaatggcagaggacagcaaagcagattactcatccattctccagaaattcaaccatgagcagcatgaatattaccatactcacatccccaacatcttccagaaaatacaagagatggaggaaaggaggattgtgagaatgggagagtccatgaagacatatgcagaggttgatcggcaggtgatcccaatcattgggaagtgcctggatggaatagtaaaagcagccgaatcaattgatcagaaaaatgattcacagctggtaatagaagcttataaatcagggtttgagcctcctggagacattgaatttgaggattacactcagccaatgaagcgcactgtgtcagataacagcctttcaaattccagaggagaaggcaaaccagacctcaaatttggtggcaaatccaaaggaaagttatggccgttcatcaaaaaaaataagctatgtccttttaacatccccccatcagcctccccctccccctcctgcctctgcctcaccctctgctgttcccaacggcccccagtctcccaagcagcaaaaggaacccctctcccaccgcttcaacgagttcatgacctccaaacccaaaatccactgcttcaggagcctaaagcgtggggtaagttctgctccggaatcctgtctctctggcgtgctttggttgcatgtttggttctgcataactaattttgtttgtgaatgaatccattgtgttttcccataacatataaaaaagttaaaaaaaaa

SEQ ID NO: 299870 - DNA, 682 bp, Homo sapiens
cggccgcggctgctgcttcctcgggccattttgctgtggagcggcggggaggaggagccgccgaggagaccccgggcgaggagctgcgagccggaggaggccgcgcggactccgggctttccgccgtcgcggggatctcggggggcaaagggatcgccggggagggggaccagagagccgcgcccgccgcgcggagcgccccttcgcgtcccctgcaccatgagctggggcaccgagctctgggatcagtttgacaacttagaaaaacacacacagtggggaattgatattcttgagaaatatatcaagtttgtgaaagaaaggacagagattgaactcagctatgcaaagcaactcaggaatctttcaaagaagtaccaacctaaaaagaactcgaaggaggaagaagaatacaagtatacgtcatgtaaagctttcatttccaacctgaacgaaatgaatgattacgcagggcagcatgaagttatctccgagaacatggcatcacagatcattgtggacttggcacgctatgttcaggaactgaaacaggagaggaaatcagtaagcaaaactttattctttttcttcctaaaagatggaccaaacacagtgggaatatccctagaagattaaaattaaataaaaccatataagactatgggtcttaaactcatacctt

SEQ ID NO: 299871 - DNA, 549 bp, Homo sapiens
gatggccttaggttggagtctctcattgcttttgtctccaggcgcctggctggctgaggttgaaggccggctcccagcacgcaacgagcaggcgcgccggcagagcggactgtacgacagccagaacccacccacagtcaacaactgcgcccaggaccgtgagaggtacagtatctgcacagcgcctgcctctggcaagggagcctgttggctttgtatttatttctaaattttggaatctggaatgaccataaggcacttgttcaatgccaaaatgtctgttgcgattgacctgtcactttttccatgatgcagatttataattccacatgggatgggtgatctgagcgtgcgatgatttaccatggcctcagttacagcactcgctgaggggcggggttgcaagtgctctccagtcgcagggactcaatctgagtcctccctggggtcagtcgctttagttgctttgtgttttcctttcttgagcagcccagatggcagttacacagaggagcagagtcaggagagtgagatgaaggtgctggccac

SEQ ID NO: 299872 - DNA, 352 bp, Homo sapiens
actgtgttgcccaggctgtcttgaactccttggctcaagcgattcttcttcctcagcctcccagggttctgggattacagatgtgagccaccgcacccggctacccctttcaactcttaaatttctttggagcatacatactagaggttcaatatttagatgttgtttaagtggatgaaaatgtttcctcctgggttcataagagaagcagagggtactaatcaccagtgtgttttcccctttgcagaactttcacgatggccgtaaagcacagcagcacatcgagacttgctggaagcagcttgaatctgtaagtgaacaatgcacagcaaaagaaacggctttatagatt

SEQ ID NO: 299873 - DNA, 5411 bp, Homo sapiens
cggccgcggctgctgcttcctcgggccattttgctgtggagcggcggggaggaggagccgccgaggagaccccgggcgaggagctgcgagccggaggaggccgcgcggactccgggctttccgccgtcgcggggatctcggggggcaaagggatcgccggggagggggaccagagagccgcgcccgccgcgcggagcgccccttcgcgtcccctgcaccatgagctggggcaccgagctctgggatcagtttgacaacttagaaaaacacacacagtggggaattgatattcttgagaaatatatcaagtttgtgaaagaaaggacagagattgaactcagctatgcaaagcaactcaggaatctttcaaagaagtaccaacctaaaaagaactcgaaggaggaagaagaatacaagtatacgtcatgtaaagctttcatttccaacctgaacgaaatgaatgattacgcagggcagcatgaagttatctccgagaacatggcatcacagatcattgtggacttggcacgctatgttcaggaactgaaacaggagaggaaatcaaactttcacgatggccgtaaagcacagcagcacatcgagacttgctggaagcagcttgaatctagtaaaaggcgatttgaacgcgattgcaaagaggcggacagggcgcagcagtactttgagaaaatggacgctgacatcaatgtcacaaaagcggatgttgaaaaggcccgacaacaagctcaaatacgtcaccaaatggcagaggacagcaaagcagattactcatccattctccagaaattcaaccatgagcagcatgaatattaccatactcacatccccaacatcttccagaaaatacaagagatggaggaaaggaggattgtgagaatgggagagtccatgaagacatatgcagaggttgatcggcaggtgatcccaatcattgggaagtgcctggatggaatagtaaaagcagccgaatcaattgatcagaaaaatgattcacagctggtaatagaagcttataaatcagggtttgagcctcctggagacattgaatttgaggattacactcagccaatgaagcgcactgtgtcagataacagcctttcaaattccagaggagaaggcaaaccagacctcaaatttggtggcaaatccaaaggaaagttatggccgttcatcaaaaaaaataagctatgtccttttaacatccccccatcagcctccccctccccctcctgcctctgcctcaccctctgctgttcccaacggcccccagtctcccaagcagcaaaaggaacccctctcccaccgcttcaacgagttcatgacctccaaacccaaaatccactgcttcaggagcctaaagcgtgggggtgcaacaccggaggatttcagcaacctcccacctgaacaaagaaggaaaaagctgcagcagaaagtcgatgagttaaataaagaaattcagaaggagatggatcaaagagatgccataacaaaaatgaaagatgtctacctaaagaatcctcagatgggagacccagccagtttggatcacaaattagcagaagtcagccaaaatatagagaaactgcgagtagagacccagaaatttgaggcctggctggctgaggttgaaggccggctcccagcacgcaacgagcaggcgcgccggcagagcggactgtacgacagccagaacccacccacagtcaacaactgcgcccaggaccgtgagagcccagatggcagttacacagaggagcagagtcaggagagtgagatgaaggtgctggccacggattttgacgacgagtttgatgatgaggagcccctccctgccatagggacgtgcaaagctctctacacatttgaaggtcagaatgaaggaacgatttccgtagttgaaggagaaacattgtatgtcatagaggaagacaaaggcgatggctggacccgcattcggagaaatgaagatgaagagggttatgtccccacttcatatgtcgaagtctgtttggacaaaaatgccaaagattcctagaggggagtgcctgcgagcctcgggtgagccttcctggaggagcctccgtctgcttgttcccacaggcctccagcgccctgccctgtggacagcccacccctccgcagccccatccctgcggggcggtctctctctctctctccagcatgctccctgcggccctgccctcccgcccagcccgggccacctcgtgggggacaagtctcgccagcgcccacccccatggctcgggtcagtcctcatcgctccccctccccaccccgcgcaggccactgagacggtgggacacacgcccccacctgctccttcctgggccctcagtccacccgggctcgtcctggcagcccttccgcgcttcacacagtgccttttgtgaaagtgtcatcacgggtcccctgaggagacaaggcaggtccagcgcacatcaggcggactgagcactcgatgtcatccgtgtcgatgtcatccgtgtgtcccagactgcctgctgtagaaaacacttcctcctctcctgagtctgtgaagtcctcagtggtcctttttggattctaggcttgcacctcatactaaacattgaccctttcactatgccctcaacctgggagcatctggcaggcaggggggcaggtacacacacacccacaggcacacccaccagtacacacgcgtgcgcatacacacattttggtttgacgccctgttttcagtggcctggggaggtccacactggaagtcgaattccagctcgccttgttgactcgcctgtgtccaccggccatgaggagcccacgcctgtcctccccatcactttcctgtccctgagaactgtagatcatgcgcttgtgagcgaggccctcccctctgcaccagctcattgcaaagcgaacatcctctcctttccaggagccccaggattagcatctgaaaagggtagcacttccttttttgttgttgttttttttttttttttgagacgggagtctcgctctattgttcagactggagtgcagtggcatgatctcggctcactacaacctccacctcctgggttccagcgattctcctgcctcagcctcccaaatagctgtgattacaggcgtgcaccaccacgcccggctaatgtttgtatttttagtagagacagggtttcaccgtgttggtcaggctggtctcaaactcctgacctcaggtgatccgcccgcctcagcctcccaaagtgctgagattacaggtgtgagctaccgcaccccgccgaggttagcactttcatcaccaaagaccccgtgcctctcgtggtcctttgagggatcccgccgccaccacccttgtattttatcacgtgctcttcagggcatgtggaattcgttgagtttgcttttagagccaagtttctttccctgtgtgggtttttgaggaaaacctgaggtcccctaatctgtggccaccaccccccccccgccgccacgccttagagcagagcagcccctcctctcatttggtgcagaaacagtcaagaggaaccattggcctagagctcctgtgaccgagagcgccacggaagcctggggatgatgtcgggcagctttattctttgcttggctttggtaactaggtggtcccctcaagcatcctcagttcctcttgctgtttatgaatctaagacaaggaagtcctatagaagccaaagggacagggacggaaaggacaggtcccaagggatggggctgtctttacttgtggaaaccaggaaattgctcctctcagccaaccaaggttgaccacacaccacccttccggagcagctcagtcagccctcggggacgagaaaccacaagcgcagagacgctgaggcccaggcaggtgaagaggaagtggctttgggtttttaaagtaggtgagcgtgagcctctctgactgcttcttccccgggggggactgcaaaccgctcagggttgcggcagagccatggacttccggtccctgcaacgggtgacctaagcgtggtgcacccatcagtcacgcaggaggactgacttgacagacgaaagacaagcccggatgacacagggtgagaagagtcagggccgcacctctgtccctgcaaaccaacaggtgcatggtgagtgtggcagtccccacagctccacaatgggctcccccgccaacggggacgacagggatcttcaggaacttctgacctcaccaagtcaagtggaccactctccactccacgaggatgtgaaacggttctttaaaatgggattttagagcctcgggaatgcatgtgcgtcgcatctttcatattatgggtcaggatagattcatttcttgcaacatagtggaaaagatataagctgcagtaatttgctctttgaatgaccgtcacccccagtataggatatgcttgtatccccccgtcactcctccgcctgttttttaaacttttccaccacctgcgtccaaaaagaatgttatagcgagtgctcttaaatgttgaacctgggtgttgcttccgggccagtctgcgtggctccatgaaaagctcactgctgccccagccgggcttcttagaggaggtcagttgtcctatgtatcatcatttactctgggaatcctactgtgaaatcatgtctgtatttttctggagcagttcacatagagtagaatgtggaatttcccgtgaacgtctccttcctcccccgtatctgccgcctgtcacttcgccaccgtgctagaatactgttgtgttgtaagatgactaattttaaaagaacctgccctgaaaagttcttagaaacgcaatgaaagggaggaacttgtcctttacccagtttttcctttgtaggatgggaaagtataaaaaggcacagaaggttgtcatgggctgttccttgggggtttttatcctgctcaccgtggagataagcctgcggcttgtctaaccagcgcagcgcaaaggtctcaatgccttttggtaacatccgtcattgcagaagaaagtttacacgacgtcaaaaagtgacgttcatgctaagtgtttttccagaaatattggtttcatgtttcttattggctctgcctcctgtgcttatatcatccaaaaactttttaaaaaggtccagaattctattttaacctgatgttgagcacctttaaaacgttcgtatgtgtgttgcactaattctaaactttggaggcattttgctgtgtgaggccgatcgccactgtaaaggtcctagagttgcctgtttgtctctggagatggaattaaaccaaataaagagcttccactggaggcttgtattgaccttgtaactatatgttaatctcgtgttaaaataaaatataacttgtg

SEQ ID NO: 299874 - DNA, 6430 bp, Homo sapiens
  misc_feature (2082)..(2082): n is a, c, g, or t
  misc_feature (2264)..(2264): n is a, c, g, or t
  misc_feature (2460)..(2460): n is a, c, g, or t
  misc_feature (2597)..(2597): n is a, c, g, or t
  misc_feature (3009)..(3009): n is a, c, g, or t
tgagacagagtctcactctgtcacctagactcaagggcaatgatacaatcctggctcactacaacctctgcctcccgagttcaagtaattcttgtgcctcagcctccccagtagctgggattacaggtgcctgccaccacacccggctaatctttgtatttttttttttttttagtaaagacaggttttcaccatgttggccaggcttgtctcaaactcttgggctcaagtgatccgcccacctcagcctcccaaagtgctgggattacagggtgagccaccgtgccaggcccaaatttcttttggatacttttgctggcatagtatcaataaagccacccatcccaaccccaggcctctttgtaaatattgcagcaagaaaatcagctgacccttcaaccacaaggatctgtttaaatgagcagtaggaagtttccagctttacccagtaaacaagtgaatgggaaacctaaggtattaaaatctgacctttctatccgatgacaaactcatttccagtctgtgaactcctggacaaagcaaactaaccactgaaaaactcgaaaatagggcaagacgacattaaccttgtgaaagtctgctttgaaaaaaggcattctgtcaagctgtgtatttttttcttgattattcaaatttatttcgttattcaaatttaattcagaaaatagctcagttggtttcagggggaatggggtgggaggggtttgggcacataaatttatgatgataattttaaatgtacgatcattaagttgtatgcctcagtactataacaggtgaatctctgtaatattgactaaacagttaaaagatattttgtaaatttcaggtccatcgcatcaatgcatgaaatattagaaaaccaaattccaaagaatcaggaatttccatttccacccaaagtatactttattatcttctagcagttgtctgttaatataaaagcagcaaaatctcagctacttatataattttctccttttatttgaaagttacacttagagattaataatatgtacagagaagcttttcctgcctactctgtttataactctgtccaacttgcccacaaacactgccctccttcaacccatctgatgtgggcaaagccactgttttcttaggcccataactcagtgcagctgttttatttttataatgccggtcaacctttttgtgtgtgtgtgtgtgtgtgtgtgtgtgtgtgtgtgtgtgtgtgtgtgtgtctacgatgtgcttatttaataattgccaaaatatttagactagagtaacttccggtgggtcaattggattgtgactttcttttgtggttttttggttcttcgattgctctctgttaaatattttcataattccccccacagaatacgtgtgtatatactgcaacttaaaaactaaaagcagtactcgaatgagttgttttaatgttgtacttttatctgtttgttttatgggttctcctgctgcctaatgacctttctgtttttataactgccggaaagccgcgaagcctctcgcatggggagctaggtccccgctgcggctccgcacttgagtttattataaactctggggttctgagtaagttttgtttgaatacagcaacatgattgtctctttctattcttatcctaaaagactctgtctggcatcttttagttgtaccctcgtatctgcttctctaataaatgttatattttttctcagtattgtgtattttaagtgacttttcatgtttccaagaaaattattctgtgtaatatgaatatttaactctttcatctccagtaataggggattttctagcccaatgcttttttaaaaattctgcctcccacccctacctcctcctttaaatgatggcacctcccctgtttctgatcttgcgtgcactcagggcctgagaagtctgtgtttcttttgtttcttttctctctccttgagatgaagagcttttcacggtttattgcggaatgaatacagaacaacaggttttccttttcaccaaagattttacattgtactgctgaagagccaagagtttccttctgagagaantggaccttcatgttccttgtaccattctaggaaattgatgcatttcttttcttttcttttttttctggagttgaattctcactctgttgcccaagctgaagtgcagtggtgtgatcctggctcgctgcagcctcgacctccctgggctcaagccatccttccaactcatcttcccgaatagncgggactacaggcgcatgccaacatgctggttaatttttttttaattttttgtagagatgaggtctggctatgttgtggcccaggctggtcttgaactcctgagctcatgcatcctccctcttcagcctctcaaagtgctgggattacaggtatgagccactgcacccaacctccgtttccttttttttttttttnagacggagtcttgctctgttgtccaggctggagtgcagtggcccgatctcagctcactgcaacctccgcctcctgggttgaagcgattcttctgcctcagcctcccaagtagctgggattacaggcacctgccaccncgccaggctaattgttgtatttttaatagagatgggttttcaccatgttagccaggctggtcttgaactcctgacctcgtgatctgcctgcctcaggctcccaaagtgctgggattacaggcatgagccacggcgcccagccccggcctccgtttcttactttctctcaaaactaaacttatgagaaagacgagttggggcggatggcctcatcagtctcctgtttgggcttctcttaactctgaaggaaagaccagctaaaggctagagagaaaaccgtgaaagttcctcatctcagacccgccctgtggtaaccgattgctctaagacgccccctcccatccctcccctcccactaccctcccctcccagggcggtgcagtttgtagccaagagcaaaatgcccgcctgnaacccgcgccttcctctctaacagagagtttctctttctgtttctctttgtgttgtagattcctagaggggagtgcctgcgagcctcgggtgagccttcctggaggagcctccgtctgcttgttcccacaggcctccagcgccctgccctgtggacagcccacccctccgcagccccatccctgcggggcggtctctctctctctctccagcatgctccctgcggccctgccctcccgcccagcccgggccacctcgtgggggacaagtctcgccagcgcccacccccatggctcgggtcagtcctcatcgctccccctccccaccccgcgcaggccactgagacggtgggacacacgcccccacctgctccttcctgggccctcagtccacccgggctcgtcctggcagcccttccgcgcttcacacagtgccttttgtgaaagtgtcatcacgggtcccctgaggagacaaggcaggtccagcgcacatcaggcggactgagcactcgatgtcatccgtgtcgatgtcatccgtgtgtcccagactgcctgctgtagaaaacacttcctcctctcctgagtctgtgaagtcctcagtggtcctttttggattctaggcttgcacctcatactaaacattgaccctttcactatgccctcaacctgggagcatctggcaggcaggggggcaggtacacacacacccacaggcacacccaccagtacacacgcgtgcgcatacacacattttggtttgacgccctgttttcagtggcctggggaggtccacactggaagtcgaattccagctcgccttgttgactcgcctgtgtccaccggccatgaggagcccacgcctgtcctccccatcactttcctgtccctgagaactgtagatcatgcgcttgtgagcgaggccctcccctctgcaccagctcattgcaaagcgaacatcctctcctttccaggagccccaggattagcatctgaaaagggtagcacttccttttttgttgttgttttttttttttttttgagacgggagtctcgctctattgttcagactggagtgcagtggcatgatctcggctcactacaacctccacctcctgggttccagcgattctcctgcctcagcctcccaaatagctgtgattacaggcgtgcaccaccacgcccggctaatgtttgtatttttagtagagacagggtttcaccgtgttggtcaggctggtctcaaactcctgacctcaggtgatccgcccgcctcagcctcccaaagtgctgagattacaggtgtgagctaccgcaccccgccgaggttagcactttcatcaccaaagaccccgtgcctctcgtggtcctttgagggatcccgccgccaccacccttgtattttatcacgtgctcttcagggcatgtggaattcgttgagtttgcttttagagccaagtttctttccctgtgtgggtttttgaggaaaacctgaggtcccctaatctgtggccaccaccccccccccgccgccacgccttagagcagagcagcccctcctctcatttggtgcagaaacagtcaagaggaaccattggcctagagctcctgtgaccgagagcgccacggaagcctggggatgatgtcgggcagctttattctttgcttggctttggtaactaggtggtcccctcaagcatcctcagttcctcttgctgtttatgaatctaagacaaggaagtcctatagaagccaaagggacagggacggaaaggacaggtcccaagggatggggctgtctttacttgtggaaaccaggaaattgctcctctcagccaaccaaggttgaccacacaccacccttccggagcagctcagtcagccctcggggacgagaaaccacaagcgcagagacgctgaggcccaggcaggtgaagaggaagtggctttgggtttttaaagtaggtgagcgtgagcctctctgactgcttcttccccgggggggactgcaaaccgctcagggttgcggcagagccatggacttccggtccctgcaacgggtgacctaagcgtggtgcacccatcagtcacgcaggaggactgacttgacagacgaaagacaagcccggatgacacagggtgagaagagtcagggccgcacctctgtccctgcaaaccaacaggtgcatggtgagtgtggcagtccccacagctccacaatgggctcccccgccaacggggacgacagggatcttcaggaacttctgacctcaccaagtcaagtggaccactctccactccacgaggatgtgaaacggttctttaaaatgggattttagagcctcgggaatgcatgtgcgtcgcatctttcatattatgggtcaggatagattcatttcttgcaacatagtggaaaagatataagctgcagtaatttgctctttgaatgaccgtcacccccagtataggatatgcttgtatccccccgtcactcctccgcctgttttttaaacttttccaccacctgcgtccaaaaagaatgttatagcgagtgctcttaaatgttgaacctgggtgttgcttccgggccagtctgcgtggctccatgaaaagctcactgctgccccagccgggcttcttagaggaggtcagttgtcctatgtatcatcatttactctgggaatcctactgtgaaatcatgtctgtatttttctggagcagttcacatagagtagaatgtggaatttcccgtgaacgtctccttcctcccccgtatctgccgcctgtcacttcgccaccgtgctagaatactgttgtgttgtaagatgactaattttaaaagaacctgccctgaaaagttcttagaaacgcaatgaaagggaggaacttgtcctttacccagtttttcctttgtaggatgggaaagtataaaaaggcacagaaggttgtcatgggctgttccttgggggtttttatcctgctcaccgtggagataagcctgcggcttgtctaaccagcgcagcgcaaaggtctcaatgccttttggtaacatccgtcattgcagaagaaagtttacacgacgtcaaaaagtgacgttcatgctaagtgtttttccagaaatattggtttcatgtttcttattggctctgcctcctgtgcttatatcatccaaaaactttttaaaaaggtccagaattctattttaacctgatgttgagcacctttaaaacgttcgtatgtgtgttgcactaattctaaactttggaggcattttgctgtgtgaggccgatcgccactgtaaaggtcctagagttgcctgtttgtctctggagatggaattaaaccaaataaagagcttccactggaggcttgtattgaccttgtaactatatgttaatctcgtgttaaaataaaatataacttgtg

SEQ ID NO: 299875 - DNA, 409 bp, Homo sapiens
gttttaaatacgatcacaaaaattttatgtttgagttaaatcatttgataattacccaatacataggaacctcaggcaccaatatatattttgtaaatatctatgtccttttaacatccccccatcagcctccccctccccctcctgcctctgcctcaccctctgctgttcccaacggcccccagtctcccaagcagcaaaaggaacccctctcccaccgcttcaacgagttcatgacctccaaacccaaaatccactgcttcaggagcctaaagcgtggggtaagttctgctccggaatcctgtctctctggcgtgctttggttgcatgtttggttctgcataactaattttgtttgtgaatgaatccattgtgttttcccataacatataaaaaagttaaaaaaaaa

SEQ ID NO: 299876 - DNA, 5230 bp, Homo sapiens
cggccgcggctgctgcttcctcgggccattttgctgtggagcggcggggaggaggagccgccgaggagaccccgggcgaggagctgcgagccggaggaggccgcgcggactccgggctttccgccgtcgcggggatctcggggggcaaagggatcgccggggagggggaccagagagccgcgcccgccgcgcggagcgccccttcgcgtcccctgcaccatgagctggggcaccgagctctgggatcagtttgacaacttagaaaaacacacacagtggggaattgatattcttgagaaatatatcaagtttgtgaaagaaaggacagagattgaactcagctatgcaaagcaactcaggaatctttcaaagaagtaccaacctaaaaagaactcgaaggaggaagaagaatacaagtatacgtcatgtaaagctttcatttccaacctgaacgaaatgaatgattacgcagggcagcatgaagttatctccgagaacatggcatcacagatcattgtggacttggcacgctatgttcaggaactgaaacaggagaggaaatcaaactttcacgatggccgtaaagcacagcagcacatcgagacttgctggaagcagcttgaatctagtaaaaggcgatttgaacgcgattgcaaagaggcggacagggcgcagcagtactttgagaaaatggacgctgacatcaatgtcacaaaagcggatgttgaaaaggcccgacaacaagctcaaatacgtcaccaaatggcagaggacagcaaagcagattactcatccattctccagaaattcaaccatgagcagcatgaatattaccatactcacatccccaacatcttccagaaaatacaagagatggaggaaaggaggattgtgagaatgggagagtccatgaagacatatgcagaggttgatcggcaggtgatcccaatcattgggaagtgcctggatggaatagtaaaagcagccgaatcaattgatcagaaaaatgattcacagctggtaatagaagcttataaatcagggtttgagcctcctggagacattgaatttgaggattacactcagccaatgaagcgcactgtgtcagataacagcctttcaaattccagaggagaaggcaaaccagacctcaaatttggtggcaaatccaaaggaaagttatggccgttcatcaaaaaaaataagggtgcaacaccggaggatttcagcaacctcccacctgaacaaagaaggaaaaagctgcagcagaaagtcgatgagttaaataaagaaattcagaaggagatggatcaaagagatgccataacaaaaatgaaagatgtctacctaaagaatcctcagatgggagacccagccagtttggatcacaaattagcagaagtcagccaaaatatagagaaactgcgagtagagacccagaaatttgaggcctggctggctgaggttgaaggccggctcccagcacgcaacgagcaggcgcgccggcagagcggactgtacgacagccagaacccacccacagtcaacaactgcgcccaggaccgtgagagcccagatggcagttacacagaggagcagagtcaggagagtgagatgaaggtgctggccacggattttgacgacgagtttgatgatgaggagcccctccctgccatagggacgtgcaaagctctctacacatttgaaggtcagaatgaaggaacgatttccgtagttgaaggagaaacattgtatgtcatagaggaagacaaaggcgatggctggacccgcattcggagaaatgaagatgaagagggttatgtccccacttcatatgtcgaagtctgtttggacaaaaatgccaaagattcctagaggggagtgcctgcgagcctcgggtgagccttcctggaggagcctccgtctgcttgttcccacaggcctccagcgccctgccctgtggacagcccacccctccgcagccccatccctgcggggcggtctctctctctctctccagcatgctccctgcggccctgccctcccgcccagcccgggccacctcgtgggggacaagtctcgccagcgcccacccccatggctcgggtcagtcctcatcgctccccctccccaccccgcgcaggccactgagacggtgggacacacgcccccacctgctccttcctgggccctcagtccacccgggctcgtcctggcagcccttccgcgcttcacacagtgccttttgtgaaagtgtcatcacgggtcccctgaggagacaaggcaggtccagcgcacatcaggcggactgagcactcgatgtcatccgtgtcgatgtcatccgtgtgtcccagactgcctgctgtagaaaacacttcctcctctcctgagtctgtgaagtcctcagtggtcctttttggattctaggcttgcacctcatactaaacattgaccctttcactatgccctcaacctgggagcatctggcaggcaggggggcaggtacacacacacccacaggcacacccaccagtacacacgcgtgcgcatacacacattttggtttgacgccctgttttcagtggcctggggaggtccacactggaagtcgaattccagctcgccttgttgactcgcctgtgtccaccggccatgaggagcccacgcctgtcctccccatcactttcctgtccctgagaactgtagatcatgcgcttgtgagcgaggccctcccctctgcaccagctcattgcaaagcgaacatcctctcctttccaggagccccaggattagcatctgaaaagggtagcacttccttttttgttgttgttttttttttttttttgagacgggagtctcgctctattgttcagactggagtgcagtggcatgatctcggctcactacaacctccacctcctgggttccagcgattctcctgcctcagcctcccaaatagctgtgattacaggcgtgcaccaccacgcccggctaatgtttgtatttttagtagagacagggtttcaccgtgttggtcaggctggtctcaaactcctgacctcaggtgatccgcccgcctcagcctcccaaagtgctgagattacaggtgtgagctaccgcaccccgccgaggttagcactttcatcaccaaagaccccgtgcctctcgtggtcctttgagggatcccgccgccaccacccttgtattttatcacgtgctcttcagggcatgtggaattcgttgagtttgcttttagagccaagtttctttccctgtgtgggtttttgaggaaaacctgaggtcccctaatctgtggccaccaccccccccccgccgccacgccttagagcagagcagcccctcctctcatttggtgcagaaacagtcaagaggaaccattggcctagagctcctgtgaccgagagcgccacggaagcctggggatgatgtcgggcagctttattctttgcttggctttggtaactaggtggtcccctcaagcatcctcagttcctcttgctgtttatgaatctaagacaaggaagtcctatagaagccaaagggacagggacggaaaggacaggtcccaagggatggggctgtctttacttgtggaaaccaggaaattgctcctctcagccaaccaaggttgaccacacaccacccttccggagcagctcagtcagccctcggggacgagaaaccacaagcgcagagacgctgaggcccaggcaggtgaagaggaagtggctttgggtttttaaagtaggtgagcgtgagcctctctgactgcttcttccccgggggggactgcaaaccgctcagggttgcggcagagccatggacttccggtccctgcaacgggtgacctaagcgtggtgcacccatcagtcacgcaggaggactgacttgacagacgaaagacaagcccggatgacacagggtgagaagagtcagggccgcacctctgtccctgcaaaccaacaggtgcatggtgagtgtggcagtccccacagctccacaatgggctcccccgccaacggggacgacagggatcttcaggaacttctgacctcaccaagtcaagtggaccactctccactccacgaggatgtgaaacggttctttaaaatgggattttagagcctcgggaatgcatgtgcgtcgcatctttcatattatgggtcaggatagattcatttcttgcaacatagtggaaaagatataagctgcagtaatttgctctttgaatgaccgtcacccccagtataggatatgcttgtatccccccgtcactcctccgcctgttttttaaacttttccaccacctgcgtccaaaaagaatgttatagcgagtgctcttaaatgttgaacctgggtgttgcttccgggccagtctgcgtggctccatgaaaagctcactgctgccccagccgggcttcttagaggaggtcagttgtcctatgtatcatcatttactctgggaatcctactgtgaaatcatgtctgtatttttctggagcagttcacatagagtagaatgtggaatttcccgtgaacgtctccttcctcccccgtatctgccgcctgtcacttcgccaccgtgctagaatactgttgtgttgtaagatgactaattttaaaagaacctgccctgaaaagttcttagaaacgcaatgaaagggaggaacttgtcctttacccagtttttcctttgtaggatgggaaagtataaaaaggcacagaaggttgtcatgggctgttccttgggggtttttatcctgctcaccgtggagataagcctgcggcttgtctaaccagcgcagcgcaaaggtctcaatgccttttggtaacatccgtcattgcagaagaaagtttacacgacgtcaaaaagtgacgttcatgctaagtgtttttccagaaatattggtttcatgtttcttattggctctgcctcctgtgcttatatcatccaaaaactttttaaaaaggtccagaattctattttaacctgatgttgagcacctttaaaacgttcgtatgtgtgttgcactaattctaaactttggaggcattttgctgtgtgaggccgatcgccactgtaaaggtcctagagttgcctgtttgtctctggagatggaattaaaccaaataaagagcttccactggaggcttgtattgaccttgtaactatatgttaatctcgtgttaaaataaaatataacttgtg

SEQ ID NO: 299877 - DNA, 5106 bp, Homo sapiens
ggaggtggatgccaattaacctgattttaattaatattttcttggtgtaaagcagaatatgaatgaatgtggccttgtgtgaaacagagtggcgtgtgttctgttccataggtatacgtcatgtaaagctttcatttccaacctgaacgaaatgaatgattacgcagggcagcatgaagttatctccgagaacatggcatcacagatcattgtggacttggcacgctatgttcaggaactgaaacaggagaggaaatcaaactttcacgatggccgtaaagcacagcagcacatcgagacttgctggaagcagcttgaatctagtaaaaggcgatttgaacgcgattgcaaagaggcggacagggcgcagcagtactttgagaaaatggacgctgacatcaatgtcacaaaagcggatgttgaaaaggcccgacaacaagctcaaatacgtcaccaaatggcagaggacagcaaagcagattactcatccattctccagaaattcaaccatgagcagcatgaatattaccatactcacatccccaacatcttccagaaaatacaagagatggaggaaaggaggattgtgagaatgggagagtccatgaagacatatgcagaggttgatcggcaggtgatcccaatcattgggaagtgcctggatggaatagtaaaagcagccgaatcaattgatcagaaaaatgattcacagctggtaatagaagcttataaatcagggtttgagcctcctggagacattgaatttgaggattacactcagccaatgaagcgcactgtgtcagataacagcctttcaaattccagaggagaaggcaaaccagacctcaaatttggtggcaaatccaaaggaaagttatggccgttcatcaaaaaaaataagctatgtccttttaacatccccccatcagcctccccctccccctcctgcctctgcctcaccctctgctgttcccaacggcccccagtctcccaagcagcaaaaggaacccctctcccaccgcttcaacgagttcatgacctccaaacccaaaatccactgcttcaggagcctaaagcgtgggggtgcaacaccggaggatttcagcaacctcccacctgaacaaagaaggaaaaagctgcagcagaaagtcgatgagttaaataaagaaattcagaaggagatggatcaaagagatgccataacaaaaatgaaagatgtctacctaaagaatcctcagatgggagacccagccagtttggatcacaaattagcagaagtcagccaaaatatagagaaactgcgagtagagacccagaaatttgaggcctggctggctgaggttgaaggccggctcccagcacgcaacgagcaggcgcgccggcagagcggactgtacgacagccagaacccacccacagtcaacaactgcgcccaggaccgtgagagcccagatggcagttacacagaggagcagagtcaggagagtgagatgaaggtgctggccacggattttgacgacgagtttgatgatgaggagcccctccctgccatagggacgtgcaaagctctctacacatttgaaggtcagaatgaaggaacgatttccgtagttgaaggagaaacattgtatgtcatagaggaagacaaaggcgatggctggacccgcattcggagaaatgaagatgaagagggttatgtccccacttcatatgtcgaagtctgtttggacaaaaatgccaaagattcctagaggggagtgcctgcgagcctcgggtgagccttcctggaggagcctccgtctgcttgttcccacaggcctccagcgccctgccctgtggacagcccacccctccgcagccccatccctgcggggcggtctctctctctctctccagcatgctccctgcggccctgccctcccgcccagcccgggccacctcgtgggggacaagtctcgccagcgcccacccccatggctcgggtcagtcctcatcgctccccctccccaccccgcgcaggccactgagacggtgggacacacgcccccacctgctccttcctgggccctcagtccacccgggctcgtcctggcagcccttccgcgcttcacacagtgccttttgtgaaagtgtcatcacgggtcccctgaggagacaaggcaggtccagcgcacatcaggcggactgagcactcgatgtcatccgtgtcgatgtcatccgtgtgtcccagactgcctgctgtagaaaacacttcctcctctcctgagtctgtgaagtcctcagtggtcctttttggattctaggcttgcacctcatactaaacattgaccctttcactatgccctcaacctgggagcatctggcaggcaggggggcaggtacacacacacccacaggcacacccaccagtacacacgcgtgcgcatacacacattttggtttgacgccctgttttcagtggcctggggaggtccacactggaagtcgaattccagctcgccttgttgactcgcctgtgtccaccggccatgaggagcccacgcctgtcctccccatcactttcctgtccctgagaactgtagatcatgcgcttgtgagcgaggccctcccctctgcaccagctcattgcaaagcgaacatcctctcctttccaggagccccaggattagcatctgaaaagggtagcacttccttttttgttgttgttttttttttttttttgagacgggagtctcgctctattgttcagactggagtgcagtggcatgatctcggctcactacaacctccacctcctgggttccagcgattctcctgcctcagcctcccaaatagctgtgattacaggcgtgcaccaccacgcccggctaatgtttgtatttttagtagagacagggtttcaccgtgttggtcaggctggtctcaaactcctgacctcaggtgatccgcccgcctcagcctcccaaagtgctgagattacaggtgtgagctaccgcaccccgccgaggttagcactttcatcaccaaagaccccgtgcctctcgtggtcctttgagggatcccgccgccaccacccttgtattttatcacgtgctcttcagggcatgtggaattcgttgagtttgcttttagagccaagtttctttccctgtgtgggtttttgaggaaaacctgaggtcccctaatctgtggccaccaccccccccccgccgccacgccttagagcagagcagcccctcctctcatttggtgcagaaacagtcaagaggaaccattggcctagagctcctgtgaccgagagcgccacggaagcctggggatgatgtcgggcagctttattctttgcttggctttggtaactaggtggtcccctcaagcatcctcagttcctcttgctgtttatgaatctaagacaaggaagtcctatagaagccaaagggacagggacggaaaggacaggtcccaagggatggggctgtctttacttgtggaaaccaggaaattgctcctctcagccaaccaaggttgaccacacaccacccttccggagcagctcagtcagccctcggggacgagaaaccacaagcgcagagacgctgaggcccaggcaggtgaagaggaagtggctttgggtttttaaagtaggtgagcgtgagcctctctgactgcttcttccccgggggggactgcaaaccgctcagggttgcggcagagccatggacttccggtccctgcaacgggtgacctaagcgtggtgcacccatcagtcacgcaggaggactgacttgacagacgaaagacaagcccggatgacacagggtgagaagagtcagggccgcacctctgtccctgcaaaccaacaggtgcatggtgagtgtggcagtccccacagctccacaatgggctcccccgccaacggggacgacagggatcttcaggaacttctgacctcaccaagtcaagtggaccactctccactccacgaggatgtgaaacggttctttaaaatgggattttagagcctcgggaatgcatgtgcgtcgcatctttcatattatgggtcaggatagattcatttcttgcaacatagtggaaaagatataagctgcagtaatttgctctttgaatgaccgtcacccccagtataggatatgcttgtatccccccgtcactcctccgcctgttttttaaacttttccaccacctgcgtccaaaaagaatgttatagcgagtgctcttaaatgttgaacctgggtgttgcttccgggccagtctgcgtggctccatgaaaagctcactgctgccccagccgggcttcttagaggaggtcagttgtcctatgtatcatcatttactctgggaatcctactgtgaaatcatgtctgtatttttctggagcagttcacatagagtagaatgtggaatttcccgtgaacgtctccttcctcccccgtatctgccgcctgtcacttcgccaccgtgctagaatactgttgtgttgtaagatgactaattttaaaagaacctgccctgaaaagttcttagaaacgcaatgaaagggaggaacttgtcctttacccagtttttcctttgtaggatgggaaagtataaaaaggcacagaaggttgtcatgggctgttccttgggggtttttatcctgctcaccgtggagataagcctgcggcttgtctaaccagcgcagcgcaaaggtctcaatgccttttggtaacatccgtcattgcagaagaaagtttacacgacgtcaaaaagtgacgttcatgctaagtgtttttccagaaatattggtttcatgtttcttattggctctgcctcctgtgcttatatcatccaaaaactttttaaaaaggtccagaattctattttaacctgatgttgagcacctttaaaacgttcgtatgtgtgttgcactaattctaaactttggaggcattttgctgtgtgaggccgatcgccactgtaaaggtcctagagttgcctgtttgtctctggagatggaattaaaccaaataaagagcttccactggaggcttgtattgaccttgtaactatatgttaatctcgtgttaaaataaaatataacttgtg

SEQ ID NO: 299878 - DNA, 4720 bp, Homo sapiens
  misc_feature (34)..(34): n is a, c, g, or t
  misc_feature (39)..(39): n is a, c, g, or t
taggtgcctagaggatcccggaaacaaagcggangtganaagcccgacaacaagctcaaatacgtcaccaaatggcagaggacagcaaagcagattactcatccattctccagaaattcaaccatgagcagcatgaatattaccatactcacatccccaacatcttccagaaaatacaagagatggaggaaaggaggattgtgagaatgggagagtccatgaagacatatgcagaggttgatcggcaggtgatcccaatcattgggaagtgcctggatggaatagtaaaagcagccgaatcaattgatcagaaaaatgattcacagctggtaatagaagcttataaatcagggtttgagcctcctggagacattgaatttgaggattacactcagccaatgaagcgcactgtgtcagataacagcctttcaaattccagaggagaaggcaaaccagacctcaaatttggtggcaaatccaaaggaaagttatggccgttcatcaaaaaaaataagctatgtccttttaacatccccccatcagcctccccctccccctcctgcctctgcctcaccctctgctgttcccaacggcccccagtctcccaagcagcaaaaggaacccctctcccaccgcttcaacgagttcatgacctccaaacccaaaatccactgcttcaggagcctaaagcgtgggggtgcaacaccggaggatttcagcaacctcccacctgaacaaagaaggaaaaagctgcagcagaaagtcgatgagttaaataaagaaattcagaaggagatggatcaaagagatgccataacaaaaatgaaagatgtctacctaaagaatcctcagatgggagacccagccagtttggatcacaaattagcagaagtcagccaaaatatagagaaactgcgagtagagacccagaaatttgaggcctggctggctgaggttgaaggccggctcccagcacgcaacgagcaggcgcgccggcagagcggactgtacgacagccagaacccacccacagtcaacaactgcgcccaggaccgtgagagcccagatggcagttacacagaggagcagagtcaggagagtgagatgaaggtgctggccacggattttgacgacgagtttgatgatgaggagcccctccctgccatagggacgtgcaaagctctctacacatttgaaggtcagaatgaaggaacgatttccgtagttgaaggagaaacattgtatgtcatagaggaagacaaaggcgatggctggacccgcattcggagaaatgaagatgaagagggttatgtccccacttcatatgtcgaagtctgtttggacaaaaatgccaaagattcctagaggggagtgcctgcgagcctcgggtgagccttcctggaggagcctccgtctgcttgttcccacaggcctccagcgccctgccctgtggacagcccacccctccgcagccccatccctgcggggcggtctctctctctctctccagcatgctccctgcggccctgccctcccgcccagcccgggccacctcgtgggggacaagtctcgccagcgcccacccccatggctcgggtcagtcctcatcgctccccctccccaccccgcgcaggccactgagacggtgggacacacgcccccacctgctccttcctgggccctcagtccacccgggctcgtcctggcagcccttccgcgcttcacacagtgccttttgtgaaagtgtcatcacgggtcccctgaggagacaaggcaggtccagcgcacatcaggcggactgagcactcgatgtcatccgtgtcgatgtcatccgtgtgtcccagactgcctgctgtagaaaacacttcctcctctcctgagtctgtgaagtcctcagtggtcctttttggattctaggcttgcacctcatactaaacattgaccctttcactatgccctcaacctgggagcatctggcaggcaggggggcaggtacacacacacccacaggcacacccaccagtacacacgcgtgcgcatacacacattttggtttgacgccctgttttcagtggcctggggaggtccacactggaagtcgaattccagctcgccttgttgactcgcctgtgtccaccggccatgaggagcccacgcctgtcctccccatcactttcctgtccctgagaactgtagatcatgcgcttgtgagcgaggccctcccctctgcaccagctcattgcaaagcgaacatcctctcctttccaggagccccaggattagcatctgaaaagggtagcacttccttttttgttgttgttttttttttttttttgagacgggagtctcgctctattgttcagactggagtgcagtggcatgatctcggctcactacaacctccacctcctgggttccagcgattctcctgcctcagcctcccaaatagctgtgattacaggcgtgcaccaccacgcccggctaatgtttgtatttttagtagagacagggtttcaccgtgttggtcaggctggtctcaaactcctgacctcaggtgatccgcccgcctcagcctcccaaagtgctgagattacaggtgtgagctaccgcaccccgccgaggttagcactttcatcaccaaagaccccgtgcctctcgtggtcctttgagggatcccgccgccaccacccttgtattttatcacgtgctcttcagggcatgtggaattcgttgagtttgcttttagagccaagtttctttccctgtgtgggtttttgaggaaaacctgaggtcccctaatctgtggccaccaccccccccccgccgccacgccttagagcagagcagcccctcctctcatttggtgcagaaacagtcaagaggaaccattggcctagagctcctgtgaccgagagcgccacggaagcctggggatgatgtcgggcagctttattctttgcttggctttggtaactaggtggtcccctcaagcatcctcagttcctcttgctgtttatgaatctaagacaaggaagtcctatagaagccaaagggacagggacggaaaggacaggtcccaagggatggggctgtctttacttgtggaaaccaggaaattgctcctctcagccaaccaaggttgaccacacaccacccttccggagcagctcagtcagccctcggggacgagaaaccacaagcgcagagacgctgaggcccaggcaggtgaagaggaagtggctttgggtttttaaagtaggtgagcgtgagcctctctgactgcttcttccccgggggggactgcaaaccgctcagggttgcggcagagccatggacttccggtccctgcaacgggtgacctaagcgtggtgcacccatcagtcacgcaggaggactgacttgacagacgaaagacaagcccggatgacacagggtgagaagagtcagggccgcacctctgtccctgcaaaccaacaggtgcatggtgagtgtggcagtccccacagctccacaatgggctcccccgccaacggggacgacagggatcttcaggaacttctgacctcaccaagtcaagtggaccactctccactccacgaggatgtgaaacggttctttaaaatgggattttagagcctcgggaatgcatgtgcgtcgcatctttcatattatgggtcaggatagattcatttcttgcaacatagtggaaaagatataagctgcagtaatttgctctttgaatgaccgtcacccccagtataggatatgcttgtatccccccgtcactcctccgcctgttttttaaacttttccaccacctgcgtccaaaaagaatgttatagcgagtgctcttaaatgttgaacctgggtgttgcttccgggccagtctgcgtggctccatgaaaagctcactgctgccccagccgggcttcttagaggaggtcagttgtcctatgtatcatcatttactctgggaatcctactgtgaaatcatgtctgtatttttctggagcagttcacatagagtagaatgtggaatttcccgtgaacgtctccttcctcccccgtatctgccgcctgtcacttcgccaccgtgctagaatactgttgtgttgtaagatgactaattttaaaagaacctgccctgaaaagttcttagaaacgcaatgaaagggaggaacttgtcctttacccagtttttcctttgtaggatgggaaagtataaaaaggcacagaaggttgtcatgggctgttccttgggggtttttatcctgctcaccgtggagataagcctgcggcttgtctaaccagcgcagcgcaaaggtctcaatgccttttggtaacatccgtcattgcagaagaaagtttacacgacgtcaaaaagtgacgttcatgctaagtgtttttccagaaatattggtttcatgtttcttattggctctgcctcctgtgcttatatcatccaaaaactttttaaaaaggtccagaattctattttaacctgatgttgagcacctttaaaacgttcgtatgtgtgttgcactaattctaaactttggaggcattttgctgtgtgaggccgatcgccactgtaaaggtcctagagttgcctgtttgtctctggagatggaattaaaccaaataaagagcttccactggaggcttgtattgaccttgtaactatatgttaatctcgtgttaaaataaaatataacttgtg

SEQ ID NO: 299879 - DNA, 5128 bp, Homo sapiens
gaaatgagttttctaaggtgtggagattttgacttgatcttttagtcttagaaaaactaagatcctaaacctgtagtttcagaatgcaaaagaagaagctagtgtgctaccttatgttgagacagtatttctttttggtggtggtatctttgccatggccctgtgtcttatttcagatgcattatcctcgtaccgtgactcccacactaacagagtactgacctctccaccgtttcgcctcatgcctttccctccttcctctcctagactgctggttaccttggctgggagagaggatgtagtgggacattcctgtaacactttatccgcacatctactggaaatcgttaccatgttaataacttggttttgaattcatgttaacatgtgtacccatgaacatttttcattttcttttcatagtgcgatacataggtgcatgacagcattaacctggggacgtagaatatgatcaaggcagcattactgctttaactttagaatgacttactatttattaatttaaacagactgctgtttccacaaccttagcattgaaggtctttcattttctcccatcaagctatgttagtttaggtaatgtagaaatatttaccctctggcttaagctggtttagagtaactaactagagctatagtttgcatgggaaagtctgcacgagcttcttgtcagatatttcttgctcttctgtcgcattacttactaaacctcccaactctcatcatattcttcatttaaccacctcctacatgttttcttttggaccatggcctaaaatttaattgtttgtgttttacttgcgttggatttcaaatattatttgatgcttatttttgttttgtgtcttcttgtttctgatttttactctgtcacggctccatctcttacatgtagcttatgtctatgtccttttaacatccccccatcagcctccccctccccctcctgcctctgcctcaccctctgctgttcccaacggcccccagtctcccaagcagcaaaaggaacccctctcccaccgcttcaacgagttcatgacctccaaacccaaaatccactgcttcaggagcctaaagcgtgggggtgcaacaccggaggatttcagcaacctcccacctgaacaaagaaggaaaaagctgcagcagaaagtcgatgagttaaataaagaaattcagaaggagatggatcaaagagatgccataacaaaaatgaaagatgtctacctaaagaatcctcagatgggagacccagccagtttggatcacaaattagcagaagtcagccaaaatatagagaaactgcgagtagagacccagaaatttgaggcctggctggctgaggttgaaggccggctcccagcacgcaacgagcaggcgcgccggcagagcggactgtacgacagccagaacccacccacagtcaacaactgcgcccaggaccgtgagagcccagatggcagttacacagaggagcagagtcaggagagtgagatgaaggtgctggccacggattttgacgacgagtttgatgatgaggagcccctccctgccatagggacgtgcaaagctctctacacatttgaaggtcagaatgaaggaacgatttccgtagttgaaggagaaacattgtatgtcatagaggaagacaaaggcgatggctggacccgcattcggagaaatgaagatgaagagggttatgtccccacttcatatgtcgaagtctgtttggacaaaaatgccaaagattcctagaggggagtgcctgcgagcctcgggtgagccttcctggaggagcctccgtctgcttgttcccacaggcctccagcgccctgccctgtggacagcccacccctccgcagccccatccctgcggggcggtctctctctctctctccagcatgctccctgcggccctgccctcccgcccagcccgggccacctcgtgggggacaagtctcgccagcgcccacccccatggctcgggtcagtcctcatcgctccccctccccaccccgcgcaggccactgagacggtgggacacacgcccccacctgctccttcctgggccctcagtccacccgggctcgtcctggcagcccttccgcgcttcacacagtgccttttgtgaaagtgtcatcacgggtcccctgaggagacaaggcaggtccagcgcacatcaggcggactgagcactcgatgtcatccgtgtcgatgtcatccgtgtgtcccagactgcctgctgtagaaaacacttcctcctctcctgagtctgtgaagtcctcagtggtcctttttggattctaggcttgcacctcatactaaacattgaccctttcactatgccctcaacctgggagcatctggcaggcaggggggcaggtacacacacacccacaggcacacccaccagtacacacgcgtgcgcatacacacattttggtttgacgccctgttttcagtggcctggggaggtccacactggaagtcgaattccagctcgccttgttgactcgcctgtgtccaccggccatgaggagcccacgcctgtcctccccatcactttcctgtccctgagaactgtagatcatgcgcttgtgagcgaggccctcccctctgcaccagctcattgcaaagcgaacatcctctcctttccaggagccccaggattagcatctgaaaagggtagcacttccttttttgttgttgttttttttttttttttgagacgggagtctcgctctattgttcagactggagtgcagtggcatgatctcggctcactacaacctccacctcctgggttccagcgattctcctgcctcagcctcccaaatagctgtgattacaggcgtgcaccaccacgcccggctaatgtttgtatttttagtagagacagggtttcaccgtgttggtcaggctggtctcaaactcctgacctcaggtgatccgcccgcctcagcctcccaaagtgctgagattacaggtgtgagctaccgcaccccgccgaggttagcactttcatcaccaaagaccccgtgcctctcgtggtcctttgagggatcccgccgccaccacccttgtattttatcacgtgctcttcagggcatgtggaattcgttgagtttgcttttagagccaagtttctttccctgtgtgggtttttgaggaaaacctgaggtcccctaatctgtggccaccaccccccccccgccgccacgccttagagcagagcagcccctcctctcatttggtgcagaaacagtcaagaggaaccattggcctagagctcctgtgaccgagagcgccacggaagcctggggatgatgtcgggcagctttattctttgcttggctttggtaactaggtggtcccctcaagcatcctcagttcctcttgctgtttatgaatctaagacaaggaagtcctatagaagccaaagggacagggacggaaaggacaggtcccaagggatggggctgtctttacttgtggaaaccaggaaattgctcctctcagccaaccaaggttgaccacacaccacccttccggagcagctcagtcagccctcggggacgagaaaccacaagcgcagagacgctgaggcccaggcaggtgaagaggaagtggctttgggtttttaaagtaggtgagcgtgagcctctctgactgcttcttccccgggggggactgcaaaccgctcagggttgcggcagagccatggacttccggtccctgcaacgggtgacctaagcgtggtgcacccatcagtcacgcaggaggactgacttgacagacgaaagacaagcccggatgacacagggtgagaagagtcagggccgcacctctgtccctgcaaaccaacaggtgcatggtgagtgtggcagtccccacagctccacaatgggctcccccgccaacggggacgacagggatcttcaggaacttctgacctcaccaagtcaagtggaccactctccactccacgaggatgtgaaacggttctttaaaatgggattttagagcctcgggaatgcatgtgcgtcgcatctttcatattatgggtcaggatagattcatttcttgcaacatagtggaaaagatataagctgcagtaatttgctctttgaatgaccgtcacccccagtataggatatgcttgtatccccccgtcactcctccgcctgttttttaaacttttccaccacctgcgtccaaaaagaatgttatagcgagtgctcttaaatgttgaacctgggtgttgcttccgggccagtctgcgtggctccatgaaaagctcactgctgccccagccgggcttcttagaggaggtcagttgtcctatgtatcatcatttactctgggaatcctactgtgaaatcatgtctgtatttttctggagcagttcacatagagtagaatgtggaatttcccgtgaacgtctccttcctcccccgtatctgccgcctgtcacttcgccaccgtgctagaatactgttgtgttgtaagatgactaattttaaaagaacctgccctgaaaagttcttagaaacgcaatgaaagggaggaacttgtcctttacccagtttttcctttgtaggatgggaaagtataaaaaggcacagaaggttgtcatgggctgttccttgggggtttttatcctgctcaccgtggagataagcctgcggcttgtctaaccagcgcagcgcaaaggtctcaatgccttttggtaacatccgtcattgcagaagaaagtttacacgacgtcaaaaagtgacgttcatgctaagtgtttttccagaaatattggtttcatgtttcttattggctctgcctcctgtgcttatatcatccaaaaactttttaaaaaggtccagaattctattttaacctgatgttgagcacctttaaaacgttcgtatgtgtgttgcactaattctaaactttggaggcattttgctgtgtgaggccgatcgccactgtaaaggtcctagagttgcctgtttgtctctggagatggaattaaaccaaataaagagcttccactggaggcttgtattgaccttgtaactatatgttaatctcgtgttaaaataaaatataacttgtg

SEQ ID NO: 299880 - DNA, 4682 bp, Homo sapiens
acaaaagcgcagtgagcctcacccttctttcctccttgtctgagaccccttgtatgtccccctacggatggacacctcagcagttgctgggtcattgtgttgtcatggtccccatcctcagagagcatctttgaaggccaagtgcagtacacgtgtgcgtacacacacacacacacacacacacacacacacacacacacacacacacgggggagtgagagtggtcgcttgtgtgctccgggtattctagagaggcgacctgcacacacgctcgcttgactctgcacatcttttacaaaagcttataaatcagggtttgagcctcctggagacattgaatttgaggattacactcagccaatgaagcgcactgtgtcagataacagcctttcaaattccagaggagaaggcaaaccagacctcaaatttggtggcaaatccaaaggaaagttatggccgttcatcaaaaaaaataagctatgtccttttaacatccccccatcagcctccccctccccctcctgcctctgcctcaccctctgctgttcccaacggcccccagtctcccaagcagcaaaaggaacccctctcccaccgcttcaacgagttcatgacctccaaacccaaaatccactgcttcaggagcctaaagcgtgggggtgcaacaccggaggatttcagcaacctcccacctgaacaaagaaggaaaaagctgcagcagaaagtcgatgagttaaataaagaaattcagaaggagatggatcaaagagatgccataacaaaaatgaaagatgtctacctaaagaatcctcagatgggagacccagccagtttggatcacaaattagcagaagtcagccaaaatatagagaaactgcgagtagagacccagaaatttgaggcctggctggctgaggttgaaggccggctcccagcacgcaacgagcaggcgcgccggcagagcggactgtacgacagccagaacccacccacagtcaacaactgcgcccaggaccgtgagagcccagatggcagttacacagaggagcagagtcaggagagtgagatgaaggtgctggccacggattttgacgacgagtttgatgatgaggagcccctccctgccatagggacgtgcaaagctctctacacatttgaaggtcagaatgaaggaacgatttccgtagttgaaggagaaacattgtatgtcatagaggaagacaaaggcgatggctggacccgcattcggagaaatgaagatgaagagggttatgtccccacttcatatgtcgaagtctgtttggacaaaaatgccaaagattcctagaggggagtgcctgcgagcctcgggtgagccttcctggaggagcctccgtctgcttgttcccacaggcctccagcgccctgccctgtggacagcccacccctccgcagccccatccctgcggggcggtctctctctctctctccagcatgctccctgcggccctgccctcccgcccagcccgggccacctcgtgggggacaagtctcgccagcgcccacccccatggctcgggtcagtcctcatcgctccccctccccaccccgcgcaggccactgagacggtgggacacacgcccccacctgctccttcctgggccctcagtccacccgggctcgtcctggcagcccttccgcgcttcacacagtgccttttgtgaaagtgtcatcacgggtcccctgaggagacaaggcaggtccagcgcacatcaggcggactgagcactcgatgtcatccgtgtcgatgtcatccgtgtgtcccagactgcctgctgtagaaaacacttcctcctctcctgagtctgtgaagtcctcagtggtcctttttggattctaggcttgcacctcatactaaacattgaccctttcactatgccctcaacctgggagcatctggcaggcaggggggcaggtacacacacacccacaggcacacccaccagtacacacgcgtgcgcatacacacattttggtttgacgccctgttttcagtggcctggggaggtccacactggaagtcgaattccagctcgccttgttgactcgcctgtgtccaccggccatgaggagcccacgcctgtcctccccatcactttcctgtccctgagaactgtagatcatgcgcttgtgagcgaggccctcccctctgcaccagctcattgcaaagcgaacatcctctcctttccaggagccccaggattagcatctgaaaagggtagcacttccttttttgttgttgttttttttttttttttgagacgggagtctcgctctattgttcagactggagtgcagtggcatgatctcggctcactacaacctccacctcctgggttccagcgattctcctgcctcagcctcccaaatagctgtgattacaggcgtgcaccaccacgcccggctaatgtttgtatttttagtagagacagggtttcaccgtgttggtcaggctggtctcaaactcctgacctcaggtgatccgcccgcctcagcctcccaaagtgctgagattacaggtgtgagctaccgcaccccgccgaggttagcactttcatcaccaaagaccccgtgcctctcgtggtcctttgagggatcccgccgccaccacccttgtattttatcacgtgctcttcagggcatgtggaattcgttgagtttgcttttagagccaagtttctttccctgtgtgggtttttgaggaaaacctgaggtcccctaatctgtggccaccaccccccccccgccgccacgccttagagcagagcagcccctcctctcatttggtgcagaaacagtcaagaggaaccattggcctagagctcctgtgaccgagagcgccacggaagcctggggatgatgtcgggcagctttattctttgcttggctttggtaactaggtggtcccctcaagcatcctcagttcctcttgctgtttatgaatctaagacaaggaagtcctatagaagccaaagggacagggacggaaaggacaggtcccaagggatggggctgtctttacttgtggaaaccaggaaattgctcctctcagccaaccaaggttgaccacacaccacccttccggagcagctcagtcagccctcggggacgagaaaccacaagcgcagagacgctgaggcccaggcaggtgaagaggaagtggctttgggtttttaaagtaggtgagcgtgagcctctctgactgcttcttccccgggggggactgcaaaccgctcagggttgcggcagagccatggacttccggtccctgcaacgggtgacctaagcgtggtgcacccatcagtcacgcaggaggactgacttgacagacgaaagacaagcccggatgacacagggtgagaagagtcagggccgcacctctgtccctgcaaaccaacaggtgcatggtgagtgtggcagtccccacagctccacaatgggctcccccgccaacggggacgacagggatcttcaggaacttctgacctcaccaagtcaagtggaccactctccactccacgaggatgtgaaacggttctttaaaatgggattttagagcctcgggaatgcatgtgcgtcgcatctttcatattatgggtcaggatagattcatttcttgcaacatagtggaaaagatataagctgcagtaatttgctctttgaatgaccgtcacccccagtataggatatgcttgtatccccccgtcactcctccgcctgttttttaaacttttccaccacctgcgtccaaaaagaatgttatagcgagtgctcttaaatgttgaacctgggtgttgcttccgggccagtctgcgtggctccatgaaaagctcactgctgccccagccgggcttcttagaggaggtcagttgtcctatgtatcatcatttactctgggaatcctactgtgaaatcatgtctgtatttttctggagcagttcacatagagtagaatgtggaatttcccgtgaacgtctccttcctcccccgtatctgccgcctgtcacttcgccaccgtgctagaatactgttgtgttgtaagatgactaattttaaaagaacctgccctgaaaagttcttagaaacgcaatgaaagggaggaacttgtcctttacccagtttttcctttgtaggatgggaaagtataaaaaggcacagaaggttgtcatgggctgttccttgggggtttttatcctgctcaccgtggagataagcctgcggcttgtctaaccagcgcagcgcaaaggtctcaatgccttttggtaacatccgtcattgcagaagaaagtttacacgacgtcaaaaagtgacgttcatgctaagtgtttttccagaaatattggtttcatgtttcttattggctctgcctcctgtgcttatatcatccaaaaactttttaaaaaggtccagaattctattttaacctgatgttgagcacctttaaaacgttcgtatgtgtgttgcactaattctaaactttggaggcattttgctgtgtgaggccgatcgccactgtaaaggtcctagagttgcctgtttgtctctggagatggaattaaaccaaataaagagcttccactggaggcttgtattgaccttgtaactatatgttaatctcgtgttaaaataaaatataacttgtg

SEQ ID NO: 299881 - DNA, 5309 bp, Homo sapiens
cggccgcggctgctgcttcctcgggccattttgctgtggagcggcggggaggaggagccgccgaggagaccccgggcgaggagctgcgagccggaggaggccgcgcggactccgggctttccgccgtcgcggggatctcggggggcaaagggatcgccggggagggggaccagagagccgcgcccgccgcgcggagcgccccttcgcgtcccctgcaccatgagctggggcaccgagctctgggatcagtttgacaacttagaaaaacacacacagtggggaattgatattcttgagaaatatatcaagtttgtgaaagaaaggacagagattgaactcagctatgcaaagcaactcaggaatctttcaaagaagtaccaacctaaaaagaactcgaaggaggaagaagaatacaagtatacgtcatgtaaagctttcatttccaacctgaacgaaatgaatgattacgcagggcagcatgaagttatctccgagaacatggcatcacagatcattgtggacttggcacgctatgttcaggaactgaaacaggagaggaaatcaaactttcacgatggccgtaaagcacagcagcacatcgagacttgctggaagcagcttgaatctagtaaaaggcgatttgaacgcgattgcaaagaggcggacagggcgcagcagtactttgagaaaatggacgctgacatcaatgtcacaaaagcggatgttgaaaaggcccgacaacaagctcaaatacgtcaccaaatggcagaggacagcaaagcagattactcatccattctccagaaattcaaccatgagcagcatgaatattaccatactcacatccccaacatcttccagaaaatacaagagatggaggaaaggaggattgtgagaatgggagagtccatgaagacatatgcagaggttgatcggcaggtgatcccaatcattgggaagtgcctggatggaatagtaaaagcagccgaatcaattgatcagaaaaatgattcacagctggtaatagaagcttataaatcagggtttgagcctcctggagacattgaatttgaggattacactcagccaatgaagcgcactgtgtcagataacagcctttcaaattccagaggagaaggcaaaccagacctcaaatttggtggcaaatccaaaggaaagttatggccgttcatcaaaaaaaataagctatgtccttttaacatccccccatcagcctccccctccccctcctgcctctgcctcaccctctgctgttcccaacggcccccagtctcccaagcagcaaaaggaacccctctcccaccgcttcaacgagttcatgacctccaaacccaaaatccactgcttcaggagcctaaagcgtgggggtgcaacaccggaggatttcagcaacctcccacctgaacaaagaaggaaaaagctgcagcagaaagtcgatgagttaaataaagaaattcagaaggagatggatcaaagagatgccataacaaaaatgaaagatgtctacctaaagaatcctcagatgggagacccagccagtttggatcacaaattagcagaagtcagccaaaatatagagaaactgcgagtagagacccagaaatttgaggcctggctggctgaggttgaaggccggctcccagcacgcaacgagcaggcgcgccggcagagcggactgtacgacagccagaacccacccacagtcaacaactgcgcccaggaccgtgagagcccagatggcagttacacagaggagcagagtcaggagagtgagatgaaggtgctggccacggattttgacgacgagtttgatgatgaggagcccctccctgccatagggacgtgcaaagctctctacacatttgaaggtcagaatgaaggaacgatttccgtagttgaaggagaaacattgtatgtcatagaggaagacaaaggcgatggctggacccgcattcggagaaatgaagatgaagagggttatgtccccacttcatatgtcgaagtctgtttggacaaaaatgccaaagattcctagaggggagtgcctgcgagcctcgggtgagccttcctggaggagcctccgtctgcttgttcccacaggcctccagcgccctgccctgtggacagcccacccctccgcagccccatccctgcggggcggtctctctctctctctccagcatgctccctgcggccctgccctcccgcccagcccgggccacctcgtgggggacaagtctcgccagcgcccacccccatggctcgggtcagtcctcatcgctccccctccccaccccgcgcaggccactgagacggtgggacacacgcccccacctgctccttcctgggccctcagtccacccgggctcgtcctggcagcccttccgcgcttcacacagtgccttttgtgaaagtgtcatcacgggtcccctgaggagacaaggcaggtccagcgcacatcaggcggactgagcactcgatgtcatccgtgtcgatgtcatccgtgtgtcccagactgcctgctgtagaaaacacttcctcctctcctgagtctgtgaagtcctcagtggtcctttttggattctaggcttgcacctcatactaaacattgaccctttcactatgccctcaacctgggagcatctggcaggcaggggggcaggtacacacacacccacaggcacacccaccagtacacacgcgtgcgcatacacacattttggtttgacgccctgttttcagtggcctggggaggtccacactggaagtcgaattccagctcgccttgttgactcgcctgtgtccaccggccatgaggagcccacgcctgtcctccccatcactttcctgtccctgagaactgtagatcatgcgcttgtgagcgaggccctcccctctgcaccagctcattgcaaagcgaacatcctctcctttccaggagccccaggattagcatctgaaaagggtagcacttccttttttgttgttgttttttttttttttttgagacgggagtctcgctctattgttcagactggagtgcagtggcatgatctcggctcactacaacctccacctcctgggttccagcgattctcctgcctcagcctcccaaatagctgtgattacaggcgtgcaccaccacgcccggctaatgtttgtatttttagtagagacagggtttcaccgtgttggtcaggctggtctcaaactcctgacctcaggtgatccgcccgcctcagcctcccaaagtgctgagattacaggtgtgagctaccgcaccccgccgaggttagcactttcatcaccaaagaccccgtgcctctcgtggtcctttgagggatcccgccgccaccacccttgtattttatcacgtgctcttcagggcatgtggaattcgttgagtttgcttttagagccaagtttctttccctgtgtgggtttttgaggaaaacctgaggtcccctaatctgtggccaccaccccccccccgccgccacgccttagagcagagcagcccctcctctcatttggtgcagaaacagtcaagaggaaccattggcctagagctcctgtgaccgagagcgccacggaagcctggggatgatgtcgggcagctttattctttgcttggctttggtaactaggtggtcccctcaagcatcctcagttcctcttgctgtttatgaatctaagacaaggaagtcctatagaagccaaagggacagggacggaaaggacaggtcccaagggatggggctgtctttacttgtggaaaccaggaaattgctcctctcagccaaccaaggttgaccacacaccacccttccggagcagctcagtcagccctcggggacgagaaaccacaagcgcagagacgctgaggcccaggcaggtgaagaggaagtggctttgggtttttaaagtaggtgagcgtgagcctctctgactgcttcttccccgggggggactgcaaaccgctcagggttgcggcagagccatggacttccggtccctgcaacgggtgacctaagcgtggtgcacccatcagtcacgcaggaggactgacttgacagacgaaagacaagcccggatgacacagggtgagaagagtcagggccgcacctctgtccctgcaaaccaacaggtgcatggtgagtgtggcagtccccacagctccacaatgggctcccccgccaacggggacgacagggatcttcaggaacttctgacctcaccaagtcaagtggaccactctccactccacgaggatgtgaaacggttctttaaaatgggattttagagcctcgggaatgcatgtgcgtcgcatctttcatattatgggtcaggatagattcatttcttgcaacatagtggaaaagatataagctgcagtaatttgctctttgaatgaccgtcacccccagtataggatatgcttgtatccccccgtcactcctccgcctgttttttaaacttttccaccacctgcgtccaaaaagaatgttatagcgagtgctcttaaatgttgaacctgggtgttgcttccgggccagtctgcgtggctccatgaaaagctcactgctgccccagccgggcttcttagaggaggtcagttgtcctatgtatcatcatttactctgggaatcctactgtgaaatcatgtctgtatttttctggagcagttcacatagagtagaatgtggaatttcccgtgaacgtctccttcctcccccgtatctgccgcctgtcacttcgccaccgtgctagaatactgttgtgttgtaagatgactaattttaaaagaacctgccctgaaaagttcttagaaacgcaatgaaagggaggaacttgtcctttacccagtttttcctttgtaggatgggaaagtataaaaaggcacagaaggttgtcatgggctgttccttgggggtttttatcctgctcaccgtggagataagcctgcggcttgtctaaccagcgcagcgcaaaggtctcaatgccttttggtaacatccgtcattgcagaagaaagtttacacgacgtcaaaaagtgacgttcatgctaagtgtttttccagaaatattggtttcatgtttcttattggctctgcctcctgtgcttatatcatccaaaaactttttaaaaaggtccagaattctattttaacctgatgttgagcacctttaaaacgttcgttccagttctttgaccccatggggtagtactttgccacaggaagtgctagatgctttggtcagcctctgggatgtggatgagttagtgt

SEQ ID NO: 299882 - DNA, 2973 bp, Homo sapiens
cggccgcggctgctgcttcctcgggccattttgctgtggagcggcggggaggaggagccgccgaggagaccccgggcgaggagctgcgagccggaggaggccgcgcggactccgggctttccgccgtcgcggggatctcggggggcaaagggatcgccggggagggggaccagagagccgcgcccgccgcgcggagcgccccttcgcgtcccctgcaccatgagctggggcaccgagctctgggatcagtttgacaacttagaaaaacacacacagtggggaattgatattcttgagaaatatatcaagtttgtgaaagaaaggacagagattgaactcagctatgcaaagcaactcaggaatctttcaaagaagtaccaacctaaaaagaactcgaaggaggaagaagaatacaagtatacgtcatgtaaagctttcatttccaacctgaacgaaatgaatgattacgcagggcagcatgaagttatctccgagaacatggcatcacagatcattgtggacttggcacgctatgttcaggaactgaaacaggagaggaaatcaaactttcacgatggccgtaaagcacagcagcacatcgagacttgctggaagcagcttgaatctagtaaaaggcgatttgaacgcgattgcaaagaggcggacagggcgcagcagtactttgagaaaatggacgctgacatcaatgtcacaaaagcggatgttgaaaaggcccgacaacaagctcaaatacgtcaccaaatggcagaggacagcaaagcagattactcatccattctccagaaattcaaccatgagcagcatgaatattaccatactcacatccccaacatcttccagaaaatacaagagatggaggaaaggaggattgtgagaatgggagagtccatgaagacatatgcagaggttgatcggcaggtgatcccaatcattgggaagtgcctggatggaatagtaaaagcagccgaatcaattgatcagaaaaatgattcacagctggtaatagaagcttataaatcagggtttgagcctcctggagacattgaatttgaggattacactcagccaatgaagcgcactgtgtcagataacagcctttcaaattccagaggagaaggcaaaccagacctcaaatttggtggcaaatccaaaggaaagttatggccgttcatcaaaaaaaataagctatgtccttttaacatccccccatcagcctccccctccccctcctgcctctgcctcaccctctgctgttcccaacggcccccagtctcccaagcagcaaaaggaacccctctcccaccgcttcaacgagttcatgacctccaaacccaaaatccactgcttcaggagcctaaagcgtgggggtgcaacaccggaggatttcagcaacctcccacctgaacaaagaaggaaaaagctgcagcagaaagtcgatgagttaaataaagaaattcagaaggagatggatcaaagagatgccataacaaaaatgaaagatgtctacctaaagaatcctcagatgggagacccagccagtttggatcacaaattagcagaagtcagccaaaatatagagaaactgcgagtagagacccagaaatttgaggcctggctggctgaggttgaaggccggctcccagcacgcaacgagcaggcgcgccggcagagcggactgtacgacagccagaacccacccacagtcaacaactgcgcccaggaccgtgagagcccagatggcagttacacagaggagcagagtcaggagagtgagatgaaggtgctggccacggattttgacgacgagtttgatgatgaggagcccctccctgccatagggacgtgcaaagctctctacacatttgaaggtcagaatgaaggaacgatttccgtagttgaaggagaaacattgtatgtcatagaggaagacaaaggcgatggctggacccgcattcggagaaatgaagatgaagagggttatgtccccacttcatatgtcgaagtctgtttggacaaaaatgccaaaggtgctaagacttatatttaataccataaaaaaaaaaaacttaaaaaaaatggagttgtttctccccacaaccgtgactgttacaggcagttcctcaagagactggctggcaagcaccataatgcacgttctcctgtagtctcacgtggacttcagggtccgggcacctgaattgccttgtctagtttgggctgtaatcaagtttcacttgctgatgaaattttatgtggaaagctgccaaccgccaacttacagctatgtcattcaaaatctgataaacatttcttcttttggcggtatctgtagattaaaaaaaaagttgcattgtagcttctcatctttctgaatttaaaagccggcacgcatcatgcaggtgccaaagacttccctactcttgtttatatctagtatccaccatacactgagctacattaggtggttacagattgtaacttaataaactgaactgtgttagtttgttaaattgtatactcattcacttgggaggaagtcacaagtgaaataacatctccttcttgactaaagcagtaaataagattcttatattggcaccaaaagtgtgtgtttttacttaaacctggtcagcatccttggtagggcatcacgagtaccctgttccatctacatgatcccagacaaccagctgaaatctggaaaagtttggtgaattgaccacttgatttttacattgcattgctgattttccaagtgtcatcaaattgacaggtttttgttgttgtgtttgtgtttttgttgttgttgttgttttgagacagagtctggctctgttgcccaggctggagtacagtggctcactgcaacctccgcctcccccaggagaatcacttgaacctggaggcaaaggttgcagtgagctgagatcatgccactgcattccagcctgc

SEQ ID NO: 299883 - DNA, 3057 bp, Homo sapiens
cggccgcggctgctgcttcctcgggccattttgctgtggagcggcggggaggaggagccgccgaggagaccccgggcgaggagctgcgagccggaggaggccgcgcggactccgggctttccgccgtcgcggggatctcggggggcaaagggatcgccggggagggggaccagagagccgcgcccgccgcgcggagcgccccttcgcgtcccctgcaccatgagctggggcaccgagctctgggatcagtttgacaacttagaaaaacacacacagtggggaattgatattcttgagaaatatatcaagtttgtgaaagaaaggacagagattgaactcagctatgcaaagcaactcaggaatctttcaaagaagtaccaacctaaaaagaactcgaaggaggaagaagaatacaagtatacgtcatgtaaagctttcatttccaacctgaacgaaatgaatgattacgcagggcagcatgaagttatctccgagaacatggcatcacagatcattgtggacttggcacgctatgttcaggaactgaaacaggagaggaaatcaaactttcacgatggccgtaaagcacagcagcacatcgagacttgctggaagcagcttgaatctagtaaaaggcgatttgaacgcgattgcaaagaggcggacagggcgcagcagtactttgagaaaatggacgctgacatcaatgtcacaaaagcggatgttgaaaaggcccgacaacaagctcaaatacgtcaccaaatggcagaggacagcaaagcagattactcatccattctccagaaattcaaccatgagcagcatgaatattaccatactcacatccccaacatcttccagaaaatacaagagatggaggaaaggaggattgtgagaatgggagagtccatgaagacatatgcagaggttgatcggcaggtgatcccaatcattgggaagtgcctggatggaatagtaaaagcagccgaatcaattgatcagaaaaatgattcacagctggtaatagaagcttataaatcagggtttgagcctcctggagacattgaatttgaggattacactcagccaatgaagcgcactgtgtcagataacagcctttcaaattccagaggagaaggcaaaccagacctcaaatttggtggcaaatccaaaggaaagttatggccgttcatcaaaaaaaataagtctcccaagcagcaaaaggaacccctctcccaccgcttcaacgagttcatgacctccaaacccaaaatccactgcttcaggagcctaaagcgtgggggtgcaacaccggaggatttcagcaacctcccacctgaacaaagaaggaaaaagctgcagcagaaagtcgatgagttaaataaagaaattcagaaggagatggatcaaagagatgccataacaaaaatgaaagatgtctacctaaagaatcctcagatgggagacccagccagtttggatcacaaattagcagaagtcagccaaaatatagagaaactgcgagtagagacccagaaatttgaggcctggctggctgaggttgaaggccggctcccagcacgcaacgagcaggcgcgccggcagagcggactgtacgacagccagaacccacccacagtcaacaactgcgcccaggaccgtgagagcccagatggcagttacacagaggagcagagtcaggagagtgagatgaaggtgctggccacggattttgacgacgagtttgatgatgaggagcccctccctgccatagggacgtgcaaagctctctacacatttgaaggtcagaatgaaggaacgatttccgtagttgaaggagaaacattgtatgtcatagaggaagacaaaggcgatggctggacccgcattcggagaaatgaagatgaagagggttatgtccccacttcatatgtcgaagtctgtttggacaaaaatgccaaaggtgctaagacttatatttaataccataaaaaaaaaaaacttaaaaaaaatggagttgtttctccccacaaccgtgactgttacaggcagttcctcaagagactggctggcaagcaccataatgcacgttctcctgtagtctcacgtggacttcagggtccgggcacctgaattgccttgtctagtttgggctgtaatcaagtttcacttgctgatgaaattttatgtggaaagctgccaaccgccaacttacagctatgtcattcaaaatctgataaacatttcttcttttggcggtatctgtagattaaaaaaaaagttgcattgtagcttctcatctttctgaatttaaaagccggcacgcatcatgcaggtgccaaagacttccctactcttgtttatatctagtatccaccatacactgagctacattaggtggttacagattgtaacttaataaactgaactgtgttagtttgttaaattgtatactcattcacttgggaggaagtcacaagtgaaataacatctccttcttgactaaagcagtaaataagattcttatattggcaccaaaagtgtgtgtttttacttaaacctggtcagcatccttggtagggcatcacgagtaccctgttccatctacatgatcccagacaaccagctgaaatctggaaaagtttggtgaattgaccacttgatttttacattgcattgctgattttccaagtgtcatcaaattgacaggtttttgttgttgtgtaagagtaaaaggtggtagatggtggtttggagacagagtctgggcaacaagagcaagactccatcccccaaaaaccccccaaaaaataacagacaaaagagaagcagttggagccacgagggtaccttgctcctgagagagatccaagtgagacagaagaagactagagagagagaccaaagatttatcccagtgagaaaatacttacattctgggagggaggagaaagaggcctggaggacttagagaggtcctagagagacagaggtaaacctggacattctgtgcagaaggagatggtttgaagcagaggagtgagggtcgggctttga

SEQ ID NO: 299884 - DNA, 2750 bp, Homo sapiens
cggccgcggctgctgcttcctcgggccattttgctgtggagcggcggggaggaggagccgccgaggagaccccgggcgaggagctgcgagccggaggaggccgcgcggactccgggctttccgccgtcgcggggatctcggggggcaaagggatcgccggggagggggaccagagagccgcgcccgccgcgcggagcgccccttcgcgtcccctgcaccatgagctggggcaccgagctctgggatcagtttgacaacttagaaaaacacacacagtggggaattgatattcttgagaaatatatcaagtttgtgaaagaaaggacagagattgaactcagctatgcaaagcaactcaggaatctttcaaagaagtaccaacctaaaaagaactcgaaggaggaagaagaatacaagtatacgtcatgtaaagctttcatttccaacctgaacgaaatgaatgattacgcagggcagcatgaagttatctccgagaacatggcatcacagatcattgtggacttggcacgctatgttcaggaactgaaacaggagaggaaatcaaactttcacgatggccgtaaagcacagcagcacatcgagacttgctggaagcagcttgaatctagtaaaaggcgatttgaacgcgattgcaaagaggcggacagggcgcagcagtactttgagaaaatggacgctgacatcaatgtcacaaaagcggatgttgaaaaggcccgacaacaagctcaaatacgtcaccaaatggcagaggacagcaaagcagattactcatccattctccagaaattcaaccatgagcagcatgaatattaccatactcacatccccaacatcttccagaaaatacaagagatggaggaaaggaggattgtgagaatgggagagtccatgaagacatatgcagaggttgatcggcaggtgatcccaatcattgggaagtgcctggatggaatagtaaaagcagccgaatcaattgatcagaaaaatgattcacagctggtaatagaagcttataaatcagggtttgagcctcctggagacattgaatttgaggattacactcagccaatgaagcgcactgtgtcagataacagcctttcaaattccagaggagaaggcaaaccagacctcaaatttggtggcaaatccaaaggaaagttatggccgttcatcaaaaaaaataagctatgtccttttaacatccccccatcagcctccccctccccctcctgcctctgcctcaccctctgctgttcccaacggcccccagtctcccaagcagcaaaaggaacccctctcccaccgcttcaacgagttcatgacctccaaacccaaaatccactgcttcaggagcctaaagcgtgggggtgcaacaccggaggatttcagcaacctcccacctgaacaaagaaggaaaaagctgcagcagaaagtcgatgagttaaataaagaaattcagaaggagatggatcaaaggtcagaatgaaggaacgatttccgtagttgaaggagaaacattgtatgtcatagaggaagacaaaggcgatggctggacccgcattcggagaaatgaagatgaagagggttatgtccccacttcatatgtcgaagtctgtttggacaaaaatgccaaaggtgctaagacttatatttaataccataaaaaaaaaaaacttaaaaaaaatggagttgtttctccccacaaccgtgactgttacaggcagttcctcaagagactggctggcaagcaccataatgcacgttctcctgtagtctcacgtggacttcagggtccgggcacctgaattgccttgtctagtttgggctgtaatcaagtttcacttgctgatgaaattttatgtggaaagctgccaaccgccaacttacagctatgtcattcaaaatctgataaacatttcttcttttggcggtatctgtagattaaaaaaaaagttgcattgtagcttctcatctttctgaatttaaaagccggcacgcatcatgcaggtgccaaagacttccctactcttgtttatatctagtatccaccatacactgagctacattaggtggttacagattgtaacttaataaactgaactgtgttagtttgttaaattgtatactcattcacttgggaggaagtcacaagtgaaataacatctccttcttgactaaagcagtaaataagattcttatattggcaccaaaagtgtgtgtttttacttaaacctggtcagcatccttggtagggcatcacgagtaccctgttccatctacatgatcccagacaaccagctgaaatctggaaaagtttggtgaattgaccacttgatttttacattgcattgctgattttccaagtgtcatcaaattgacaggtttttgttgttgtgtaagagtaaaaggtggtagatggtggtttggagacagagtctgggcaacaagagcaagactccatcccccaaaaaccccccaaaaaataacagacaaaagagaagcagttggagccacgagggtaccttgctcctgagagagatccaagtgagacagaagaagactagagagagagaccaaagatttatcccagtgagaaaatacttacattctgggagggaggagaaagaggcctggaggacttagagaggtcctagagagacagaggtaaacctggacattctgtgcagaaggagatggtttgaagcagaggagtgagggtcgggctttga

SEQ ID NO: 299885 - DNA, 1447 bp, Homo sapiens
cggccgcggctgctgcttcctcgggccattttgctgtggagcggcggggaggaggagccgccgaggagaccccgggcgaggagctgcgagccggaggaggccgcgcggactccgggctttccgccgtcgcggggatctcggggggcaaagggatcgccggggagggggaccagagagccgcgcccgccgcgcggagcgccccttcgcgtcccctgcaccatgagctggggcaccgagctctgggatcagtttgacaacttagaaaaacacacacagtggggaattgatattcttgagaaatatatcaagtttgtgaaagaaaggacagagattgaactcagctatgcaaagcaactcaggaatctttcaaagaagtaccaacctaaaaagaactcgaaggaggaagaagaatacaagtatacgtcatgtaaagctttcatttccaacctgaacgaaatgaatgattacgcagggcagcatgaagttatctccgagaacatggcatcacagatcattgtggacttggcacgctatgttcaggaactgaaacaggagaggaaatcaaactttcacgatggccgtaaagcacagcagcacatcgagacttgctggaagcagcttgaatctagtaaaaggcgatttgaacgcgattgcaaagaggcggacagggcgcagcagtactttgagaaaatggacgctgacatcaatgtcacaaaagcggatgttgaaaaggcccgacaacaagctcaaatacgtcaccaaatggcagaggacagcaaagcagattactcatccattctccagaaattcaaccatgagcagcatgaatattaccatactcacatccccaacatcttccagaaaatacaagagatggaggaaaggaggattgtgagaatgggagagtccatgaagacatatgcagaggttgatcggcaggtgatcccaatcattgggaagtgcctggatggaatagtaaaagcagccgaatcaattgatcagaaaaatgattcacagctggtaatagaagcttataaatcagggtttgagcctcctggagacattgaatttgaggattacactcagccaatgaagcgcactgtgtcagataacagcctttcaaattccagaggagaaggcaaaccagacctcaaatttggtggcaaatccaaaggaaagttatggccgttcatcaaaaaaaataagactcagtctttctgttttcacaaagaactcatgaagaggacgatagggaaacccacgtatgcctttgaggctagggactatgttgtaagttcacctgtgatggccaggtcatacagtcatggcacagccactaaccccattcacagcaccaagactggggacccagaggcacttgttatgcttccacactacgaaatgaaattcttaattgagagaactggacaccaggaaaaaaaaaaaa

SEQ ID NO: 299886 - DNA, 393 bp, Homo sapiens
aacctggacatttctgtgcagaaggagatggttttgaggcagtgggtgaggggtccgtgcatctgagaaggtccgagtggggtgaattttgtgtggacttcatcttcgacgacacttgtttcattgcgaaggccactgtttgcttcctccctgcatttgccaagacatctaacatatcctgatattgctttttcaggtcagaatgaaggaacgatttccgtagttgaaggagaaacattgtatgtcatagaggaagacaaaggcgatggctggacccgcattcggagaaatgaagatgaagagggttatgtccccacttcatatgtcgaagtctgtttggacaaaaatgccaaaggtgctaagacttatatttaataccataaaaaaaaaaaa

SEQ ID NO: 299887 - DNA, 1633 bp, Homo sapiens
  misc_feature (196)..(196): n is a, c, g, or t
tggggcttctgactgtggaattggattctagctgtgtgtgttatatcctgttactgttgagacacagaggcgggagtcggcgggggaagatatgtgctgagattagtcagcctgccctccctctcccccaagaaactcaggccccatctggggagagtgagaacttaagaaacttgagacagggaaggagagccgngagcagccaaaacctgctaagtctcagaagactggtttctgcacaagggaatggaagaagtgactggaggtggctgtggattcaactctggcctgagattgattcccttgagataagttgttttctggtgggtgtgtctgggagcattgtgttgggaagggaattcctttctttgggaaacacttttttttttacttgaagtgaaaggtattcagacttgtgtatttcttgtaccaaggagtgggtgtttattgataactgtttctttgggttcatctgaagtgggaatcagactggtaaatatcaagaaaaactgggcatggtggtgtgggcctatagtcctagctactcaggaggtgggaagattgtttgagcccagcagtttgcagccagcctggcaaacatagtgagaccctgtctctttaaaaagagagagaacgtaaggaagtaaaggtgttacacctgttttggctgtctgccatattctcttcctttcctctgaaaaaggagtgggtgagggtagaatctgtagaagaaaaaataaattaaccagaaaatatgtgtgaaaaagggattagaaaagatgtaggaatcttgaaaagtgttctgacacactatgcttagtaatgatgatcttgttaaaatatctagttttttattgttactttttttttgctcagttgctaagaaatatgctgaccataatttctaaacagaaaaatctctgcacacaatatgctaggacagacaatgggacagaatatataaatttaggaatgtcccagagaatcagtagtgtaccaaaagagggatcctagcccttcaaataattctctgcagtaagaaagactgctctgctcacttctacattacactttcttaatgatttgttttcctagtaattgttgtttatctttgaatctagttcttgacacttaggaagaaacctttttgaggaaattaaaagctgttagattggtatttgaaataacgaatttgacaagatgtctaagttaaacctaagttaaacaatatccagataaggctgtgaagactataatatctggcatgttcctcatggagcagtgaaattccatgccaaagccacttacattactatactgtgggtcaaaacatgtctacagattttaagggaccgtgtttccttgcatagaactttcctggagtagcactggatacttagttggtgcctagcaaatgtgatgactaaagaatataatgcatcacagatattatcctgatcaccatttcttggctaaaatgttgtagtggaattctggtggctgttaattctttctcattcaggagatagcaggcaaaattgggtgggccctgggaaggagtgtagctgggctatttaacatctgagaatataggatgtgtgtttatgaaagtaaactcagcttctaatggtaa

SEQ ID NO: 299888 - DNA, 469 bp, Homo sapiens
cttgatatcttgcctgtgtatgtatgtgtatgtgtgtgcttaactgttttgtacttacttcccagtaaaaaaaatgtagttgaccctgttcatcagtgaactcactcataattctcaagttccttccatgccacttcctctacaaaggctgggaaagctaaacaattattttgtatcacctactgcagctcgtgccgaattcggcacgaccctactagtaagtgggatttcaaacttcctgtacaatcaactttaagtaaaaatcttcatgtagtgctatcaggtggtgttaccagtgatgcttgttctttgtatgccaagagttcaacaaaaatggtttgtaaaatatttagatcagtgatattctagcagtgatatatattgacggagtctcgctctgttgcccaggcgggagtgcagtggcatgatctcagctcactgcaacctctgcctcccaggttcaagcgat

SEQ ID NO: 299889 - DNA, 3959 bp, Homo sapiens
taagcgggctttgcgtgcgtgtttgcgtacagcggaggtggcggcgcgggcaggtcggagctcggagctgctgcttctggttctcttgtggccgccgtcgctgtccggctgccttgggctgccgaacagacaaggcgtgggccacagcacctcagaagccgacgcagctcgacgcaggggccggcaggagggtgggcgatcgcgtgtcggagggcgccgcgcgggcaggcgggcgggcgccagagggggaaagaggcgggggcggcgggtcagccgctggccgggccggccggggaatgtcgatgcctgacgcgatgccgctgcccggggtcggggaggagctgaagcaggccaaggagatcgaggacgccgagaagtactccttcatggccaccgtcaccaaggcgcccaagaagcaaatccagtttgctgatgacatgcaggagttcaccaaattccccaccaaaactggccgaagatctttgtctcgctcgatctcacagtcctccactgacagctacagttcagctgcatcctacacagatagctctgatgatgaggtttctccccgagagaagcagcaaaccaactccaagggcagcagcaatttctgtgtgaagaacatcaagcaggcagaatttggacgccgggagattgagattgcagagcaagacatgtctgctctgatttcactcaggaaacgtgctcagggggagaagcccttggctggtgctaaaatagtgggctgtacacacatcacagcccagacagcggtgttgattgagacactctgtgccctgggggctcagtgccgctggtctgcttgtaacatctactcaactcagaatgaagtagctgcagcactggctgaggctggagttgcagtgttcgcttggaagggcgagtcagaagatgacttctggtggtgtattgaccgctgtgtgaacatggatgggtggcaggccaacatgatcctggatgatgggggagacttaacccactgggtttataagaagtatccaaacgtgtttaagaagatccgaggcattgtggaagagagcgtgactggtgttcacaggctgtatcagctctccaaagctgggaagctctgtgttccggccatgaacgtcaatgattctgttaccaaacagaagtttgataacttgtactgctgccgagaatccattttggatggcctgaagaggaccacagatgtgatgtttggtgggaaacaagtggtggtgtgtggctatggtgaggtaggcaagggctgctgtgctgctctcaaagctcttggagcaattgtctacattaccgaaatcgaccccatctgtgctctgcaggcctgcatggatgggttcagggtggtaaagctaaatgaagtcatccggcaagtcgatgtcgtaataacttgcacaggaaataagaatgtagtgacacgggagcacttggatcgcatgaaaaacagttgtatcgtatgcaatatgggccactccaacacagaaatcgatgtgaccagcctccgcactccggagctgacgtgggagcgagtacgttctcaggtggaccatgtcatctggccagatggcaaacgagttgtcctcctggcagagggtcgtctactcaatttgagctgctccacagttcccacctttgttctgtccatcacagccacaacacaggctttggcactgatagaactctataatgcacccgaggggcgatacaagcaggatgtgtacttgcttcctaagaaaatggatgaatacgttgccagcttgcatctgccatcatttgatgcccaccttacagagctgacagatgaccaagcaaaatatctgggactcaacaaaaatgggccattcaaacctaattattacagatactaatggaccatactaccaaggaccagtccacctgaaccacacactctaaagaaatattttttaagataacttttattttcttcttactcctttcctcttgatttttttcctataatttcattcttgttttttcatctcattatccaagttctgcagaccacacaggaacttgcttcatggctctttagatgaaatagaagttcagggttcctcactctagtcactaaagaaggattttactctcccagcccagaaaggtgattctttctttaccatttctggggactttagtcttaattaggtaccttattaacaggaaatgctaaggtaccttctctgtggaacaatctgcaatgtctaaatcgccttaaaagagcccatttcttagctgctgaaatcagtgctctttcacttcttcagagaagcagggatggtacctacccggcaggtaggttagatgtgggtggtgcatgttaatttcccttagaagttccaagccctgtttcctgcgtaaaggtggtatgtccagttcagagatgtgtataatgagcatggcttgttaagatcaggaggcccacttggatttatagtatagcccttcctccactcccaccagacttgctcatttttcgagtttttaactagactacactctattgagtttaattttgtcctctaggatttatttctgttgtccaaaaaaaaaaaaaagaaaagaaaaattaaggagaatttttggtgttaatgctgaggaattgcttgagtggttagttgttaccaatttctcttttgaacctttggagctaaggatgctgagtctagagaaatgctagtctcaagccctgttaagtccctctgtttctagcccgtagttcatagcatcagtgaactggagccacaacagcaaattctatcagctgtgtaccatacagcttgtgctgaaggcgaatttcttgagccattactcagtataaagcactgagttctatctttaggatttatctttaagagcaaatttctggtcagctgtgcttctgcaacctaaaatatttaaagggaggtaggtgtgggcaggaggaggaatgataaattgggccagggcaagaaaaatctagcttcatataatttgtctgggactatacaccctatataatgttagttttacagaagtaatatgacttttgattgctacataccacaaagagtttatgaactgagatcataaagggcaactgatgtgtgaagaaagtagtcagtacatcctggctcatgctctgaaagaatatccagagaggctctctcaaagatcagggagatgtattcccatgccatgcaccctgcttcccagcatttctgcatggtcaagtgagctttatgctcatgagctttaagtatataattatccaggattttaaatcctcaacttgttctagcttgtgatccctcaaagttgggtcatacgttagtgctagatactagaaattttcacttttccactgatcagagagacagacattaaaaacaaaaatagaagaaaggaaagctttcaccctgcagcttcttagcagggaacaattgtcttgccaaaacttttttcccttttctctcccattttcttttacccaatcccttcttactccttgccagtgtgaccatgctttcttctctgtagatgttaacagttaaggcctattttcctcgggcacttaaccaaccaatcagaacaccacatctgttaggggaggtaacctggccaacagtgtatccatcacgttagccctgctggagggaagggacccacattcacctgccctctgacctgccccttgatcccatatctattaccgtgtccataggaataataggtaagggctctgtctctgtcaagccatgtaacaaaggacactgttaaaaaaaaaaaaaagtctggcatcagagggagcatgtggagagcaacttgggaagaacaagttcattttgtattgaatgatttttaatgaatgcaatattaatccttgcagatgagcaataatcattaaaatcgattaaaatgataagaccttaaaagaagac

SEQ ID NO: 299890 - DNA, 4548 bp, Homo sapiens
taagcgggctttgcgtgcgtgtttgcgtacagcggaggtggcggcgcgggcaggtcggagctcggagctgctgcttctggttctcttgtggccgccgtcgctgtccggctgccttgggctgccgaacagacaaggcgtgggccacagcacctcagaagccgacgcagctcgacgcaggggccggcaggagggtgggcgatcgcgtgtcggagggcgccgcgcgggcaggcgggcgggcgccagagggggaaagaggcgggggcggcgggtcagccgctggccgggccggccggggaatgtcgatgcctgacgcgatgccgctgcccggggtcggggaggagctgaagcaggccaaggagatcgaggacgccgagaagtactccttcatggccaccgtcaccaaggcgcccaagaagcaaatccagtttgctgatgacatgcaggagttcaccaaattccccaccaaaactggccgaagatctttgtctcgctcgatctcacagtcctccactgacagctacagttcagctgcatcctacacagatagctctgatgatgaggtttctccccgagagaagcagcaaaccaactccaagggcagcagcaatttctgtgtgaagaacatcaagcaggcagaatttggacgccgggagattgagattgcagagcaagacatgtctgctctgatttcactcaggaaacgtgctcagggggagaagcccttggctggtgctaaaatagtgggctgtacacacatcacagcccagacagcggtgttgattgagacactctgtgccctgggggctcagtgccgctggtctgcttgtaacatctactcaactcagaatgaagtagctgcagcactggctgaggctggagttgcagtgttcgcttggaagggcgagtcagaagatgacttctggtggtgtattgaccgctgtgtgaacatggatgggtggcaggccaacatgatcctggatgatgggggagacttaacccactgggtttataagaagtatccaaacgtgtttaagaagatccgaggcattgtggaagagagcgtgactggtgttcacaggctgtatcagctctccaaagctgggaagctctgtgttccggccatgaacgtcaatgattctgttaccaaacagaagtttgataacttgtactgctgccgagaatccattttggatggcctgaagaggaccacagatgtgatgtttggtgggaaacaagtggtggtgtgtggctatggtgaggtaggcaagggctgctgtgctgctctcaaagctcttggagcaattgtctacattaccgaaatcgaccccatctgtgctctgcaggcctgcatggatgggttcagggtggtaaagctaaatgaagtcatccggcaagtcgatgtcgtaataacttgcacaggaaataagaatgtagtgacacgggagcacttggatcgcatgaaaaacagttgtatcgtatgcaatatgggccactccaacacagaaatcgatgtgaccagcctccgcactccggagctgacgtgggagcgagtacgttctcaggtggaccatgtcatctggccagatggcaaacgagttgtcctcctggcagagggtcgtctactcaatttgagctgctccacagttcccacctttgttctgtccatcacagccacaacacaggctttggcactgatagaactctataatgcacccgaggggcgatacaagcaggatgtgtacttgcttcctaagaaaatggatgaatacgttgccagcttgcatctgccatcatttgatgcccaccttacagagctgacagatgaccaagcaaaatatctgggactcaacaaaaatgggccattcaaacctaattattacagatactaatggaccatactaccaaggaccagtccacctgaaccacacactctaaagaaatattttttaagataacttttattttcttcttactcctttcctcttgatttttttcctataatttcattcttgttttttcatctcattatccaagttctgcagaccacacaggaacttgcttcatggctctttagatgaaatagaagttcagggttcctcactctagtcactaaagaaggattttactctcccagcccagaaaggtgattctttctttaccatttctggggactttagtcttaattaggtaccttattaacaggaaatgctaaggtaccttctctgtggaacaatctgcaatgtctaaatcgccttaaaagagcccatttcttagctgctgaaatcagtgctctttcacttcttcagagaagcagggatggtacctacccggcaggtaggttagatgtgggtggtgcatgttaatttcccttagaagttccaagccctgtttcctgcgtaaaggtggtatgtccagttcagagatgtgtataatgagcatggcttgttaagatcaggaggcccacttggatttatagtatagcccttcctccactcccaccagacttgctcatttttcgagtttttaactagactacactctattgagtttaattttgtcctctaggatttatttctgttgtccaaaaaaaaaaaaaagaaaagaaaaattaaggagaatttttggtgttaatgctgaggaattgcttgagtggttagttgttaccaatttctcttttgaacctttggagctaaggatgctgagtctagagaaatgctagtctcaagccctgttaagtccctctgtttctagcccgtagttcatagcatcagtgaactggagccacaacagcaaattctatcagctgtgtaccatacagcttgtgctgaaggcgaatttcttgagccattactcagtataaagcactgagttctatctttaggatttatctttaagagcaaatttctggtcagctgtgcttctgcaacctaaaatatttaaagggaggtaggtgtgggcaggaggaggaatgataaattgggccagggcaagaaaaatctagcttcatataatttgtctgggactatacaccctatataatgttagttttacagaagtaatatgacttttgattgctacataccacaaagagtttatgaactgagatcataaagggcaactgatgtgtgaagaaagtagtcagtacatcctggctcatgctctgaaagaatatccagagaggctctctcaaagatcagggagatgtattcccatgccatgcaccctgcttcccagcatttctgcatggtcaagtgagctttatgctcatgagctttaagtatataattatccaggattttaaatcctcaacttgttctagcttgtgatccctcaaagttgggtcatacgttagtgctagatactagaaattttcacttttccactgatcagagagacagacattaaaaacaaaaatagaagaaaggaaagctttcaccctgcagcttcttagcagggaacaattgtcttgccaaaacttttttcccttttctctcccattttcttttacccaatcccttcttactccttgccagtgtgaccatgctttcttctctgtagatgttaacagttaaggcctattttcctcgggcacttaaccaaccaatcagaacaccacatctgttaggggaggtaacctggccaacagtgtatccatcacgttagccctgctggagggaagggacccacattcacctgccctctgacctgccccttgatcccatatctattaccgtgtccataggaataataggtaagggctctgtctctgtcaagccatgtaacaaaggacactgttaaaaaaaaaaaaaagtctggcatcagagggagcatgtggagagcaacttgggaagaacaagttcattttgtattgaatgatttttaatgaatgcaatattaatccttgcagatgagcaataatcattaaaatcgattaaaatggttaagaaaaaaaaaaaaaaaaaaaaaaaaaaaaaaacaagaaaagacaaaaaaaaaaaaaaaaaaaaaaaacaagcaaacaaaaacaacaaaagcacgaagcagacgaacacgcgaagagacaagagtaaggctagaccactcttgatggagcacacacgaacaagaagtaaaagcagccgggcagcagcggcccccacaggaagaagagtagtacacgcaacacatagtgggcacactgaccaacaacataagacacgaggctaaactgacaaggaaaacgaacacacgagcaaagagagaggataaccgacgaacacaaaaagagggagaggagggcggaacgcagtatacaacacacaccgcgaggggatagaagaagcctcaccgcagactagataagaaagaacatagaataaatccccgcgcgaggcgataaagcagcgacacacagaacacgaaaaacaacacgaagcacaagagaaccaaacaagaaggagcaaagaaagaagaagaatacgaagagaaacacacaacagcgaacagaacagaaagcagacaagcgaaaacactcgagacaaagagcaacagccaggcgatcacctcagc

SEQ ID NO: 299891 - DNA, 3761 bp, Homo sapiens
  misc_feature (3599)..(3599): n is a, c, g, or t
taagcgggctttgcgtgcgtgtttgcgtacagcggaggtggcggcgcgggcaggtcggagctcggagctgctgcttctggttctcttgtggccgccgtcgctgtccggctgccttgggctgccgaacagacaaggcgtgggccacagcacctcagaagccgacgcagctcgacgcaggggccggcaggagggtgggcgatcgcgtgtcggagggcgccgcgcgggcaggcgggcgggcgccagagggggaaagaggcgggggcggcgggtcagccgctggccgggccggccggggaatgtcgatgcctgacgcgatgccgctgcccggggtcggggaggagctgaagcaggccaaggagatcgaggacgccgagaagtactccttcatggccaccgtcaccaaggcgcccaagaagcaaatccagtttgctgatgacatgcaggagttcaccaaattccccaccaaaactggccgaagatctttgtctcgctcgatctcacagtcctccactgacagctacagttcagctgcatcctacacagatagctctgatgatgaggtttctccccgagagaagcagcaaaccaactccaagggcagcagcaatttctgtgtgaagaacatcaagcaggcagaatttggacgccgggagattgagattgcagagcaagacatgtctgctctgatttcactcaggaaacgtgctcagggggagaagcccttggctggtgctaaaatagtgggctgtacacacatcacagcccagacagcggtgttgattgagacactctgtgccctgggggctcagtgccgctggtctgcttgtaacatctactcaactcagaatgaagtagctgcagcactggctgaggctggagttgcagtgttcgcttggaagggcgagtcagaagatgacttctggtggtgtattgaccgctgtgtgaacatggatgggtggcaggccaacatgatcctggatgatgggggagacttaacccactgggtttataagaagtatccaaacgtgtttaagaagatccgaggcattgtggaagagagcgtgactggtgttcacaggctgtatcagctctccaaagctgggaagctctgtgttccggccatgaacgtcaatgattctgttaccaaacagaagtttgataacttgtactgctgccgagaatccattttggatggcctgaagaggaccacagatgtgatgtttggtgggaaacaagtggtggtgtgtggctatggtgaggtaggcaagggctgctgtgctgctctcaaagctcttggagcaattgtctacattaccgaaatcgaccccatctgtgctctgcaggcctgcatggatgggttcagggtggtaaagctaaatgaagtcatccggcaagtcgatgtcgtaataacttgcacaggaaataagaatgtagtgacacgggagcacttggatcgcatgaaaaacagttgtatcgtatgcaatatgggccactccaacacagaaatcgatgtgaccagcctccgcactccggagctgacgtgggagcgagtacgttctcaggtggaccatgtcatctggccagatggcaaacgagttgtcctcctggcagagggtcgtctactcaatttgagctgctccacagttcccacctttgttctgtccatcacagccacaacacaggctttggcactgatagaactctataatgcacccgaggggcgatacaagcaggatgtgtacttgcttcctaagaaaatggatgaatacgttgccagcttgcatctgccatcatttgatgcccaccttacagagctgacagatgaccaagcaaaatatctgggactcaacaaaaatgggccattcaaacctaattattacagatactaatggaccatactaccaaggaccagtccacctgaaccacacactctaaagaaatattttttaagataacttttattttcttcttactcctttcctcttgatttttttcctataatttcattcttgttttttcatctcattatccaagttctgcagaccacacaggaacttgcttcatggctctttagatgaaatagaagttcagggttcctcactctagtcactaaagaaggattttactctcccagcccagaaaggtgattctttctttaccatttctggggactttagtcttaattaggtaccttattaacaggaaatgctaaggtaccttctctgtggaacaatctgcaatgtctaaatcgccttaaaagagcccatttcttagctgctgaaatcagtgctctttcacttcttcagagaagcagggatggtacctacccggcaggtaggttagatgtgggtggtgcatgttaatttcccttagaagttccaagccctgtttcctgcgtaaaggtggtatgtccagttcagagatgtgtataatgagcatggcttgttaagatcaggaggcccacttggatttatagtatagcccttcctccactcccaccagacttgctcatttttcgagtttttaactagactacactctattgagtttaattttgtcctctaggatttatttctgttgtccaaaaaaaaaaaaaagaaaagaaaaattaaggagaatttttggtgttaatgctgaggaattgcttgagtggttagttgttaccaatttctcttttgaacctttggagctaaggatgctgagtctagagaaatgctagtctcaagccctgttaagtccctctgtttctagcccgtagttcatagcatcagtgaactggagccacaacagcaaattctatcagctgtgtaccatacagcttgtgctgaaggcgaatttcttgagccattactcagtataaagcactgagttctatctttaggatttatctttaagagcaaatttctggtcagctgtgcttctgcaacctaaaatatttaaagggaggtaggtgtgggcaggaggaggaatgataaattgggccagggcaagaaaaatctagcttcatataatttgtctgggactatacaccctatataatgttagttttacagaagtaatatgacttttgattgctacataccacaaagagtttatgaactgagatcataaagggcaactgatgtgtgaagaaagtagtcagtacatcctggctcatgctctgaaagaatatccagagaggctctctcaaagatcagggagatgtattcccatgccatgcaccctgcttcccagcatttctgcatggtcaagtgagctttatgctcatgagctttaagtatataattatccaggattttaaatcctcaacttgttctagcttgtgatccctcaaagttgggtcatacgttagtgctagatactagaaattttcacttttccactgatcagagagacagacattaaaaacaaaaatagaagaaaggaaagctttcaccctgcagcttcttagcagggaacaattgtcttgccaaaacttttttcccttttctctcccattttcttttacccaatcccttcttactccttgccagtgtgaccatgctttcttctctgtagatgttaacagttaaggcctattttcctcgggcacttaacancattgaacccttgtgggggggggccgcccaggttcccccgtgccgttggggggggccctcagggcgggccggccattaggccgagaggaggggccgcccgaggcggaaacgctgggggggggacttttttctgcattaaagggggccctgcggtttgtttcc

SEQ ID NO: 299892 - DNA, 3715 bp, Homo sapiens
taagcgggctttgcgtgcgtgtttgcgtacagcggaggtggcggcgcgggcaggtcggagctcggagctgctgcttctggttctcttgtggccgccgtcgctgtccggctgccttgggctgccgaacagacaaggcgtgggccacagcacctcagaagccgacgcagctcgacgcaggggccggcaggagggtgggcgatcgcgtgtcggagggcgccgcgcgggcaggcgggcgggcgccagagggggaaagaggcgggggcggcgggtcagccgctggccgggccggccggggaatgtcgatgcctgacgcgatgccgctgcccggggtcggggaggagctgaagcaggccaaggagatcgaggacgccgagaagtactccttcatggccaccgtcaccaaggcgcccaagaagcaaatccagtttgctgatgacatgcaggagttcaccaaattccccaccaaaactggccgaagatctttgtctcgctcgatctcacagtcctccactgacagctacagttcagctgcatcctacacagatagctctgatgatgaggtttctccccgagagaagcagcaaaccaactccaagggcagcagcaatttctgtgtgaagaacatcaagcaggcagaatttggacgccgggagattgagattgcagagcaagacatgtctgctctgatttcactcaggaaacgtgctcagggggagaagcccttggctggtgctaaaatagtgggctgtacacacatcacagcccagacagcggtgttgattgagacactctgtgccctgggggctcagtgccgctggtctgcttgtaacatctactcaactcagaatgaagtagctgcagcactggctgaggctggagttgcagtgttcgcttggaagggcgagtcagaagatgacttctggtggtgtattgaccgctgtgtgaacatggatgggtggcaggccaacatgatcctggatgatgggggagacttaacccactgggtttataagaagtatccaaacgtgtttaagaagatccgaggcattgtggaagagagcgtgactggtgttcacaggctgtatcagctctccaaagctgggaagctctgtgttccggccatgaacgtcaatgattctgttaccaaacagaagtttgataacttgtactgctgccgagaatccattttggatggcctgaagaggaccacagatgtgatgtttggtgggaaacaagtggtggtgtgtggctatggtgaggtaggcaagggctgctgtgctgctctcaaagctcttggagcaattgtctacattaccgaaatcgaccccatctgtgctctgcaggcctgcatggatgggttcagggtggtaaagctaaatgaagtcatccggcaagtcgatgtcgtaataacttgcacaggaaataagaatgtagtgacacgggagcacttggatcgcatgaaaaacagttgtatcgtatgcaatatgggccactccaacacagaaatcgatgtgaccagcctccgcactccggagctgacgtgggagcgagtacgttctcaggtggaccatgtcatctggccagatggcaaacgagttgtcctcctggcagagggtcgtctactcaatttgagctgctccacagttcccacctttgttctgtccatcacagccacaacacaggctttggcactgatagaactctataatgcacccgaggggcgatacaagcaggatgtgtacttgcttcctaagaaaatggatgaatacgttgccagcttgcatctgccatcatttgatgcccaccttacagagctgacagatgaccaagcaaaatatctgggactcaacaaaaatgggccattcaaacctaattattacagatactaatggaccatactaccaaggaccagtccacctgaaccacacactctaaagaaatattttttaagataacttttattttcttcttactcctttcctcttgatttttttcctataatttcattcttgttttttcatctcattatccaagttctgcagaccacacaggaacttgcttcatggctctttagatgaaatagaagttcagggttcctcactctagtcactaaagaaggattttactctcccagcccagaaaggtgattctttctttaccatttctggggactttagtcttaattaggtaccttattaacaggaaatgctaaggtaccttctctgtggaacaatctgcaatgtctaaatcgccttaaaagagcccatttcttagctgctgaaatcagtgctctttcacttcttcagagaagcagggatggtacctacccggcaggtaggttagatgtgggtggtgcatgttaatttcccttagaagttccaagccctgtttcctgcgtaaaggtggtatgtccagttcagagatgtgtataatgagcatggcttgttaagatcaggaggcccacttggatttatagtatagcccttcctccactcccaccagacttgctcatttttcgagtttttaactagactacactctattgagtttaattttgtcctctaggatttatttctgttgtccaaaaaaaaaaaaaagaaaagaaaaattaaggagaatttttggtgttaatgctgaggaattgcttgagtggttagttgttaccaatttctcttttgaacctttggagctaaggatgctgagtctagagaaatgctagtctcaagccctgttaagtccctctgtttctagcccgtagttcatagcatcagtgaactggagccacaacagcaaattctatcagctgtgtaccatacagcttgtgctgaaggcgaatttcttgagccattactcagtataaagcactgagttctatctttaggatttatctttaagagcaaatttctggtcagctgtgcttctgcaacctaaaatatttaaagggaggtaggtgtgggcaggaggaggaatgataaattgggccagggcaagaaaaatctagcttcatataatttgtctgggactatacaccctatataatgttagttttacagaagtaatatgacttttgattgctacataccacaaagagtttatgaactgagatcataaagggcaactgatgtgtgaagaaagtagtcagtacatcctggctcatgctctgaaagaatatccagagaggctctctcaaagatcagggagatgtattcccatgccatgcaccctgcttcccagcatttctgcatggtcaagtgagctttatgctcatgagctttaagtatataattatccaggattttaaatcctcaacttgttctagcttgtgatccctcaaagttgggtcatacgttagtgctagatactagaaattttcacttttccactgatcagagagacagacattaaaaacaaaaatagaagaaaggaaagctttcaccctgcagcttcttagcagggaacaattgtcttgccaaaacttttttcccttttctctcccattttcttttacccaatcccttcttactccttgccagtgtgaccatgctttcttctctgtagatgttaacagttaagatcaggaggcccacttggatttatagtatagcccttcctccactcccaccagacttgctcatttttcgagtttttaactagactacactctattgagtttaattttgtcctctaggatttatttctgttgtccaaaaaaaaa

SEQ ID NO: 299893 - DNA, 3898 bp, Homo sapiens
taagcgggctttgcgtgcgtgtttgcgtacagcggaggtggcggcgcgggcaggtcggagctcggagctgctgcttctggttctcttgtggccgccgtcgctgtccggctgccttgggctgccgaacagacaaggcgtgggccacagcacctcagaagccgacgcagctcgacgcaggggccggcaggagggtgggcgatcgcgtgtcggagggcgccgcgcgggcaggcgggcgggcgccagagggggaaagaggcgggggcggcgggtcagccgctggccgggccggccggggaatgtcgatgcctgacgcgatgccgctgcccggggtcggggaggagctgaagcaggccaaggagatcgaggacgccgagaagtactccttcatggccaccgtcaccaaggcgcccaagaagcaaatccagtttgctgatgacatgcaggagttcaccaaattccccaccaaaactggccgaagatctttgtctcgctcgatctcacagtcctccactgacagctacagttcagctgcatcctacacagatagctctgatgatgaggtttctccccgagagaagcagcaaaccaactccaagggcagcagcaatttctgtgtgaagaacatcaagcaggcagaatttggacgccgggagattgagattgcagagcaagacatgtctgctctgatttcactcaggaaacgtgctcagggggagaagcccttggctggtgctaaaatagtgggctgtacacacatcacagcccagacagcggtgttgattgagacactctgtgccctgggggctcagtgccgctggtctgcttgtaacatctactcaactcagaatgaagtagctgcagcactggctgaggctggagttgcagtgttcgcttggaagggcgagtcagaagatgacttctggtggtgtattgaccgctgtgtgaacatggatgggtggcaggccaacatgatcctggatgatgggggagacttaacccactgggtttataagaagtatccaaacgtgtttaagaagatccgaggcattgtggaagagagcgtgactggtgttcacaggctgtatcagctctccaaagctgggaagctctgtgttccggccatgaacgtcaatgattctgttaccaaacagaagtttgataacttgtactgctgccgagaatccattttggatggcctgaagaggaccacagatgtgatgtttggtgggaaacaagtggtggtgtgtggctatggtgaggtaggcaagggctgctgtgctgctctcaaagctcttggagcaattgtctacattaccgaaatcgaccccatctgtgctctgcaggcctgcatggatgggttcagggtggtaaagctaaatgaagtcatccggcaagtcgatgtcgtaataacttgcacaggaaataagaatgtagtgacacgggagcacttggatcgcatgaaaaacagttgtatcgtatgcaatatgggccactccaacacagaaatcgatgtgaccagcctccgcactccggagctgacgtgggagcgagtacgttctcaggtggaccatgtcatctggccagatggcaaacgagttgtcctcctggcagagggtcgtctactcaatttgagctgctccacagttcccacctttgttctgtccatcacagccacaacacaggctttggcactgatagaactctataatgcacccgaggggcgatacaagcaggatgtgtacttgcttcctaagaaaatggatgaatacgttgccagcttgcatctgccatcatttgatgcccaccttacagagctgacagatgaccaagcaaaatatctgggactcaacaaaaatgggccattcaaacctaattattacagatactaatggaccatactaccaaggaccagtccacctgaaccacacactctaaagaaatattttttaagataacttttattttcttcttactcctttcctcttgatttttttcctataatttcattcttgttttttcatctcattatccaagttctgcagaccacacaggaacttgcttcatggctctttagatgaaatagaagttcagggttcctcactctagtcactaaagaaggattttactctcccagcccagaaaggtgattctttctttaccatttctggggactttagtcttaattaggtaccttattaacaggaaatgctaaggtaccttctctgtggaacaatctgcaatgtctaaatcgccttaaaagagcccatttcttagctgctgaaatcagtgctctttcacttcttcagagaagcagggatggtacctacccggcaggtaggttagatgtgggtggtgcatgttaatttcccttagaagttccaagccctgtttcctgcgtaaaggtggtatgtccagttcagagatgtgtataatgagcatggcttgttaagatcaggaggcccacttggatttatagtatagcccttcctccactcccaccagacttgctcatttttcgagtttttaactagactacactctattgagtttaattttgtcctctaggatttatttctgttgtccaaagagtggttagttgttaccaatttctcttttgaacctttggagctaaggatgctgagtctagagaaatgctagtctcaagccctgttaagtccctctgtttctagcccgtagttcatagcatcagtgaactggagccacaacagcaaattctatcagctgtgtaccatacagcttgtgctgaaggcgaatttcttgagccattactcagtataaagcactgagttctatctttaggatttatctttaagagcaaatttctggtcagctgtgcttctgcaacctaaaatatttaaagggaggtaggtgtgggcaggaggaggaatgataaattgggccagggcaagaaaaatctagcttcatataatttgtctgggactatacaccctatataatgttagttttacagaagtaatatgacttttgattgctacataccacaaagagtttatgaactgagatcataaagggcaactgatgtgtgaagaaagtagtcagtacatcctggctcatgctctgaaagaatatccagagaggctctctcaaagatcagggagatgtattcccatgccatgcaccctgcttcccagcatttctgcatggtcaagtgagctttatgctcatgagctttaagtatataattatccaggattttaaatcctcaacttgttctagcttgtgatccctcaaagttgggtcatacgttagtgctagatactagaaattttcacttttccactgatcagagagacagacattaaaaacaaaaatagaagaaaggaaagctttcaccctgcagcttcttagcagggaacaattgtcttgccaaaacttttttcccttttctctcccattttcttttacccaatcccttcttactccttgccagtgtgaccatgctttcttctctgtagatgttaacagttaaggcctattttcctcgggcacttaaccaaccaatcagaacaccacatctgttaggggaggtaacctggccaacagtgtatccatcacgttagccctgctggagggaagggacccacattcacctgccctctgacctgccccttgatcccatatctattaccgtgtccataggaataataggtaagggctctgtctctgtcaagccatgtaacaaaggacactgttaaaaaaaaaaaaaagtctggcatcagagggagcatgtggagagcaacttgggaagaacaagttcattttgtattgaatgatttttaatgaatgcaatattaatccttgcagatgagcaataatcattaaaatcgattaaaatgataagaccttaaaagaagac

SEQ ID NO: 299894 - DNA, 3692 bp, Homo sapiens
taagcgggctttgcgtgcgtgtttgcgtacagcggaggtggcggcgcgggcaggtcggagctcggagctgctgcttctggttctcttgtggccgccgtcgctgtccggctgccttgggctgccgaacagacaaggcgtgggccacagcacctcagaagccgacgcagctcgacgcaggggccggcaggagggtgggcgatcgcgtgtcggagggcgccgcgcgggcaggcgggcgggcgccagagggggaaagaggcgggggcggcgggtcagccgctggccgggccggccggggaatgtcgatgcctgacgcgatgccgctgcccggggtcggggaggagctgaagcaggccaaggagatcgaggacgccgagaagtactccttcatggccaccgtcaccaaggcgcccaagaagcaaatccagtttgctgatgacatgcaggagttcaccaaattccccaccaaaactggccgaagatctttgtctcgctcgatctcacagtcctccactgacagctacagttcagctgcatcctacacagatagctctgatgatgaggtttctccccgagagaagcagcaaaccaactccaagggcagcagcaatttctgtgtgaagaacatcaagcaggcagaatttggacgccgggagattgagattgcagagcaagacatgtctgctctgatttcactcaggaaacgtgctcagggggagaagcccttggctggtgctaaaatagtgggctgtacacacatcacagcccagacagcggtgttgattgagacactctgtgccctgggggctcagtgccgctggtctgcttgtaacatctactcaactcagaatgaagtagctgcagcactggctgaggctggagttgcagtgttcgcttggaagggcgagtcagaagatgacttctggtggtgtattgaccgctgtgtgaacatggatgggtggcaggccaacatgatcctggatgatgggggagacttaacccactgggtttataagaagtatccaaacgtgtttaagaagatccgaggcattgtggaagagagcgtgactggtgttcacaggctgtatcagctctccaaagctgggaagctctgtgttccggccatgaacgtcaatgattctgttaccaaacagaagtttgataacttgtactgctgccgagaatccattttggatggcctgaagaggaccacagatgtgatgtttggtgggaaacaagtggtggtgtgtggctatggtgaggtaggcaagggctgctgtgctgctctcaaagctcttggagcaattgtctacattaccgaaatcgaccccatctgtgctctgcaggcctgcatggatgggttcagggtggtaaagctaaatgaagtcatccggcaagtcgatgtcgtaataacttgcacaggaaataagaatgtagtgacacgggagcacttggatcgcatgaaaaacagttgtatcgtatgcaatatgggccactccaacacagaaatcgatgtgaccagcctccgcactccggagctgacgtgggagcgagtacgttctcaggtggaccatgtcatctggccagatggcaaacgagttgtcctcctggcagagggtcgtctactcaatttgagctgctccacagttcccacctttgttctgtccatcacagccacaacacaggctttggcactgatagaactctataatgcacccgaggggcgatacaagcaggatgtgtacttgcttcctaagaaaatggatgaatacgttgccagcttgcatctgccatcatttgatgcccaccttacagagctgacagatgaccaagcaaaatatctgggactcaacaaaaatgggccattcaaacctaattattacagatactaatggaccatactaccaaggaccagtccacctgaaccacacactctaaagaaatattttttaagataacttttattttcttcttactcctttcctcttgatttttttcctataatttcattcttgttttttcatctcattatccaagttctgcagaccacacaggaacttgcttcatggctctttagatgaaatagaagttcagggttcctcactctagtcactaaagaaggattttactctcccagcccagaaaggtgattctttctttaccatttctggggactttagtcttaattaggtaccttattaacaggaaatgctaaggtaccttctctgtggaacaatctgcaatgtctaaatcgccttaaaagagcccatttcttagctgctgaaatcagtgctctttcacttcttcagagaagcagggatggtacctacccggcaggtaggttagatgtgggtggtgcatgttaatttcccttagaagttccaagccctgtttcctgcgtaaaggtggtatgtccagttcagagatgtgtataatgagcatggcttgttaagatcaggaggcccacttggatttatagtatagcccttcctccactcccaccagacttgctcatttttcgagtttttaactagactacactctattgagtttaattttgtcctctaggatttatttctgttgtccaaaaaaaaaaaaaagaaaagaaaaattaaggagaatttttggtgttaatgctgaggaattgcttgagtggttagttgttaccaatttctcttttgaacctttggagctaaggatgctgagtctagagaaatgctagtctcaagccctgttaagtccctctgtttctagcccgtagttcatagcatcagtgaactggagccacaacagcaaattctatcagctgtgtaccatacagcttgtgctgaaggcgaatttcttgagccattactcagtataaagcactgagttctatctttaggatttatctttaagagcaaatttctggtcagctgtgcttctgcaacctaaaatatttaaagggaggtaggtgtgggcaggaggaggaatgataaattgggccagggcaagaaaaatctagcttcatataatttgtctgggactatacaccctatataatgttagttttacagaagtaatatgacttttgattgctacataccacaaagagtttatgaactgagatcataaagggcaactgatgtgtgaagaaagtagtcagtacatcctggctcatgctctgaaagaatatccagagagacagacattaaaaacaaaaatagaagaaaggaaagctttcaccctgcagcttcttagcagggaacaattgtcttgccaaaacttttttcccttttctctcccattttcttttacccaatcccttcttactccttgccagtgtgaccatgctttcttctctgtagatgttaacagttaaggcctattttcctcgggcacttaaccaaccaatcagaacaccacatctgttaggggaggtaacctggccaacagtgtatccatcacgttagccctgctggagggaagggacccacattcacctgccctctgacctgccccttgatcccatatctattaccgtgtccataggaataataggtaagggctctgtctctgtcaagccatgtaacaaaggacactgttaaaaaaaaaaaattttgtattgaatgatttttaatgaatgcaatattaatccttgcagatgagcaataatcattaaaatcgattaaaatgataagaccttaaaagaagac

SEQ ID NO: 299895 - DNA, 3866 bp, Homo sapiens
  misc_feature (196)..(196): n is a, c, g, or t
tggggcttctgactgtggaattggattctagctgtgtgtgttatatcctgttactgttgagacacagaggcgggagtcggcgggggaagatatgtgctgagattagtcagcctgccctccctctcccccaagaaactcaggccccatctggggagagtgagaacttaagaaacttgagacagggaaggagagccgngagcagccaaaacctgctaagtctcagaagactggtttctgcacaagggaatggaagaagtgactggaggtggctgtggattcaactctggcctgagattgattcccttgagataagttgttttctgcaaatccagtttgctgatgacatgcaggagttcaccaaattccccaccaaaactggccgaagatctttgtctcgctcgatctcacagtcctccactgacagctacagttcagctgcatcctacacagatagctctgatgatgaggtttctccccgagagaagcagcaaaccaactccaagggcagcagcaatttctgtgtgaagaacatcaagcaggcagaatttggacgccgggagattgagattgcagagcaagacatgtctgctctgatttcactcaggaaacgtgctcagggggagaagcccttggctggtgctaaaatagtgggctgtacacacatcacagcccagacagcggtgttgattgagacactctgtgccctgggggctcagtgccgctggtctgcttgtaacatctactcaactcagaatgaagtagctgcagcactggctgaggctggagttgcagtgttcgcttggaagggcgagtcagaagatgacttctggtggtgtattgaccgctgtgtgaacatggatgggtggcaggccaacatgatcctggatgatgggggagacttaacccactgggtttataagaagtatccaaacgtgtttaagaagatccgaggcattgtggaagagagcgtgactggtgttcacaggctgtatcagctctccaaagctgggaagctctgtgttccggccatgaacgtcaatgattctgttaccaaacagaagtttgataacttgtactgctgccgagaatccattttggatggcctgaagaggaccacagatgtgatgtttggtgggaaacaagtggtggtgtgtggctatggtgaggtaggcaagggctgctgtgctgctctcaaagctcttggagcaattgtctacattaccgaaatcgaccccatctgtgctctgcaggcctgcatggatgggttcagggtggtaaagctaaatgaagtcatccggcaagtcgatgtcgtaataacttgcacaggaaataagaatgtagtgacacgggagcacttggatcgcatgaaaaacagttgtatcgtatgcaatatgggccactccaacacagaaatcgatgtgaccagcctccgcactccggagctgacgtgggagcgagtacgttctcaggtggaccatgtcatctggccagatggcaaacgagttgtcctcctggcagagggtcgtctactcaatttgagctgctccacagttcccacctttgttctgtccatcacagccacaacacaggctttggcactgatagaactctataatgcacccgaggggcgatacaagcaggatgtgtacttgcttcctaagaaaatggatgaatacgttgccagcttgcatctgccatcatttgatgcccaccttacagagctgacagatgaccaagcaaaatatctgggactcaacaaaaatgggccattcaaacctaattattacagatactaatggaccatactaccaaggaccagtccacctgaaccacacactctaaagaaatattttttaagataacttttattttcttcttactcctttcctcttgatttttttcctataatttcattcttgttttttcatctcattatccaagttctgcagaccacacaggaacttgcttcatggctctttagatgaaatagaagttcagggttcctcactctagtcactaaagaaggattttactctcccagcccagaaaggtgattctttctttaccatttctggggactttagtcttaattaggtaccttattaacaggaaatgctaaggtaccttctctgtggaacaatctgcaatgtctaaatcgccttaaaagagcccatttcttagctgctgaaatcagtgctctttcacttcttcagagaagcagggatggtacctacccggcaggtaggttagatgtgggtggtgcatgttaatttcccttagaagttccaagccctgtttcctgcgtaaaggtggtatgtccagttcagagatgtgtataatgagcatggcttgttaagatcaggaggcccacttggatttatagtatagcccttcctccactcccaccagacttgctcatttttcgagtttttaactagactacactctattgagtttaattttgtcctctaggatttatttctgttgtccaaaaaaaaaaaaaagaaaagaaaaattaaggagaatttttggtgttaatgctgaggaattgcttgagtggttagttgttaccaatttctcttttgaacctttggagctaaggatgctgagtctagagaaatgctagtctcaagccctgttaagtccctctgtttctagcccgtagttcatagcatcagtgaactggagccacaacagcaaattctatcagctgtgtaccatacagcttgtgctgaaggcgaatttcttgagccattactcagtataaagcactgagttctatctttaggatttatctttaagagcaaatttctggtcagctgtgcttctgcaacctaaaatatttaaagggaggtaggtgtgggcaggaggaggaatgataaattgggccagggcaagaaaaatctagcttcatataatttgtctgggactatacaccctatataatgttagttttacagaagtaatatgacttttgattgctacataccacaaagagtttatgaactgagatcataaagggcaactgatgtgtgaagaaagtagtcagtacatcctggctcatgctctgaaagaatatccagagaggctctctcaaagatcagggagatgtattcccatgccatgcaccctgcttcccagcatttctgcatggtcaagtgagctttatgctcatgagctttaagtatataattatccaggattttaaatcctcaacttgttctagcttgtgatccctcaaagttgggtcatacgttagtgctagatactagaaattttcacttttccactgatcagagagacagacattaaaaacaaaaatagaagaaaggaaagctttcaccctgcagcttcttagcagggaacaattgtcttgccaaaacttttttcccttttctctcccattttcttttacccaatcccttcttactccttgccagtgtgaccatgctttcttctctgtagatgttaacagttaaggcctattttcctcgggcacttaaccaaccaatcagaacaccacatctgttaggggaggtaacctggccaacagtgtatccatcacgttagccctgctggagggaagggacccacattcacctgccctctgacctgccccttgatcccatatctattaccgtgtccataggaataataggtaagggctctgtctctgtcaagccatgtaacaaaggacactgttaaaaaaaaaaaaaagtctggcatcagagggagcatgtggagagcaacttgggaagaacaagttcattttgtattgaatgatttttaatgaatgcaatattaatccttgcagatgagcaataatcattaaaatcgattaaaatgataagaccttaaaagaagac

SEQ ID NO: 299896 - DNA, 3703 bp, Homo sapiens
cacaggtgttgaggcaaagcacttaaagtcatataaatctaggcattcaggatcttggtgtccaccctactagtattagcttctaaatactactcccttctaaaagaaaggctcctgagagaaatggttgattccaggtttggagaagaggaagaacaagcaaatccagtttgctgatgacatgcaggagttcaccaaattccccaccaaaactggccgaagatctttgtctcgctcgatctcacagtcctccactgacagctacagttcagctgcatcctacacagatagctctgatgatgaggtttctccccgagagaagcagcaaaccaactccaagggcagcagcaatttctgtgtgaagaacatcaagcaggcagaatttggacgccgggagattgagattgcagagcaagacatgtctgctctgatttcactcaggaaacgtgctcagggggagaagcccttggctggtgctaaaatagtgggctgtacacacatcacagcccagacagcggtgttgattgagacactctgtgccctgggggctcagtgccgctggtctgcttgtaacatctactcaactcagaatgaagtagctgcagcactggctgaggctggagttgcagtgttcgcttggaagggcgagtcagaagatgacttctggtggtgtattgaccgctgtgtgaacatggatgggtggcaggccaacatgatcctggatgatgggggagacttaacccactgggtttataagaagtatccaaacgtgtttaagaagatccgaggcattgtggaagagagcgtgactggtgttcacaggctgtatcagctctccaaagctgggaagctctgtgttccggccatgaacgtcaatgattctgttaccaaacagaagtttgataacttgtactgctgccgagaatccattttggatggcctgaagaggaccacagatgtgatgtttggtgggaaacaagtggtggtgtgtggctatggtgaggtaggcaagggctgctgtgctgctctcaaagctcttggagcaattgtctacattaccgaaatcgaccccatctgtgctctgcaggcctgcatggatgggttcagggtggtaaagctaaatgaagtcatccggcaagtcgatgtcgtaataacttgcacaggaaataagaatgtagtgacacgggagcacttggatcgcatgaaaaacagttgtatcgtatgcaatatgggccactccaacacagaaatcgatgtgaccagcctccgcactccggagctgacgtgggagcgagtacgttctcaggtggaccatgtcatctggccagatggcaaacgagttgtcctcctggcagagggtcgtctactcaatttgagctgctccacagttcccacctttgttctgtccatcacagccacaacacaggctttggcactgatagaactctataatgcacccgaggggcgatacaagcaggatgtgtacttgcttcctaagaaaatggatgaatacgttgccagcttgcatctgccatcatttgatgcccaccttacagagctgacagatgaccaagcaaaatatctgggactcaacaaaaatgggccattcaaacctaattattacagatactaatggaccatactaccaaggaccagtccacctgaaccacacactctaaagaaatattttttaagataacttttattttcttcttactcctttcctcttgatttttttcctataatttcattcttgttttttcatctcattatccaagttctgcagaccacacaggaacttgcttcatggctctttagatgaaatagaagttcagggttcctcactctagtcactaaagaaggattttactctcccagcccagaaaggtgattctttctttaccatttctggggactttagtcttaattaggtaccttattaacaggaaatgctaaggtaccttctctgtggaacaatctgcaatgtctaaatcgccttaaaagagcccatttcttagctgctgaaatcagtgctctttcacttcttcagagaagcagggatggtacctacccggcaggtaggttagatgtgggtggtgcatgttaatttcccttagaagttccaagccctgtttcctgcgtaaaggtggtatgtccagttcagagatgtgtataatgagcatggcttgttaagatcaggaggcccacttggatttatagtatagcccttcctccactcccaccagacttgctcatttttcgagtttttaactagactacactctattgagtttaattttgtcctctaggatttatttctgttgtccaaaaaaaaaaaaaagaaaagaaaaattaaggagaatttttggtgttaatgctgaggaattgcttgagtggttagttgttaccaatttctcttttgaacctttggagctaaggatgctgagtctagagaaatgctagtctcaagccctgttaagtccctctgtttctagcccgtagttcatagcatcagtgaactggagccacaacagcaaattctatcagctgtgtaccatacagcttgtgctgaaggcgaatttcttgagccattactcagtataaagcactgagttctatctttaggatttatctttaagagcaaatttctggtcagctgtgcttctgcaacctaaaatatttaaagggaggtaggtgtgggcaggaggaggaatgataaattgggccagggcaagaaaaatctagcttcatataatttgtctgggactatacaccctatataatgttagttttacagaagtaatatgacttttgattgctacataccacaaagagtttatgaactgagatcataaagggcaactgatgtgtgaagaaagtagtcagtacatcctggctcatgctctgaaagaatatccagagaggctctctcaaagatcagggagatgtattcccatgccatgcaccctgcttcccagcatttctgcatggtcaagtgagctttatgctcatgagctttaagtatataattatccaggattttaaatcctcaacttgttctagcttgtgatccctcaaagttgggtcatacgttagtgctagatactagaaattttcacttttccactgatcagagagacagacattaaaaacaaaaatagaagaaaggaaagctttcaccctgcagcttcttagcagggaacaattgtcttgccaaaacttttttcccttttctctcccattttcttttacccaatcccttcttactccttgccagtgtgaccatgctttcttctctgtagatgttaacagttaaggcctattttcctcgggcacttaaccaaccaatcagaacaccacatctgttaggggaggtaacctggccaacagtgtatccatcacgttagccctgctggagggaagggacccacattcacctgccctctgacctgccccttgatcccatatctattaccgtgtccataggaataataggtaagggctctgtctctgtcaagccatgtaacaaaggacactgttaaaaaaaaaaaaaagtctggcatcagagggagcatgtggagagcaacttgggaagaacaagttcattttgtattgaatgatttttaatgaatgcaatattaatccttgcagatgagcaataatcattaaaatcgattaaaatgataagaccttaaaagaagac

SEQ ID NO: 299897 - DNA, 3775 bp, Homo sapiens
taagcgggctttgcgtgcgtgtttgcgtacagcggaggtggcggcgcgggcaggtcggagctcggagctgctgcttctggttctcttgtggccgccgtcgctgtccggctgccttgggctgccgaacagacaaggcgtgggccacagcacctcagaagccgacgcagctcgacgcaggggccggcaggagggtgggcgatcgcgtgtcggagggcgccgcgcgggcaggcggcaaatccagtttgctgatgacatgcaggagttcaccaaattccccaccaaaactggccgaagatctttgtctcgctcgatctcacagtcctccactgacagctacagttcagctgcatcctacacagatagctctgatgatgaggtttctccccgagagaagcagcaaaccaactccaagggcagcagcaatttctgtgtgaagaacatcaagcaggcagaatttggacgccgggagattgagattgcagagcaagacatgtctgctctgatttcactcaggaaacgtgctcagggggagaagcccttggctggtgctaaaatagtgggctgtacacacatcacagcccagacagcggtgttgattgagacactctgtgccctgggggctcagtgccgctggtctgcttgtaacatctactcaactcagaatgaagtagctgcagcactggctgaggctggagttgcagtgttcgcttggaagggcgagtcagaagatgacttctggtggtgtattgaccgctgtgtgaacatggatgggtggcaggccaacatgatcctggatgatgggggagacttaacccactgggtttataagaagtatccaaacgtgtttaagaagatccgaggcattgtggaagagagcgtgactggtgttcacaggctgtatcagctctccaaagctgggaagctctgtgttccggccatgaacgtcaatgattctgttaccaaacagaagtttgataacttgtactgctgccgagaatccattttggatggcctgaagaggaccacagatgtgatgtttggtgggaaacaagtggtggtgtgtggctatggtgaggtaggcaagggctgctgtgctgctctcaaagctcttggagcaattgtctacattaccgaaatcgaccccatctgtgctctgcaggcctgcatggatgggttcagggtggtaaagctaaatgaagtcatccggcaagtcgatgtcgtaataacttgcacaggaaataagaatgtagtgacacgggagcacttggatcgcatgaaaaacagttgtatcgtatgcaatatgggccactccaacacagaaatcgatgtgaccagcctccgcactccggagctgacgtgggagcgagtacgttctcaggtggaccatgtcatctggccagatggcaaacgagttgtcctcctggcagagggtcgtctactcaatttgagctgctccacagttcccacctttgttctgtccatcacagccacaacacaggctttggcactgatagaactctataatgcacccgaggggcgatacaagcaggatgtgtacttgcttcctaagaaaatggatgaatacgttgccagcttgcatctgccatcatttgatgcccaccttacagagctgacagatgaccaagcaaaatatctgggactcaacaaaaatgggccattcaaacctaattattacagatactaatggaccatactaccaaggaccagtccacctgaaccacacactctaaagaaatattttttaagataacttttattttcttcttactcctttcctcttgatttttttcctataatttcattcttgttttttcatctcattatccaagttctgcagaccacacaggaacttgcttcatggctctttagatgaaatagaagttcagggttcctcactctagtcactaaagaaggattttactctcccagcccagaaaggtgattctttctttaccatttctggggactttagtcttaattaggtaccttattaacaggaaatgctaaggtaccttctctgtggaacaatctgcaatgtctaaatcgccttaaaagagcccatttcttagctgctgaaatcagtgctctttcacttcttcagagaagcagggatggtacctacccggcaggtaggttagatgtgggtggtgcatgttaatttcccttagaagttccaagccctgtttcctgcgtaaaggtggtatgtccagttcagagatgtgtataatgagcatggcttgttaagatcaggaggcccacttggatttatagtatagcccttcctccactcccaccagacttgctcatttttcgagtttttaactagactacactctattgagtttaattttgtcctctaggatttatttctgttgtccaaaaaaaaaaaaaagaaaagaaaaattaaggagaatttttggtgttaatgctgaggaattgcttgagtggttagttgttaccaatttctcttttgaacctttggagctaaggatgctgagtctagagaaatgctagtctcaagccctgttaagtccctctgtttctagcccgtagttcatagcatcagtgaactggagccacaacagcaaattctatcagctgtgtaccatacagcttgtgctgaaggcgaatttcttgagccattactcagtataaagcactgagttctatctttaggatttatctttaagagcaaatttctggtcagctgtgcttctgcaacctaaaatatttaaagggaggtaggtgtgggcaggaggaggaatgataaattgggccagggcaagaaaaatctagcttcatataatttgtctgggactatacaccctatataatgttagttttacagaagtaatatgacttttgattgctacataccacaaagagtttatgaactgagatcataaagggcaactgatgtgtgaagaaagtagtcagtacatcctggctcatgctctgaaagaatatccagagaggctctctcaaagatcagggagatgtattcccatgccatgcaccctgcttcccagcatttctgcatggtcaagtgagctttatgctcatgagctttaagtatataattatccaggattttaaatcctcaacttgttctagcttgtgatccctcaaagttgggtcatacgttagtgctagatactagaaattttcacttttccactgatcagagagacagacattaaaaacaaaaatagaagaaaggaaagctttcaccctgcagcttcttagcagggaacaattgtcttgccaaaacttttttcccttttctctcccattttcttttacccaatcccttcttactccttgccagtgtgaccatgctttcttctctgtagatgttaacagttaaggcctattttcctcgggcacttaaccaaccaatcagaacaccacatctgttaggggaggtaacctggccaacagtgtatccatcacgttagccctgctggagggaagggacccacattcacctgccctctgacctgccccttgatcccatatctattaccgtgtccataggaataataggtaagggctctgtctctgtcaagccatgtaacaaaggacactgttaaaaaaaaaaaaaagtctggcatcagagggagcatgtggagagcaacttgggaagaacaagttcattttgtattgaatgatttttaatgaatgcaatattaatccttgcagatgagcaataatcattaaaatcgattaaaatgataagaccttaaaagaagac

SEQ ID NO: 299898 - DNA, 3710 bp, Homo sapiens
taagcgggctttgcgtgcgtgtttgcgtacagcggaggtggcggcgcgggcaggtcggagctcggagctgctgcttctggttctcttgtggccgccgtcgctgtccggctgccttgggctgccgaacagacaaggcgtgggccacagcacctcagaagccgacgcagcaaatccagtttgctgatgacatgcaggagttcaccaaattccccaccaaaactggccgaagatctttgtctcgctcgatctcacagtcctccactgacagctacagttcagctgcatcctacacagatagctctgatgatgaggtttctccccgagagaagcagcaaaccaactccaagggcagcagcaatttctgtgtgaagaacatcaagcaggcagaatttggacgccgggagattgagattgcagagcaagacatgtctgctctgatttcactcaggaaacgtgctcagggggagaagcccttggctggtgctaaaatagtgggctgtacacacatcacagcccagacagcggtgttgattgagacactctgtgccctgggggctcagtgccgctggtctgcttgtaacatctactcaactcagaatgaagtagctgcagcactggctgaggctggagttgcagtgttcgcttggaagggcgagtcagaagatgacttctggtggtgtattgaccgctgtgtgaacatggatgggtggcaggccaacatgatcctggatgatgggggagacttaacccactgggtttataagaagtatccaaacgtgtttaagaagatccgaggcattgtggaagagagcgtgactggtgttcacaggctgtatcagctctccaaagctgggaagctctgtgttccggccatgaacgtcaatgattctgttaccaaacagaagtttgataacttgtactgctgccgagaatccattttggatggcctgaagaggaccacagatgtgatgtttggtgggaaacaagtggtggtgtgtggctatggtgaggtaggcaagggctgctgtgctgctctcaaagctcttggagcaattgtctacattaccgaaatcgaccccatctgtgctctgcaggcctgcatggatgggttcagggtggtaaagctaaatgaagtcatccggcaagtcgatgtcgtaataacttgcacaggaaataagaatgtagtgacacgggagcacttggatcgcatgaaaaacagttgtatcgtatgcaatatgggccactccaacacagaaatcgatgtgaccagcctccgcactccggagctgacgtgggagcgagtacgttctcaggtggaccatgtcatctggccagatggcaaacgagttgtcctcctggcagagggtcgtctactcaatttgagctgctccacagttcccacctttgttctgtccatcacagccacaacacaggctttggcactgatagaactctataatgcacccgaggggcgatacaagcaggatgtgtacttgcttcctaagaaaatggatgaatacgttgccagcttgcatctgccatcatttgatgcccaccttacagagctgacagatgaccaagcaaaatatctgggactcaacaaaaatgggccattcaaacctaattattacagatactaatggaccatactaccaaggaccagtccacctgaaccacacactctaaagaaatattttttaagataacttttattttcttcttactcctttcctcttgatttttttcctataatttcattcttgttttttcatctcattatccaagttctgcagaccacacaggaacttgcttcatggctctttagatgaaatagaagttcagggttcctcactctagtcactaaagaaggattttactctcccagcccagaaaggtgattctttctttaccatttctggggactttagtcttaattaggtaccttattaacaggaaatgctaaggtaccttctctgtggaacaatctgcaatgtctaaatcgccttaaaagagcccatttcttagctgctgaaatcagtgctctttcacttcttcagagaagcagggatggtacctacccggcaggtaggttagatgtgggtggtgcatgttaatttcccttagaagttccaagccctgtttcctgcgtaaaggtggtatgtccagttcagagatgtgtataatgagcatggcttgttaagatcaggaggcccacttggatttatagtatagcccttcctccactcccaccagacttgctcatttttcgagtttttaactagactacactctattgagtttaattttgtcctctaggatttatttctgttgtccaaaaaaaaaaaaaagaaaagaaaaattaaggagaatttttggtgttaatgctgaggaattgcttgagtggttagttgttaccaatttctcttttgaacctttggagctaaggatgctgagtctagagaaatgctagtctcaagccctgttaagtccctctgtttctagcccgtagttcatagcatcagtgaactggagccacaacagcaaattctatcagctgtgtaccatacagcttgtgctgaaggcgaatttcttgagccattactcagtataaagcactgagttctatctttaggatttatctttaagagcaaatttctggtcagctgtgcttctgcaacctaaaatatttaaagggaggtaggtgtgggcaggaggaggaatgataaattgggccagggcaagaaaaatctagcttcatataatttgtctgggactatacaccctatataatgttagttttacagaagtaatatgacttttgattgctacataccacaaagagtttatgaactgagatcataaagggcaactgatgtgtgaagaaagtagtcagtacatcctggctcatgctctgaaagaatatccagagaggctctctcaaagatcagggagatgtattcccatgccatgcaccctgcttcccagcatttctgcatggtcaagtgagctttatgctcatgagctttaagtatataattatccaggattttaaatcctcaacttgttctagcttgtgatccctcaaagttgggtcatacgttagtgctagatactagaaattttcacttttccactgatcagagagacagacattaaaaacaaaaatagaagaaaggaaagctttcaccctgcagcttcttagcagggaacaattgtcttgccaaaacttttttcccttttctctcccattttcttttacccaatcccttcttactccttgccagtgtgaccatgctttcttctctgtagatgttaacagttaaggcctattttcctcgggcacttaaccaaccaatcagaacaccacatctgttaggggaggtaacctggccaacagtgtatccatcacgttagccctgctggagggaagggacccacattcacctgccctctgacctgccccttgatcccatatctattaccgtgtccataggaataataggtaagggctctgtctctgtcaagccatgtaacaaaggacactgttaaaaaaaaaaaaaagtctggcatcagagggagcatgtggagagcaacttgggaagaacaagttcattttgtattgaatgatttttaatgaatgcaatattaatccttgcagatgagcaataatcattaaaatcgattaaaatgataagaccttaaaagaagac

SEQ ID NO: 299899 - DNA, 3838 bp, Homo sapiens
taagcgggctttgcgtgcgtgtttgcgtacagcggaggtggcggcgcgggcaggtcggagctcggagctgctgcttctggttctcttgtggccgccgtcgctgtccggctgccttgggctgccgaacagacaaggcgtgggccacagcacctcagaagccgacgcagctcgacgcaggggccggcaggagggtgggcgatcgcgtgtcggagggcgccgcgcgggcaggcgggcgggcgccagagggggaaagaggcgggggcggcgggtcagccgctggccgggccggccggggaatgtcgatgcctgacgcgatgccgctgcccggggtcggggaggagctgaagcaggccaaggagatcgaggacgccgagaagtactccttcatggccaccgtcaccaaggcgcccaagaagcaaatccagtttgctgatgacatgcaggagttcaccaaattccccaccaaaactggccgaagatctttgtctcgctcgatctcacagtcctccactgacagctacagttcagctgcatcctacacagatagctctgatgatgaggtttctccccgagagaagcagcaaaccaactccaagggcagcagcaatttctgtgtgaagaacatcaagcaggcagaatttggacgccgggagattgagattgcagagcaagacatgtctgctctgatttcactcaggaaacgtgctcagggggagaagcccttggctggtgctaaaatagtgggctgtacacacatcacagcccagacagcggtgttgattgagacactctgtgccctgggggctcagtgccgctggtctgcttgtaacatctactcaactcagaatgaagtagctgcagcactggctgaggctggagttgcagtgttcgcttggaagggcgagtcagaagatgacttctggtggtgtattgaccgctgtgtgaacatggatgggtggcaggccaacatgatcctggatgatgggggagacttaacccactgggtttataagaagtatccaaacgtgtttaagaagatccgaggcattgtggaagagagcgtgactggtgttcacaggctgtatcagctctccaaagctgggaagctctgtgttccggccatgaacgtcaatgattctgttaccaaacagaagtttgataacttgtactgctgccgagaatccattttggatggcctgaagaggaccacagatgtgatgtttggtgggaaacaagtggtggtgtgtggctatggtgaggtaggcaagggctgctgtgctgctctcaaagctcttggagcaattgtctacattaccgaaatcgaccccatctgtgctctgcaggcctgcatggatgggttcagggtggtaaagctaaatgaagtcatccggcaagtcgatgtcgtaataacttgcacaggaaataagaatgtagtgacacgggagcacttggatcgcatgaaaaacagttgtatcgtatgcaatatgggccactccaacacagaaatcgatgtgaccagcctccgcactccggagctgacgtgggagcgagtacgttctcaggtggaccatgtcatctggccagatggcaaacgagttgtcctcctggcagagggtcgtctactcaatttgagctgctccacagttcccacctttgttctgtccatcacagccacaacacaggctttggcactgatagaactctataatgcacccgaggggcgatacaagcaggatgtgtacttgcttcctaagaaaatggatactaatggaccatactaccaaggaccagtccacctgaaccacacactctaaagaaatattttttaagataacttttattttcttcttactcctttcctcttgatttttttcctataatttcattcttgttttttcatctcattatccaagttctgcagaccacacaggaacttgcttcatggctctttagatgaaatagaagttcagggttcctcactctagtcactaaagaaggattttactctcccagcccagaaaggtgattctttctttaccatttctggggactttagtcttaattaggtaccttattaacaggaaatgctaaggtaccttctctgtggaacaatctgcaatgtctaaatcgccttaaaagagcccatttcttagctgctgaaatcagtgctctttcacttcttcagagaagcagggatggtacctacccggcaggtaggttagatgtgggtggtgcatgttaatttcccttagaagttccaagccctgtttcctgcgtaaaggtggtatgtccagttcagagatgtgtataatgagcatggcttgttaagatcaggaggcccacttggatttatagtatagcccttcctccactcccaccagacttgctcatttttcgagtttttaactagactacactctattgagtttaattttgtcctctaggatttatttctgttgtccaaaaaaaaaaaaaagaaaagaaaaattaaggagaatttttggtgttaatgctgaggaattgcttgagtggttagttgttaccaatttctcttttgaacctttggagctaaggatgctgagtctagagaaatgctagtctcaagccctgttaagtccctctgtttctagcccgtagttcatagcatcagtgaactggagccacaacagcaaattctatcagctgtgtaccatacagcttgtgctgaaggcgaatttcttgagccattactcagtataaagcactgagttctatctttaggatttatctttaagagcaaatttctggtcagctgtgcttctgcaacctaaaatatttaaagggaggtaggtgtgggcaggaggaggaatgataaattgggccagggcaagaaaaatctagcttcatataatttgtctgggactatacaccctatataatgttagttttacagaagtaatatgacttttgattgctacataccacaaagagtttatgaactgagatcataaagggcaactgatgtgtgaagaaagtagtcagtacatcctggctcatgctctgaaagaatatccagagaggctctctcaaagatcagggagatgtattcccatgccatgcaccctgcttcccagcatttctgcatggtcaagtgagctttatgctcatgagctttaagtatataattatccaggattttaaatcctcaacttgttctagcttgtgatccctcaaagttgggtcatacgttagtgctagatactagaaattttcacttttccactgatcagagagacagacattaaaaacaaaaatagaagaaaggaaagctttcaccctgcagcttcttagcagggaacaattgtcttgccaaaacttttttcccttttctctcccattttcttttacccaatcccttcttactccttgccagtgtgaccatgctttcttctctgtagatgttaacagttaaggcctattttcctcgggcacttaaccaaccaatcagaacaccacatctgttaggggaggtaacctggccaacagtgtatccatcacgttagccctgctggagggaagggacccacattcacctgccctctgacctgccccttgatcccatatctattaccgtgtccataggaataataggtaagggctctgtctctgtcaagccatgtaacaaaggacactgttaaaaaaaaaaaaaagtctggcatcagagggagcatgtggagagcaacttgggaagaacaagttcattttgtattgaatgatttttaatgaatgcaatattaatccttgcagatgagcaataatcattaaaatcgattaaaatgataagaccttaaaagaagac

SEQ ID NO: 299900 - DNA, 3890 bp, Homo sapiens
taagcgggctttgcgtgcgtgtttgcgtacagcggaggtggcggcgcgggcaggtcggagctcggagctgctgcttctggttctcttgtggccgccgtcgctgtccggctgccttgggctgccgaacagacaaggcgtgggccacagcacctcagaagccgacgcagctcgacgcaggggccggcaggagggtgggcgatcgcgtgtcggagggcgccgcgcgggcaggcgggcgggcgccagagggggaaagaggcgggggcggcgggtcagccgctggccgggccggccggggaatgtcgatgcctgacgcgatgccgctgcccggggtcggggaggagctgaagcaggccaaggagatcgaggacgccgagaagtactccttcatggccaccgtcaccaaggcgcccaagaagcaaatccagtttgctgatgacatgcaggagttcaccaaattccccaccaaaactggccgaagatctttgtctcgctcgatctcacagtcctccactgacagctacagttcagctgcatcctacacagatagctctgatgatgaggtttctccccgagagaagcagcaaaccaactccaagggcagcagcaatttctgtgtgaagaacatcaagcaggcagaatttggacgccgggagattgagattgcagagcaagacatgtctgctctgatttcactcaggaaacgtgctcagggggagaagcccttggctggtgctaaaatagtgggctgtacacacatcacagcccagacagcggtgttgattgagacactctgtgccctgggggctcagtgccgctggtctgcttgtaacatctactcaactcagaatgaagtagctgcagcactggctgaggctggagttgcagtgttcgcttggaagggcgagtcagaagatgacttctggtggtgtattgaccgctgtgtgaacatggatgggtggcaggccaacatgatcctggatgatgggggagacttaacccactgggtttataagaagtatccaaacgtgtttaagaagatccgaggcattgtggaagagagcgtgactggtgttcacaggctgtatcagctctccaaagctgggaagctctgtgttccggccatgaacgtcaatgattctgttaccaaacagaagtttgataacttgtactgctgccgagaatccattttggatggcctgaagaggaccacagatgtgatgtttggtgggaaacaagtggtggtgtgtggctatggtgaggtaggcaagggctgctgtgctgctctcaaagctcttggagcaattgtctacattaccgaaatcgaccccatctgtgctctgcaggcctgcatggatgggttcagggtggtaaagctaaatgaagtcatccggcaagtcgatgtcgtaataacttgcacaggaaataagaatgtagtgacacgggagcacttggatcgcatgaaaaacagttgtatcgtatgcaatatgggccactccaacacagaaatcgatgtgaccagcctccgcactccggagctgacgtgggagcgagtacgttctcaggtggaccatgtcatctggccagatggcaaacgagttgtcctcctggcagaggctttggcactgatagaactctataatgcacccgaggggcgatacaagcaggatgtgtacttgcttcctaagaaaatggatgaatacgttgccagcttgcatctgccatcatttgatgcccaccttacagagctgacagatgaccaagcaaaatatctgggactcaacaaaaatgggccattcaaacctaattattacagatactaatggaccatactaccaaggaccagtccacctgaaccacacactctaaagaaatattttttaagataacttttattttcttcttactcctttcctcttgatttttttcctataatttcattcttgttttttcatctcattatccaagttctgcagaccacacaggaacttgcttcatggctctttagatgaaatagaagttcagggttcctcactctagtcactaaagaaggattttactctcccagcccagaaaggtgattctttctttaccatttctggggactttagtcttaattaggtaccttattaacaggaaatgctaaggtaccttctctgtggaacaatctgcaatgtctaaatcgccttaaaagagcccatttcttagctgctgaaatcagtgctctttcacttcttcagagaagcagggatggtacctacccggcaggtaggttagatgtgggtggtgcatgttaatttcccttagaagttccaagccctgtttcctgcgtaaaggtggtatgtccagttcagagatgtgtataatgagcatggcttgttaagatcaggaggcccacttggatttatagtatagcccttcctccactcccaccagacttgctcatttttcgagtttttaactagactacactctattgagtttaattttgtcctctaggatttatttctgttgtccaaaaaaaaaaaaaagaaaagaaaaattaaggagaatttttggtgttaatgctgaggaattgcttgagtggttagttgttaccaatttctcttttgaacctttggagctaaggatgctgagtctagagaaatgctagtctcaagccctgttaagtccctctgtttctagcccgtagttcatagcatcagtgaactggagccacaacagcaaattctatcagctgtgtaccatacagcttgtgctgaaggcgaatttcttgagccattactcagtataaagcactgagttctatctttaggatttatctttaagagcaaatttctggtcagctgtgcttctgcaacctaaaatatttaaagggaggtaggtgtgggcaggaggaggaatgataaattgggccagggcaagaaaaatctagcttcatataatttgtctgggactatacaccctatataatgttagttttacagaagtaatatgacttttgattgctacataccacaaagagtttatgaactgagatcataaagggcaactgatgtgtgaagaaagtagtcagtacatcctggctcatgctctgaaagaatatccagagaggctctctcaaagatcagggagatgtattcccatgccatgcaccctgcttcccagcatttctgcatggtcaagtgagctttatgctcatgagctttaagtatataattatccaggattttaaatcctcaacttgttctagcttgtgatccctcaaagttgggtcatacgttagtgctagatactagaaattttcacttttccactgatcagagagacagacattaaaaacaaaaatagaagaaaggaaagctttcaccctgcagcttcttagcagggaacaattgtcttgccaaaacttttttcccttttctctcccattttcttttacccaatcccttcttactccttgccagtgtgaccatgctttcttctctgtagatgttaacagttaaggcctattttcctcgggcacttaaccaaccaatcagaacaccacatctgttaggggaggtaacctggccaacagtgtatccatcacgttagccctgctggagggaagggacccacattcacctgccctctgacctgccccttgatcccatatctattaccgtgtccataggaataataggtaagggctctgtctctgtcaagccatgtaacaaaggacactgttaaaaaaaaaaaaaagtctggcatcagagggagcatgtggagagcaacttgggaagaacaagttcattttgtattgaatgatttttaatgaatgcaatattaatccttgcagatgagcaataatcattaaaatcgattaaaatgataagaccttaaaagaagac

SEQ ID NO: 299901 - DNA, 3724 bp, Homo sapiens
ttaatggtcgatgtcctgacgcgaattccggctgccatgtggttcgggtacaggatgctgatgactagagctcaggttaatgaatcgtagtgcatgactcgcagaaagttacttccgttcagtggtccatcgctcacctgaaggtcgcccgaagcaacgcaaagtccaggtttgctgataacattgcaggcgagtttcaccgaagattctccttaccaaaatacgtggtggcgcacgttcttttggatcatcgctcgatctcacagtcctcctactgacagctactagttcagctgcatcctacacagatagctctgatgatgaggtttctccccgagagaagcagcaaaccaactccaagggcagcagcaatttctgtgtgaagaacatcaagcaggcagaatttggacgccgggagattgagattgcagagcaagacatgtctgctctgatttcactcaggaaacgtgctcagggggagaagcccttggctggtgctaaaatagtgggctgtacacacatcacagcccagacagcggtgttgattgagacactctgtgccctgggggctcagtgccgctggtctgcttgtaacatctactcaactcagaatgaagtagctgcagcactggctgaggctggagttgcagtgttcgcttggaagggcgagtcagaagatgacttctggtggtgtattgaccgctgtgtgaacatggatgggtggcaggccaacatgatcctggatgatgggggagacttaacccactgggtttataagaagtatccaaacgtgtttaagaagatccgaggcattgtggaagagagcgtgactggtgttcacaggctgtatcagctctccaaagctgggaagctctgtgttccggccatgaacgtcaatgattctgttaccaaacagaagtttgataacttgtactgctgccgagaatccattttggatggcctgaagaggaccacagatgtgatgtttggtgggaaacaagtggtggtgtgtggctatggtgaggtaggcaagggctgctgtgctgctctcaaagctcttggagcaattgtctacattaccgaaatcgaccccatctgtgctctgcaggcctgcatggatgggttcagggtggtaaagctaaatgaagtcatccggcaagtcgatgtcgtaataacttgcacaggaaataagaatgtagtgacacgggagcacttggatcgcatgaaaaacagttgtatcgtatgcaatatgggccactccaacacagaaatcgatgtgaccagcctccgcactccggagctgacgtgggagcgagtacgttctcaggtggaccatgtcatctggccagatggcaaacgagttgtcctcctggcagagggtcgtctactcaatttgagctgctccacagttcccacctttgttctgtccatcacagccacaacacaggctttggcactgatagaactctataatgcacccgaggggcgatacaagcaggatgtgtacttgcttcctaagaaaatggatgaatacgttgccagcttgcatctgccatcatttgatgcccaccttacagagctgacagatgaccaagcaaaatatctgggactcaacaaaaatgggccattcaaacctaattattacagatactaatggaccatactaccaaggaccagtccacctgaaccacacactctaaagaaatattttttaagataacttttattttcttcttactcctttcctcttgatttttttcctataatttcattcttgttttttcatctcattatccaagttctgcagaccacacaggaacttgcttcatggctctttagatgaaatagaagttcagggttcctcactctagtcactaaagaaggattttactctcccagcccagaaaggtgattctttctttaccatttctggggactttagtcttaattaggtaccttattaacaggaaatgctaaggtaccttctctgtggaacaatctgcaatgtctaaatcgccttaaaagagcccatttcttagctgctgaaatcagtgctctttcacttcttcagagaagcagggatggtacctacccggcaggtaggttagatgtgggtggtgcatgttaatttcccttagaagttccaagccctgtttcctgcgtaaaggtggtatgtccagttcagagatgtgtataatgagcatggcttgttaagatcaggaggcccacttggatttatagtatagcccttcctccactcccaccagacttgctcatttttcgagtttttaactagactacactctattgagtttaattttgtcctctaggatttatttctgttgtccaaaaaaaaaaaaaagaaaagaaaaattaaggagaatttttggtgttaatgctgaggaattgcttgagtggttagttgttaccaatttctcttttgaacctttggagctaaggatgctgagtctagagaaatgctagtctcaagccctgttaagtccctctgtttctagcccgtagttcatagcatcagtgaactggagccacaacagcaaattctatcagctgtgtaccatacagcttgtgctgaaggcgaatttcttgagccattactcagtataaagcactgagttctatctttaggatttatctttaagagcaaatttctggtcagctgtgcttctgcaacctaaaatatttaaagggaggtaggtgtgggcaggaggaggaatgataaattgggccagggcaagaaaaatctagcttcatataatttgtctgggactatacaccctatataatgttagttttacagaagtaatatgacttttgattgctacataccacaaagagtttatgaactgagatcataaagggcaactgatgtgtgaagaaagtagtcagtacatcctggctcatgctctgaaagaatatccagagaggctctctcaaagatcagggagatgtattcccatgccatgcaccctgcttcccagcatttctgcatggtcaagtgagctttatgctcatgagctttaagtatataattatccaggattttaaatcctcaacttgttctagcttgtgatccctcaaagttgggtcatacgttagtgctagatactagaaattttcacttttccactgatcagagagacagacattaaaaacaaaaatagaagaaaggaaagctttcaccctgcagcttcttagcagggaacaattgtcttgccaaaacttttttcccttttctctcccattttcttttacccaatcccttcttactccttgccagtgtgaccatgctttcttctctgtagatgttaacagttaaggcctattttcctcgggcacttaaccaaccaatcagaacaccacatctgttaggggaggtaacctggccaacagtgtatccatcacgttagccctgctggagggaagggacccacattcacctgccctctgacctgccccttgatcccatatctattaccgtgtccataggaataataggtaagggctctgtctctgtcaagccatgtaacaaaggacactgttaaaaaaaaaaaaaagtctggcatcagagggagcatgtggagagcaacttgggaagaacaagttcattttgtattgaatgatttttaatgaatgcaatattaatccttgcagatgagcaataatcattaaaatcgattaaaatgataagaccttaaaagaagac

SEQ ID NO: 299902 - DNA, 3657 bp, Homo sapiens
aagataggactaggtagcgtcggtcagtgtattagacattcgtgcactaggcctttagtggcgccctgtcatcaaggtcgcccataaaagccatactccagttatgttgactaacactgcgagcgacgttcaccaaagttaccccaccaaaactgtgccgccgtttttattataatggctcgattctcagatgatcctctatctgacatgcctacaggagtcacgtctgcatcctacacagatagctctgatgatgaggtttctccccgagagaagcagcaaaccaactccaagggcagcagcaatttctgtgtgaagaacatcaagcaggcagaatttggacgccgggagattgagattgcagagcaagacatgtctgctctgatttcactcaggaaacgtgctcagggggagaagcccttggctggtgctaaaatagtgggctgtacacacatcacagcccagacagcggtgttgattgagacactctgtgccctgggggctcagtgccgctggtctgcttgtaacatctactcaactcagaatgaagtagctgcagcactggctgaggctggagttgcagtgttcgcttggaagggcgagtcagaagatgacttctggtggtgtattgaccgctgtgtgaacatggatgggtggcaggccaacatgatcctggatgatgggggagacttaacccactgggtttataagaagtatccaaacgtgtttaagaagatccgaggcattgtggaagagagcgtgactggtgttcacaggctgtatcagctctccaaagctgggaagctctgtgttccggccatgaacgtcaatgattctgttaccaaacagaagtttgataacttgtactgctgccgagaatccattttggatggcctgaagaggaccacagatgtgatgtttggtgggaaacaagtggtggtgtgtggctatggtgaggtaggcaagggctgctgtgctgctctcaaagctcttggagcaattgtctacattaccgaaatcgaccccatctgtgctctgcaggcctgcatggatgggttcagggtggtaaagctaaatgaagtcatccggcaagtcgatgtcgtaataacttgcacaggaaataagaatgtagtgacacgggagcacttggatcgcatgaaaaacagttgtatcgtatgcaatatgggccactccaacacagaaatcgatgtgaccagcctccgcactccggagctgacgtgggagcgagtacgttctcaggtggaccatgtcatctggccagatggcaaacgagttgtcctcctggcagagggtcgtctactcaatttgagctgctccacagttcccacctttgttctgtccatcacagccacaacacaggctttggcactgatagaactctataatgcacccgaggggcgatacaagcaggatgtgtacttgcttcctaagaaaatggatgaatacgttgccagcttgcatctgccatcatttgatgcccaccttacagagctgacagatgaccaagcaaaatatctgggactcaacaaaaatgggccattcaaacctaattattacagatactaatggaccatactaccaaggaccagtccacctgaaccacacactctaaagaaatattttttaagataacttttattttcttcttactcctttcctcttgatttttttcctataatttcattcttgttttttcatctcattatccaagttctgcagaccacacaggaacttgcttcatggctctttagatgaaatagaagttcagggttcctcactctagtcactaaagaaggattttactctcccagcccagaaaggtgattctttctttaccatttctggggactttagtcttaattaggtaccttattaacaggaaatgctaaggtaccttctctgtggaacaatctgcaatgtctaaatcgccttaaaagagcccatttcttagctgctgaaatcagtgctctttcacttcttcagagaagcagggatggtacctacccggcaggtaggttagatgtgggtggtgcatgttaatttcccttagaagttccaagccctgtttcctgcgtaaaggtggtatgtccagttcagagatgtgtataatgagcatggcttgttaagatcaggaggcccacttggatttatagtatagcccttcctccactcccaccagacttgctcatttttcgagtttttaactagactacactctattgagtttaattttgtcctctaggatttatttctgttgtccaaaaaaaaaaaaaagaaaagaaaaattaaggagaatttttggtgttaatgctgaggaattgcttgagtggttagttgttaccaatttctcttttgaacctttggagctaaggatgctgagtctagagaaatgctagtctcaagccctgttaagtccctctgtttctagcccgtagttcatagcatcagtgaactggagccacaacagcaaattctatcagctgtgtaccatacagcttgtgctgaaggcgaatttcttgagccattactcagtataaagcactgagttctatctttaggatttatctttaagagcaaatttctggtcagctgtgcttctgcaacctaaaatatttaaagggaggtaggtgtgggcaggaggaggaatgataaattgggccagggcaagaaaaatctagcttcatataatttgtctgggactatacaccctatataatgttagttttacagaagtaatatgacttttgattgctacataccacaaagagtttatgaactgagatcataaagggcaactgatgtgtgaagaaagtagtcagtacatcctggctcatgctctgaaagaatatccagagaggctctctcaaagatcagggagatgtattcccatgccatgcaccctgcttcccagcatttctgcatggtcaagtgagctttatgctcatgagctttaagtatataattatccaggattttaaatcctcaacttgttctagcttgtgatccctcaaagttgggtcatacgttagtgctagatactagaaattttcacttttccactgatcagagagacagacattaaaaacaaaaatagaagaaaggaaagctttcaccctgcagcttcttagcagggaacaattgtcttgccaaaacttttttcccttttctctcccattttcttttacccaatcccttcttactccttgccagtgtgaccatgctttcttctctgtagatgttaacagttaaggcctattttcctcgggcacttaaccaaccaatcagaacaccacatctgttaggggaggtaacctggccaacagtgtatccatcacgttagccctgctggagggaagggacccacattcacctgccctctgacctgccccttgatcccatatctattaccgtgtccataggaataataggtaagggctctgtctctgtcaagccatgtaacaaaggacactgttaaaaaaaaaaaaaagtctggcatcagagggagcatgtggagagcaacttgggaagaacaagttcattttgtattgaatgatttttaatgaatgcaatattaatccttgcagatgagcaataatcattaaaatcgattaaaatgataagaccttaaaagaagac

SEQ ID NO: 299903 - DNA, 3696 bp, Homo sapiens
taagcgggctttgcgtgcgtgtttgcgtacagcggaggtggcggcgcgggcaggtcggagctcggagctgctgcttctggttctcttgtggccgccgtcgctgtccggctgccttgggctgccgaacagacaaggcgtgggccacagcacctcagaagccgacgcagctcgacgcaggggccggcaggagggtgggcgatcgcgtgtcggagggcgccgcgcgggcaggcgggcgggcgccagagggggaaagaggcgggggcggcgggtcagccgctggccgggccggccggggaatgtcgatgcctgacgcgatgccgctgcccggggtcggggaggagctgaagcaggccaaggagatcgaggacgccgagaagtactccttcatggccaccgtcaccaaggcgcccaagaagcaaatccagtttgctgatgacatgcaggagttcaccaaattccccaccaaaactggccgaagatctttgtctcgctcgatctcacagtcctccactgacagctacagttcagctgcatcctacacagatagctctgatgatgaggtttctccccgagagaagcagcaaaccaactccaagggcagcagcaatttctgtgtgaagaacatcaagcaggcagaatttggacgccgggagattgagattgcagagcaagacatgtctgctctgatttcactcaggaaacgtgctcagggggagaagcccttggctggtgctaaaatagtgggctgtacacacatcacagcccagacagcggtgttgattgagacactctgtgccctgggggctcagtgccgctggtctgcttgtaacatctactcaactcagaatgaagtagctgcagcactggctgaggctggagttgcagtgttcgcttggaagggcgagtcagaagatgacttctggtggtgtattgaccgctgtgtgaacatggatgggtggcaggccaacatgatcctggatgatgggggagacttaacccactgggtttataagaagtatccaaacgtgtttaagaagatccgaggcattgtggaagagagcgtgactggtgttcacaggctgtatcagctctccaaagctgggaagctctgtgttccggccatgaacgtcaatgattctgttaccaaacagaagtttgataacttgtactgctgccgagaatccattttggatggcctgaagaggaccacagatgtgatgtttggtgggaaacaagtggtggtgtgtggctatggtgaggtaggcaagggctgctgtgctgctctcaaagctcttggagcaattgtctacattaccgaaatcgaccccatctgtgctctgcaggcctgcatggatgggttcagggtggtaaagctaaatgaagtcatccggcaagtcgatgtcgtaataacttgcacaggctttggcactgatagaactctataatgcacccgaggggcgatacaagcaggatgtgtacttgcttcctaagaaaatggatgaatacgttgccagcttgcatctgccatcatttgatgcccaccttacagagctgacagatgaccaagcaaaatatctgggactcaacaaaaatgggccattcaaacctaattattacagatactaatggaccatactaccaaggaccagtccacctgaaccacacactctaaagaaatattttttaagataacttttattttcttcttactcctttcctcttgatttttttcctataatttcattcttgttttttcatctcattatccaagttctgcagaccacacaggaacttgcttcatggctctttagatgaaatagaagttcagggttcctcactctagtcactaaagaaggattttactctcccagcccagaaaggtgattctttctttaccatttctggggactttagtcttaattaggtaccttattaacaggaaatgctaaggtaccttctctgtggaacaatctgcaatgtctaaatcgccttaaaagagcccatttcttagctgctgaaatcagtgctctttcacttcttcagagaagcagggatggtacctacccggcaggtaggttagatgtgggtggtgcatgttaatttcccttagaagttccaagccctgtttcctgcgtaaaggtggtatgtccagttcagagatgtgtataatgagcatggcttgttaagatcaggaggcccacttggatttatagtatagcccttcctccactcccaccagacttgctcatttttcgagtttttaactagactacactctattgagtttaattttgtcctctaggatttatttctgttgtccaaaaaaaaaaaaaagaaaagaaaaattaaggagaatttttggtgttaatgctgaggaattgcttgagtggttagttgttaccaatttctcttttgaacctttggagctaaggatgctgagtctagagaaatgctagtctcaagccctgttaagtccctctgtttctagcccgtagttcatagcatcagtgaactggagccacaacagcaaattctatcagctgtgtaccatacagcttgtgctgaaggcgaatttcttgagccattactcagtataaagcactgagttctatctttaggatttatctttaagagcaaatttctggtcagctgtgcttctgcaacctaaaatatttaaagggaggtaggtgtgggcaggaggaggaatgataaattgggccagggcaagaaaaatctagcttcatataatttgtctgggactatacaccctatataatgttagttttacagaagtaatatgacttttgattgctacataccacaaagagtttatgaactgagatcataaagggcaactgatgtgtgaagaaagtagtcagtacatcctggctcatgctctgaaagaatatccagagaggctctctcaaagatcagggagatgtattcccatgccatgcaccctgcttcccagcatttctgcatggtcaagtgagctttatgctcatgagctttaagtatataattatccaggattttaaatcctcaacttgttctagcttgtgatccctcaaagttgggtcatacgttagtgctagatactagaaattttcacttttccactgatcagagagacagacattaaaaacaaaaatagaagaaaggaaagctttcaccctgcagcttcttagcagggaacaattgtcttgccaaaacttttttcccttttctctcccattttcttttacccaatcccttcttactccttgccagtgtgaccatgctttcttctctgtagatgttaacagttaaggcctattttcctcgggcacttaaccaaccaatcagaacaccacatctgttaggggaggtaacctggccaacagtgtatccatcacgttagccctgctggagggaagggacccacattcacctgccctctgacctgccccttgatcccatatctattaccgtgtccataggaataataggtaagggctctgtctctgtcaagccatgtaacaaaggacactgttaaaaaaaaaaaaaagtctggcatcagagggagcatgtggagagcaacttgggaagaacaagttcattttgtattgaatgatttttaatgaatgcaatattaatccttgcagatgagcaataatcattaaaatcgattaaaatgataagaccttaaaagaagac

SEQ ID NO: 299904 - DNA, 4204 bp, Homo sapiens
caaatattaggcctatgtttccctgaattttatctttggagagagagatatttcacaaattggtccccaaaataaaaccactttaaaaaaatctactttttactaagtaacactatttcctaaccacagctgattctttaacctttcagactcagatggatttgcagaaaataggaaaaagcctagagtcctgatctggaactgtaattcttcctcttccaactgagtctagaggggtgtaaagtcctctcccgctttggcttgacttgtatgccattggaatctgagacagagctcatcccagggctctctcttacctttccagggtcgtctactcaatttgagctgctccacagttcccacctttgttctgtccatcacagccacaacacaggtatgtggcaaaatgcctgcttacactgcactgcaatttgtggaactgggcgtagatcagttccagtgagggtgtactgtactatgttctcatcatcctattcttttttgatgtaataaattatggaaacaggtattcttaagtatagaaaagagtcactaagtcagtattcgttgaattggctgttttagttgagaatataatgttccagcttagttttatttgatttgttctttcgttaggaactaaacaaaaacaacaaatcctcttaggatgtgtgctgccctttagtataggcaaagtcctaggtactgtgactgtggtagatcactgtagtacttacccaaatgctgtttaacctggttttatttttatgtgcctgtctaagaaatatttttgtgctttctggccttcttttcccaccttaggctttggcactgatagaactctataatgcacccgaggggcgatacaagcaggatgtgtacttgcttcctaagaaaatgggtgagtgaaaaacagtggaaatctatgcagacagctgcatagtttggtaaaatgactgccatgaaaggcattggatttagagtcagagttccaattcctgttcctgtgcttactggttgtttgacctcaggacaagttctaatctctatgatcctcagtttcttgattggtaaaatgaaaataatactacatacattgtagaattgtgtgagaatcacagctaatgagtaacagtgcttaacacaatggtttagggagatgttcttactctaagtagccttatgaagttcagtaaacttcccagtgcagctgagtacatacagccttggaacaaaatgagagaaacaaacacaggttttattgtccattttctgtgaggatatgcaaaccatccaatctcttgtaagcaacccatgctgtgttcatgtgacataatacatcatctctagtcctttgcctttctgcacggtgtacccatctcccatatctccttggctagcccaaatccctgacttcttaatgctaaaatacttcttgctctcctctcctccaatagcttacttcagactttttttttcagtgtataattataaaagggaagcttatctatggaaaagtaaaaattctgtgccgactaccttagaaattcatgatcctaagatccatggatcttatcctaaatgagtgttattgacacagggtctttctagcttactggtgtccactttgattgctaatttgactataatctagttaaggaggttgctgcaggaaggtaggagtagcatgtgacatgtgggccactgcagggaagccccctgctttgccagagaaggatagagaggtaaaagcccactcccttttgttaccctggtaagtggcttttctgaacgcactgtacatgtgctgagagaagcatcctgcccagaaaggcagctttgaggttttttttttaattaagcaaatatttcaagttgtggattctttcagagttattccatcccttgtctgctttcttaaaaaagcttcaaatgaaaatgggaagttataacttgagagacattttgaaaaggagtctgctctcctgccactttgctcttcctagatgaatacgttgccagcttgcatctgccatcatttgatgcccaccttacagagctgacagatgaccaagcaaaatatctgggactcaacaaaaatgggccattcaaacctaattattacagatactaatggaccatactaccaaggaccagtccacctgaaccacacactctaaagaaatattttttaagataacttttattttcttcttactcctttcctcttgatttttttcctataatttcattcttgttttttcatctcattatccaagttctgcagaccacacaggaacttgcttcatggctctttagatgaaatagaagttcagggttcctcactctagtcactaaagaaggattttactctcccagcccagaaaggtgattctttctttaccatttctggggactttagtcttaattaggtaccttattaacaggaaatgctaaggtaccttctctgtggaacaatctgcaatgtctaaatcgccttaaaagagcccatttcttagctgctgaaatcagtgctctttcacttcttcagagaagcagggatggtacctacccggcaggtaggttagatgtgggtggtgcatgttaatttcccttagaagttccaagccctgtttcctgcgtaaaggtggtatgtccagttcagagatgtgtataatgagcatggcttgttaagatcaggaggcccacttggatttatagtatagcccttcctccactcccaccagacttgctcatttttcgagtttttaactagactacactctattgagtttaattttgtcctctaggatttatttctgttgtccaaaaaaaaaaaaaagaaaagaaaaattaaggagaatttttggtgttaatgctgaggaattgcttgagtggttagttgttaccaatttctcttttgaacctttggagctaaggatgctgagtctagagaaatgctagtctcaagccctgttaagtccctctgtttctagcccgtagttcatagcatcagtgaactggagccacaacagcaaattctatcagctgtgtaccatacagcttgtgctgaaggcgaatttcttgagccattactcagtataaagcactgagttctatctttaggatttatctttaagagcaaatttctggtcagctgtgcttctgcaacctaaaatatttaaagggaggtaggtgtgggcaggaggaggaatgataaattgggccagggcaagaaaaatctagcttcatataatttgtctgggactatacaccctatataatgttagttttacagaagtaatatgacttttgattgctacataccacaaagagtttatgaactgagatcataaagggcaactgatgtgtgaagaaagtagtcagtacatcctggctcatgctctgaaagaatatccagagaggctctctcaaagatcagggagatgtattcccatgccatgcaccctgcttcccagcatttctgcatggtcaagtgagctttatgctcatgagctttaagtatataattatccaggattttaaatcctcaacttgttctagcttgtgatccctcaaagttgggtcatacgttagtgctagatactagaaattttcacttttccactgatcagagagacagacattaaaaacaaaaatagaagaaaggaaagctttcaccctgcagcttcttagcagggaacaattgtcttgccaaaacttttttcccttttctctcccattttcttttacccaatcccttcttactccttgccagtgtgaccatgctttcttctctgtagatgttaacagttaaggcctattttcctcgggcacttaaccaaccaatcagaacaccacatctgttaggggaggtaacctggccaacagtgtatccatcacgttagccctgctggagggaagggacccacattcacctgccctctgacctgccccttgatcccatatctattaccgtgtccataggaataataggtaagggctctgtctctgtcaagccatgtaacaaaggacactgttaaaaaaaaaaaaaagtctggcatcagagggagcatgtggagagcaacttgggaagaacaagttcattttgtattgaatgatttttaatgaatgcaatattaatccttgcagatgagcaataatcattaaaatcgattaaaatgataagaccttaaaagaagac

SEQ ID NO: 299905 - DNA, 2529 bp, Homo sapiens
taattcttcagctaaaacagcggaagaggtgatttattatatggttgttacactcggccacaaataaacacagaaatcgatgtgaccagcctccgcactccggagctgacgtgggagcgagtacgttctcaggtggaccatgtcatctggccagatggcaaacgagttgtcctcctggcagagggtcgtctactcaatttgagctgctccacagttcccacctttgttctgtccatcacagccacaacacaggctttggcactgatagaactctataatgcacccgaggggcgatacaagcaggatgtgtacttgcttcctaagaaaatggatgaatacgttgccagcttgcatctgccatcatttgatgcccaccttacagagctgacagatgaccaagcaaaatatctgggactcaacaaaaatgggccattcaaacctaattattacagatactaatggaccatactaccaaggaccagtccacctgaaccacacactctaaagaaatattttttaagataacttttattttcttcttactcctttcctcttgatttttttcctataatttcattcttgttttttcatctcattatccaagttctgcagaccacacaggaacttgcttcatggctctttagatgaaatagaagttcagggttcctcactctagtcactaaagaaggattttactctcccagcccagaaaggtgattctttctttaccatttctggggactttagtcttaattaggtaccttattaacaggaaatgctaaggtaccttctctgtggaacaatctgcaatgtctaaatcgccttaaaagagcccatttcttagctgctgaaatcagtgctctttcacttcttcagagaagcagggatggtacctacccggcaggtaggttagatgtgggtggtgcatgttaatttcccttagaagttccaagccctgtttcctgcgtaaaggtggtatgtccagttcagagatgtgtataatgagcatggcttgttaagatcaggaggcccacttggatttatagtatagcccttcctccactcccaccagacttgctcatttttcgagtttttaactagactacactctattgagtttaattttgtcctctaggatttatttctgttgtccaaaaaaaaaaaaaagaaaagaaaaattaaggagaatttttggtgttaatgctgaggaattgcttgagtggttagttgttaccaatttctcttttgaacctttggagctaaggatgctgagtctagagaaatgctagtctcaagccctgttaagtccctctgtttctagcccgtagttcatagcatcagtgaactggagccacaacagcaaattctatcagctgtgtaccatacagcttgtgctgaaggcgaatttcttgagccattactcagtataaagcactgagttctatctttaggatttatctttaagagcaaatttctggtcagctgtgcttctgcaacctaaaatatttaaagggaggtaggtgtgggcaggaggaggaatgataaattgggccagggcaagaaaaatctagcttcatataatttgtctgggactatacaccctatataatgttagttttacagaagtaatatgacttttgattgctacataccacaaagagtttatgaactgagatcataaagggcaactgatgtgtgaagaaagtagtcagtacatcctggctcatgctctgaaagaatatccagagaggctctctcaaagatcagggagatgtattcccatgccatgcaccctgcttcccagcatttctgcatggtcaagtgagctttatgctcatgagctttaagtatataattatccaggattttaaatcctcaacttgttctagcttgtgatccctcaaagttgggtcatacgttagtgctagatactagaaattttcacttttccactgatcagagagacagacattaaaaacaaaaatagaagaaaggaaagctttcaccctgcagcttcttagcagggaacaattgtcttgccaaaacttttttcccttttctctcccattttcttttacccaatcccttcttactccttgccagtgtgaccatgctttcttctctgtagatgttaacagttaaggcctattttcctcgggcacttaaccaaccaatcagaacaccacatctgttaggggaggtaacctggccaacagtgtatccatcacgttagccctgctggagggaagggacccacattcacctgccctctgacctgccccttgatcccatatctattaccgtgtccataggaataataggtaagggctctgtctctgtcaagccatgtaacaaaggacactgttaaaaaaaaaaaaaagtctggcatcagagggagcatgtggagagcaacttgggaagaacaagttcattttgtattgaatgatttttaatgaatgcaatattaatccttgcagatgagcaataatcattaaaatcgattaaaatgataagaccttaaaagaagac

SEQ ID NO: 299906 - DNA, 2594 bp, Homo sapiens
taagcgggctttgcgtgcgtgtttgcgtacagcggaggtggcggcgcgggcaggtcggagctcggagctgctgcttctggttctcttgtggccgccgtcgctgtccggctgccttgggctgccgaacagacaaggcgtgggccacagcacctcagaagccgacgcagctcgacgcaggggccggcaggagggtgggcgatcgcgtgtcggagggcgccgcgcgggcaggcgggcgggcgccagagggggaaagaggcgggggcggcgggtcagccgctggccgggccggccggggaatgtcgatgcctgacgcgatgccgctgcccggggtcggggaggagctgaagcaggccaaggagatcgaggacgccgagaagtactccttcatggccaccgtcaccaaggcgcccaagaagcaaatccagtttgctgatgacatgcaggagttcaccaaattccccaccaaaactggccgaagatctttgtctcgctcgatctcacagtcctccactgacagctacagttcagctgcatcctacacagatagctctgatgatgaggtttctccccgagagaagcagcaaaccaactccaagggcagcagcaatttctgtgtgaagaacatcaagcaggcagaatttggacgccgggagattgagattgcagagcaagacatgtctgctctgatttcactcaggaaacgtgctcagggggagaagcccttggctggtgctaaaatagtgggctgtacacacatcacagcccagacagcggtgttgattgagacactctgtgccctgggggctcagtgccgctggtctgcttgtaacatctactcaactcagaatgaagtagctgcagcactggctgaggctggagttgcagtgttcgcttggaagggcgagtcagaagatgacttctggtggtgtattgaccgctgtgtgaacatggatgggtggcaggccaacatgatcctggatgatgggggagacttaacccactgggtttataagaagtatccaaacgtgtttaagaagatccgaggcattgtggaagagagcgtgactggtgttcacaggctgtatcagctctccaaagctgggaagctctgtgttccggccatgaacgtcaatgattctgttaccaaacagaagtttgataacttgtactgctgccgagaatccattttggatggcctgaagaggaccacagatgtgatgtttggtgggaaacaagtggtggtgtgtggctatggtgaggtaggcaagggctgctgtgctgctctcaaagctcttggagcaattgtctacattaccgaaatcgaccccatctgtgctctgcaggcctgcatggatgggttcagggtggtaaagctaaatgaagtcatccggcaagtcgatgtcgtaataacttgcacaggaaataagaatgtagtgacacgggagcacttggatcgcatgaaaaacagttgtatcgtatgcaatatgggccactccaacacagaaatcgatgtgaccagcctccgcactccggagctgacgtgggagcgagtacgttctcaggtggaccatgtcatctggccagatggcaaacgagttgtcctcctggcagagggtcgtctactcaatttgagctgctccacagttcccacctttgttctgtccatcacagccacaacacaggctttggcactgatagaactctataatgcacccgaggggcgatacaagcaggatgtgtacttgcttcctaagaaaatggatgaatacgttgccagcttgcatctgccatcatttgatgcccaccttacagagctgacagatgaccaagcaaaatatctgggactcaacaaaaatgggccattcaaacctaattattacagatactaatggaccatactaccaaggaccagtccacctgaaccacacactctaaagaaatattttttaagataacttttattttcttcttactcctttcctcttgatttttttcctataatttcattcttgttttttcatctcattatccaagttctgcagaccacacaggaacttgcttcatggctctttagatgaaatagaagttcagggttcctcactctagtcactaaagaaggattttactctcccagcccagaaaggtgattctttctttaccatttctggggactttagtcttaattaggtaccttattaacaggaaatgctaaggtaccttctctgtggaacaatctgcaatgtctaaatcgccttaaaagagcccatttcttagctgctgaaatcagtgctctttcacttcttcagagaagcagggatggtacctacccggcaggtaggttagatgtgggtggtgcatgttaatttcccttagaagttccaagccctgtttcctgcgtaaaggtggtatgtccagttcagagatgtgtataatgagcatggcttgttaagatcaggaggcccacttggatttatagtatagcccttcctccactcccaccagacttgctcatttttcgagtttttaactagtaacatatcaacttcataattatacaacctaatgggtgtcgcttcctaggtttagttgctgtt

SEQ ID NO: 299907 - DNA, 2473 bp, Homo sapiens
taagcgggctttgcgtgcgtgtttgcgtacagcggaggtggcggcgcgggcaggtcggagctcggagctgctgcttctggttctcttgtggccgccgtcgctgtccggctgccttgggctgccgaacagacaaggcgtgggccacagcacctcagaagccgacgcagctcgacgcaggggccggcaggagggtgggcgatcgcgtgtcggagggcgccgcgcgggcaggcgggcgggcgccagagggggaaagaggcgggggcggcgggtcagccgctggccgggccggccggggaatgtcgatgcctgacgcgatgccgctgcccggggtcggggaggagctgaagcaggccaaggagatcgaggacgccgagaagtactccttcatggccaccgtcaccaaggcgcccaagaagcaaatccagtttgctgatgacatgcaggagttcaccaaattccccaccaaaactggccgaagatctttgtctcgctcgatctcacagtcctccactgacagctacagttcagctgcatcctacacagatagctctgatgatgaggtttctccccgagagaagcagcaaaccaactccaagggcagcagcaatttctgtgtgaagaacatcaagcaggcagaatttggacgccgggagattgagattgcagagcaagacatgtctgctctgatttcactcaggaaacgtgctcagggggagaagcccttggctggtgctaaaatagtgggctgtacacacatcacagcccagacagcggtgttgattgagacactctgtgccctgggggctcagtgccgctggtctgcttgtaacatctactcaactcagaatgaagtagctgcagcactggctgaggctggagttgcagtgttcgcttggaagggcgagtcagaagatgacttctggtggtgtattgaccatgtgtataatgagcatggcttgttaagatcaggaggcccacttggatttatagtatagcccttcctccactcccaccagacttgctcatttttcgagtttttaactagactacactctattgagtttaattttgtcctctaggatttatttctgttgtccaaaaaaaaaaaaaagaaaagaaaaattaaggagaatttttggtgttaatgctgaggaattgcttgagtggttagttgttaccaatttctcttttgaacctttggagctaaggatgctgagtctagagaaatgctagtctcaagccctgttaagtccctctgtttctagcccgtagttcatagcatcagtgaactggagccacaacagcaaattctatcagctgtgtaccatacagcttgtgctgaaggcgaatttcttgagccattactcagtataaagcactgagttctatctttaggatttatctttaagagcaaatttctggtcagctgtgcttctgcaacctaaaatatttaaagggaggtaggtgtgggcaggaggaggaatgataaattgggccagggcaagaaaaatctagcttcatataatttgtctgggactatacaccctatataatgttagttttacagaagtaatatgacttttgattgctacataccacaaagagtttatgaactgagatcataaagggcaactgatgtgtgaagaaagtagtcagtacatcctggctcatgctctgaaagaatatccagagaggctctctcaaagatcagggagatgtattcccatgccatgcaccctgcttcccagcatttctgcatggtcaagtgagctttatgctcatgagctttaagtatataattatccaggattttaaatcctcaacttgttctagcttgtgatccctcaaagttgggtcatacgttagtgctagatactagaaattttcacttttccactgatcagagagacagacattaaaaacaaaaatagaagaaaggaaagctttcaccctgcagcttcttagcagggaacaattgtcttgccaaaacttttttcccttttctctcccattttcttttacccaatcccttcttactccttgccagtgtgaccatgctttcttctctgtagatgttaacagttaaggcctattttcctcgggcacttaaccaaccaatcagaacaccacatctgttaggggaggtaacctggccaacagtgtatccatcacgttagccctgctggagggaagggacccacattcacctgccctctgacctgccccttgatcccatatctattaccgtgtccataggaataataggtaagggctctgtctctgtcaagccatgtaacaaaggacactgttaaaaaaaaaaaaaagtctggcatcagagggagcatgtggagagcaacttgggaagaacaagttcattttgtattgaatgatttttaatgaatgcaatattaatccttgcagatgagcaataatcattaaaatcgattaaaatgataagaccttaaaagaagac

SEQ ID NO: 299908 - DNA, 3386 bp, Homo sapiens
taagcgggctttgcgtgcgtgtttgcgtacagcggaggtggcggcgcgggcaggtcggagctcggagctgctgcttctggttctcttgtggccgccgtcgctgtccggctgccttgggctgccgaacagacaaggcgtgggccacagcacctcagaagccgacgcagctcgacgcaggggccggcaggagggtgggcgatcgcgtgtcggagggcgccgcgcgggcaggcgggcgggcgccagagggggaaagaggcgggggcggcgggtcagccgctggccgggccggccggggaatgtcgatgcctgacgcgatgccgctgcccggggtcggggaggagctgaagcaggccaaggagatcgaggacgccgagaagtactccttcatggccaccgtcaccaaggcgcccaagaagcaaatccagtttgctgatgacatgcaggagttcaccaaattccccaccaaaactggccgaagatctttgtctcgctcgatctcacagtcctccactgacagctacagttcagctgcatcctacacagatagctctgatgatgaggtttctccccgagagaagcagcaaaccaactccaagggcagcagcaatttctgtgtgaagaacatcaagcaggcagaatttggacgccgggagattgagattgcagagcaagacatgtctgctctgatttcactcaggaaacgtgctcagggggagaagcccttggctggtgctaaaatagtgggctgtacacacatcacagcccagacagcggtgttgattgagacactctgtgccctgggggctcagtgccgctggtctgcttgtaacatctactcaactcagaatgaagtagctgcagcactggctgaggctggagttgcagtgttcgcttggaagggcgagtcagaagatgacttctggtggtgtattgaccgctgtgtgaacatggatgggtggcaggccaacatgatcctggatgatgggggagacttaacccactgggtttataagaagtatccaaacgtgtttaagaagatccgaggcattgtggaagagagcgtgactggtgttcacaggctgtatcagctctccaaagctgggaagctctgtgttccggccatgaacgtcaatgattctgttaccaaacagaagtttgataacttgtactgctgccgagaatccattttggatggcctgaagaggaccacagatgtgatgtttggtgggaaacaagtggtggtgtgtggctatggtgaggtaggcaagggctgctgtgctgctctcaaagctcttggagcaattgtctacattaccgaaatcgaccccatctgtgctctgcaggcctgcatggatgggttcagggtggtaaagctaaatgaagtcatccggcaagtcgatgtcgtaataacttgcacaggaaataagaatgtagtgacacgggagcacttggatcgcatgaaaaacagttgtatcgtatgcaatatgggccactccaacacagaaatcgatgtgaccagcctccgcactccggagctgacgtgggagcgagtacgttctcaggtggaccatgtcatctggccagatggcaaacgagttgtcctcctggcagagggtcgtctactcaatttgagctgctccacagttcccacctttgttctgtccatcacagccacaacacaggctttggcactgatagaactctataatgcacccgaggggcgatacaagcaggatgtgtacttgcttcctaagaaaatgggtgagtgaaaaacagtggaaatctatgcagacagctgcatagtttggtaaaatgactgccatgaaaggcattggatttagagtcagagttccaattcctgttcctgtgcttactggttgtttgacctcaggacaagttctaatctctatgatcctcagtttcttgattggtaaaatgaaaataatactacatacattgtagaattgtgtgagaatcacagctaatgagtaacagtgcttaacacaatggtttagggagatgttcttactctaagtagccttatgaagttcagtaaacttcccagtgcagctgagtacatacagccttggaacaaaatgagagaaacaaacacaggttttattgtccattttctgtgaggatatgcaaaccatccaatctcttgtaagcaacccatgctgtgttcatgtgacataatacatcatctctagtcctttgcctttctgcacggtgtacccatctcccatatctccttggctagcccaaatccctgacttcttaatgctaaaatacttcttgctctcctctcctccaatagcttacttcagactttttttttcagtgtataattataaaagggaagcttatctatggaaaagtaaaaattctgtgccgactaccttagaaattcatgatcctaagatccatggatcttatcctaaatgagtgttattgacacagggtctttctagcttactggtgtccactttgattgctaatttgactataatctagttaaggaggttgctgcaggaaggtaggagtagcatgtgacatgtgggccactgcagggaagccccctgctttgccagagaaggatagagaggtaaaagcccactcccttttgttaccctggtaagtggcttttctgaacgcactgtacatgtgctgagagaagcatcctgcccagaaaggcagctttgaggttttttttttaattaagcaaatatttcaagttgtggattctttcagagttattccatcccttgtctgctttcttaaaaaagcttcaaatgaaaatgggaagttataacttgagagacattttgaaaaggagtctgctctcctgccactttgctcttcctagatgaatacgttgccagcttgcatctgccatcatttgatgcccaccttacagagctgacagatgaccaagcaaaatatctgggactcaacaaaaatgggccattcaaacctaattattacaggtaacctggggagaagcaagtgaaaagctctttttcccagtattaaaccaagcaggctagcctgcttctgacataaagatcaaatgttgtacctgattttgaagaatacaagaaatctgttccaggccaggcacggtggctcacgcctgtaatcccagcactttgagaggcctaggcggatggatcacttgaggtcaggagttcaagaccagcctggccaacatggcgaaaccctatctcttagccgggtgtggtggcgggcacctgtcatcccagttactcaggtggctgaggcacgagaatcacttgaacctgggaggcggaggttgcagtgagctgggatcatgccactgcactccagcctgggtgatggagtgagactctgtcttaaaaacaaac

SEQ ID NO: 299909 - DNA, 1542 bp, Homo sapiens
taagcgggctttgcgtgcgtgtttgcgtacagcggaggtggcggcgcgggcaggtcggagctcggagctgctgcttctggttctcttgtggccgccgtcgctgtccggctgccttgggctgccgaacagacaaggcgtgggccacagcacctcagaagccgacgcagctcgacgcaggggccggcaggagggtgggcgatcgcgtgtcggagggcgccgcgcgggcaggcgggcgggcgccagagggggaaagaggcgggggcggcgggtcagccgctggccgggccggccggggaatgtcgatgcctgacgcgatgccgctgcccggggtcggggaggagctgaagcaggccaaggagatcgaggacgccgagaagtactccttcatggccaccgtcaccaaggcgcccaagaagcaaatccagtttgctgatgacatgcaggagttcaccaaattccccaccaaaactggccgaagatctttgtctcgctcgatctcacagtcctccactgacagctacagttcagctgcatcctacacagatagctctgatgatgaggtttctccccgagagaagcagcaaaccaactccaagggcagcagcaatttctgtgtgaagaacatcaagcaggcagaatttggacgccgggagattgagattgcagagcaagacatgtctgctctgatttcactcaggaaacgtgctcagggggagaagcccttggctggtgctaaaatagtgggctgtacacacatcacagcccagacagcggtgttgattgagacactctgtgccctgggggctcagtgccgctggtctgcttgtaacatctactcaactcagaatgaagtagctgcagcactggctgaggctggagttgcagtgttcgcttggaagggcgagtcagaagatgacttctggtggtgtattgaccgctgtgtgaacatggatgggtggcaggccaacatgatcctggatgatgggggagacttaacccactgggtttataagaagtatccaaacgtgtttaagaagatccgaggcattgtggaagagagcgtgactggtgttcacaggctgtatcagctctccaaagctgggaagctctgtgttccggccatgaacgtcaatgattctgttaccaaacagaagtttgataacttgtactgctgccgagaatccattttggatggcctgaagaggaccacagatgtgatgtttggtgggaaacaagtggtggtgtgtggctatggtgaggtaggcaagggctgctgtgctgctctcaaagctcttggagcaattgtctacattaccgaaatcgaccccatctgtgctctgcaggcctgcatggatgggttcagggtggtaaagctaaatgaagtcatccggcaagtcgatgtcgtaataacttgcacaggaaataagaatgtagtgacacgggagcacttggatcgcatgaaaaacagttgtatcgtatgcaatatgggccactccaacacagaaatcgatgtggtaaggcttctctcatttgttgctaggc

SEQ ID NO: 299910 - DNA, 1331 bp, Homo sapiens
taagcgggctttgcgtgcgtgtttgcgtacagcggaggtggcggcgcgggcaggtcggagctcggagctgctgcttctggttctcttgtggccgccgtcgctgtccggctgccttgggctgccgaacagacaaggcgtgggccacagcacctcagaagccgacgcagctcgacgcaggggccggcaggagggtgggcgatcgcgtgtcggagggcgccgcgcgggcaggcgggcgggcgccagagggggaaagaggcgggggcggcgggtcagccgctggccgggccggccggggaatgtcgatgcctgacgcgatgccgctgcccggggtcggggaggagctgaagcaggccaaggagatcgaggacgccgagaagtactccttcatggccaccgtcaccaaggcgcccaagaagcaaatccagtttgctgatgacatgcaggagttcaccaaattccccaccaaaactggccgaagatctttgtctcgctcgatctcacagtcctccactgacagctacagttcagctgcatcctacacagatagctctgatgatgaggtttctccccgagagaagcagcaaaccaactccaagggcagcagcaatttctgtgtgaagaacatcaagcaggcagaatttggacgccgggagattgagattgcagagcaagacatgtctgctctgatttcactcaggaaacgtgctcagggggagaagcccttggctggtgctaaaatagtgggctgtacacacatcacagcccagacagcggtgttgattgagacactctgtgccctgggggctcagtgccgctggtctgcttgtaacatctactcaactcagaatgaagtagctgcagcactggctgaggctggagttgcagtgttcgcttggaagggcgagtcagaagatgacttctggtggtgtattgaccgctgtgtgaacatggatgggtggcaggccaacatgatcctggatgatgggggagacttaacccactgggtttataagaagtatccaaacgtgtttaagaagatccgaggcattgtggaagagagcgtgactggtgttcacaggctgtatcagctctccaaagctgggaagctctgtgttccggccatgaacgtcaatgattctgttaccaaacagaagtttgataacttgtactgctgccgagaatccattttggatggcctgaagaggaccacagatgtgatgtttggtgggaaacaagtggtggtgtgtggctatggtgaggtaaatagctgggtctcagtgtctctttctttttgtgtacttattagaaatattgggtaaaggaggcttgtg

SEQ ID NO: 299911 - DNA, 1740 bp, Homo sapiens
gtatttacaagccagaattgtgcaactcttctggatcattaataaagtagcaagatcctcaaaaaacccaaaaacaccattctctaatagtcatgacaaatggcttcagtagggcttgttttttattttccagaaggctttttctcttattttttgaagccccagtctttgattttacaggtaactttcaaaacatcatgatgctgccaaatgtacttttgtaaacttaaacattatgattccggttggatttatagtatagcccttcctccactcccaccagacttgctcatttttcgagtttttaactagactacactctattgagtttaattttgtcctctaggatttatttctgttgtccaaaaaaaaaaaaaagaaaagaaaaattaaggagaatttttggtgttaatgctgaggaattgcttgagtggttagttgttaccaatttctcttttgaacctttggagctaaggatgctgagtctagagaaatgctagtctcaagccctgttaagtccctctgtttctagcccgtagttcatagcatcagtgaactggagccacaacagcaaattctatcagctgtgtaccatacagcttgtgctgaaggcgaatttcttgagccattactcagtataaagcactgagttctatctttaggatttatctttaagagcaaatttctggtcagctgtgcttctgcaacctaaaatatttaaagggaggtaggtgtgggcaggaggaggaatgataaattgggccagggcaagaaaaatctagcttcatataatttgtctgggactatacaccctatataatgttagttttacagaagtaatatgacttttgattgctacataccacaaagagtttatgaactgagatcataaagggcaactgatgtgtgaagaaagtagtcagtacatcctggctcatgctctgaaagaatatccagagaggctctctcaaagatcagggagatgtattcccatgccatgcaccctgcttcccagcatttctgcatggtcaagtgagctttatgctcatgagctttaagtatataattatccaggattttaaatcctcaacttgttctagcttgtgatccctcaaagttgggtcatacgttagtgctagatactagaaattttcacttttccactgatcagagagacagacattaaaaacaaaaatagaagaaaggaaagctttcaccctgcagcttcttagcagggaacaattgtcttgccaaaacttttttcccttttctctcccattttcttttacccaatcccttcttactccttgccagtgtgaccatgctttcttctctgtagatgttaacagttaaggcctattttcctcgggcacttaaccaaccaatcagaacaccacatctgttaggggaggtaacctggccaacagtgtatccatcacgttagccctgctggagggaagggacccacattcacctgccctctgacctgccccttgatcccatatctattaccgtgtccataggaataataggtaagggctctgtctctgtcaagccatgtaacaaaggacactgttaaaaaaaaaaaaaagtctggcatcagagggagcatgtggagagcaacttgggaagaacaagttcattttgtattgaatgatttttaatgaatgcaatattaatccttgcagatgagcaataatcattaaaatcgattaaaatgataagaccttaaaagaagac

SEQ ID NO: 299912 - DNA, 1050 bp, Homo sapiens
  misc_feature (9)..(9): n is a, c, g, or t
ggtccaacngccagcagtcatggtcagaggtcatgaggtaggtgtgggcaggaggaggaatgataaattgggccagggcaagaaaaatctagcttcatataatttgtctgggactatacaccctatataatgttagttttacagaagtaatatgacttttgattgctacataccacaaagagtttatgaactgagatcataaagggcaactgatgtgtgaagaaagtagtcagtacatcctggctcatgctctgaaagaatatccagagaggctctctcaaagatcagggagatgtattcccatgccatgcaccctgcttcccagcatttctgcatggtcaagtgagctttatgctcatgagctttaagtatataattatccaggattttaaatcctcaacttgttctagcttgtgatccctcaaagttgggtcatacgttagtgctagatactagaaattttcacttttccactgatcagagagacagacattaaaaacaaaaatagaagaaaggaaagctttcaccctgcagcttcttagcagggaacaattgtcttgccaaaacttttttcccttttctctcccattttcttttacccaatcccttcttactccttgccagtgtgaccatgctttcttctctgtagatgttaacagttaaggcctattttcctcgggcacttaaccaaccaatcagaacaccacatctgttaggggaggtaacctggccaacagtgtatccatcacgttagccctgctggagggaagggacccacattcacctgccctctgacctgccccttgatcccatatctattaccgtgtccataggaataataggtaagggctctgtctctgtcaagccatgtaacaaaggacactgttaaaaaaaaaaaaaagtctggcatcagagggagcatgtggagagcaacttgggaagaacaagttcattttgtattgaatgatttttaatgaatgcaatattaatccttgcagatgagcaataatcattaaaatcgattaaaatgataagaccttaaaagaagac

SEQ ID NO: 299913 - DNA, 879 bp, Homo sapiens
tcatgtaatgtaagaagaatctacaagcattaaaaaagatatgttaaggaaaaagtagtcagtacatcctggctcatgctctgaaagaatatccagagaggctctctcaaagatcagggagatgtattcccatgccatgcaccctgcttcccagcatttctgcatggtcaagtgagctttatgctcatgagctttaagtatataattatccaggattttaaatcctcaacttgttctagcttgtgatccctcaaagttgggtcatacgttagtgctagatactagaaattttcacttttccactgatcagagagacagacattaaaaacaaaaatagaagaaaggaaagctttcaccctgcagcttcttagcagggaacaattgtcttgccaaaacttttttcccttttctctcccattttcttttacccaatcccttcttactccttgccagtgtgaccatgctttcttctctgtagatgttaacagttaaggcctattttcctcgggcacttaaccaaccaatcagaacaccacatctgttaggggaggtaacctggccaacagtgtatccatcacgttagccctgctggagggaagggacccacattcacctgccctctgacctgccccttgatcccatatctattaccgtgtccataggaataataggtaagggctctgtctctgtcaagccatgtaacaaaggacactgttaaaaaaaaaaaaaagtctggcatcagagggagcatgtggagagcaacttgggaagaacaagttcattttgtattgaatgatttttaatgaatgcaatattaatccttgcagatgagcaataatcattaaaatcgattaaaatgataagaccttaaaagaagac

SEQ ID NO: 299914 - DNA, 844 bp, Homo sapiens
cacaggtgttgaggcaaagcacttaaagtcatataaatctaggcattcaggatcttggtgtccaccctactagtattagcttctaaatactactcccttctaaaagaaaggctcctgagagaaatggttgattccaggtttggagaagaggaagaacaagcaaatccagtttgctgatgacatgcaggagttcaccaaattccccaccaaaactggccgaagatctttgtctcgctcgatctcacagtcctccactgacagctacagttcagctgcatcctacacagatagctctgatgatgaggtttctccccgagagaagcagcaaaccaactccaagggcagcagcaatttctgtgtgaagaacatcaagcaggcagaatttggacgccgggagattgagattgcagagcaagacatgtctgctctgatttcactcaggaaacgtgctcagggggagaagcccttggctggtgctaaaatagtgggctgtacacacatcacagcccagacagcggtgttgattgagacactctgtgccctgggggctcagtgccgctggtctgcttgtaacatctactcaactcagaatgaagtagctgcagcactggctgaggctggagttgcagtgttcgcttggaagggcgagtcagaagatgacttctggtggtgtattgaccgctgtgtgaacatggatgggtggcaggccaacatgatcctggatgatgggggagacttaacccactgggtttataagaagtatccaaacgtgtttaagaagatccgaggcattgtggaagtcctcgacttggtggttacagggctgtattcgctcttcccgctg

SEQ ID NO: 299915 - DNA, 360 bp, Homo sapiens
aaaaggccccttgttacagggctgacagagcagagccttacctattattcctatgacacggtaatagatatgggatcaagggacccacattcacctgccctctgacctgccccttgatcccatatctattaccgtgtccataggaataataggtaagggctctgtctctgtcaagccatgtaacaaaggacactgttaaaaaaaaaaaaaagtctggcatcagagggagcatgtggagagcaacttgggaagaacaagttcattttgtattgaatgatttttaatgaatgcaatattaatccttgcagatgagcaataatcattaaaatcgattaaaatgataagaccttaaaagaagac

SEQ ID NO: 299916 - DNA, 564 bp, Homo sapiens
gataatactattagattcactctaggtgctttatgttattgagagttcataattgagtatattaatcatttttgcagaaatcacctaggggaagagaaggctaggactgctctgttcttctcactctaaccctagggctctctgagagcctcttggcatttttccttcctagagggagtcttggggactctgaagaggccagtgtatatagtttagcagagcttatcactcaccattcctgtgaggtggcactggatccaactagaaggggatcttgtctcatttcatgaccatcttccctcccactgccttcttgctttactcatagtgttcctttcttttcttccagcatggatgggttcagggtggtaaagctaaatgaagtcatccggcaagtcgatgtcgtaataacttgcacaggtaaataacttgcatagagaagtgtttattcagaggctaaatcttgaaagtagtctgagtgactttcatacaaaggaggtgagacctctgttcagtataaaggtctcagaactagaataagctatcagaaccttaacatgtttt

SEQ ID NO: 299917 - DNA, 2602 bp, Homo sapiens
cccctcccccggccgctggctcgctcggctcgcgacgctgcagaggctccgaggcggcggcggcgactccctctttccctccctcctcctccgtccgcccgtccgtccgcgcgtctgtccgttcggcccggtccggcccgaagcatggccggcgtcagcttcagcggccaccgcctggagctgctggcggcttacgaggaggtgatccgagaggagagcgcggccgactgggctctgtacacatatgaagatggctccgatgacctcaagcttgcagcatcaggagaagggggcttgcaggagctttcgggacactttgagaaccagaaggtgatgtacggcttctgcagtgtcaaggactcccaagctgctctgccaaaatacgtgctcatcaactgggtgggcgaagatgtgcctgatgcccgcaagtgcgcttgtgccagccacgtggctaaggtggcagagttcttccagggtgtcgacgtgatcgtgaacgccagcagcgtggaagacatagacgcgggtgccatcgggcagcggctctctaacgggctggcgcgactctccagccctgtgctgcaccgactgcggctgcgagaggatgagaacgcagagcccgtgggcaccacctaccagaagacggatgcagctgtggaaatgaagcggattaaccgagagcagttctgggagcaggccaagaaggaagaagagctgcggaaggaggaggagcggaagaaggccctggatgagaggctcaggttcgagcaggagcggatggagcaggagcggcaggagcaagaggagcgcgagcggcgctaccgggagcgggagcagcagatcgaggagcacaggaggaaacagcagactttagaagcggaagaggccaagaggcggttgaaggagcagtctatctttggtgaccatcgggatgaggaggaagagacccacatgaagaagtcagagtcggaggtggaggaggcagcagctattattgcccagcggcctgacaacccaagggagttcttcaagcagcaggaaagagtcgcatcggcctctgcgggcagctgtgatgtaccctcgcccttcaaccatcgaccaggcagccacctggacagccaccggaggatggcgcccactcccatccccacgcggagcccgtctgactccagcaccgcctccacccctgtcgctgagcagatagagcgggccctggatgaggtcacctcctcgcagcctccaccactgccaccgccacccccaccagcccaagagacccaggagcccagccccatcctagacagtgaggagaccagagcagcagcccctcaggcctgggccggccccatggaggagccccctcaggcacaggcgcctccccgggggccaggcagccctgcagaggacttgatgttcatggagtctgcagagcaggctgtcctggctgctcccgtggagcctgccacagctgacgccacggaggtccacgatgcagctgacaccattgaaactgacactgccactgctgacaccactgttgccaacaacgtaccccccgccgccaccagcctcattgacctatggcctggcaacggggaaggggcctccacactccagggtgagcccagggcccccacgccaccctcgggtactgaggtcaccctggcagaggtgcccctgctggatgaggtggctccggagccactgctgccagcaggcgaaggctgtgccacccttctcaactttgatgagctgcctgagccgccagccaccttctgtgacccagaggaagtggaaggggagcccctggctgccccccagaccccaactctgccctcagcccttgaggagctggagcaagagcaggagccggagccccacctgctaaccaatggcgagaccacccagaaggaggggacccaggccagtgaggggtacttcagtcaatcacaggaggaggagtttgcccaatcggaagagctctgtgccaaggctccgcctcctgtgttctacaacaagcctccagagatcgacatcacatgctgggatgcagacccagttccagaagaggaggagggcttcgagggtggtgattagcggtggcgccagccctaggctacccttgccaaggccgcccacctgcatcagcctctggccagacggcccgccgtgcctgcattcgcagcagctccgcctggcacccactccggattccggccctggctggggacttggccgcttccctacccacagggcctgacttttacagcttttctctttttttaaaaagttgataggagacttgtacagttgactggctttcctctcgttggtagttgagacgctgttgcaaattccacccctccttccctggtccagattgtagctcttagtcctccctgctcagctggccgggttggaggcctcaccctgcttggggcctggcgtggggggagctctggtgggaaaatgtcccccacctcttttcctagttttatgtttcttgggaaaatatcactttgtattctctgtccagggcttcagatattttgcacgaattttaaaacatggcaataaatggctcgtgggctctggctccctggga

SEQ ID NO: 299918 - DNA, 873 bp, Homo sapiens
  misc_feature (713)..(713): n is a, c, g, or t
  misc_feature (746)..(746): n is a, c, g, or t
  misc_feature (750)..(750): n is a, c, g, or t
  misc_feature (785)..(785): n is a, c, g, or t
  misc_feature (797)..(797): n is a, c, g, or t
  misc_feature (821)..(821): n is a, c, g, or t
  misc_feature (856)..(856): n is a, c, g, or t
  misc_feature (873)..(873): n is a, c, g, or t
cccctcccccggccgctggctcgctcggctcgcgacgctgcagaggctccgaggcggcggcggcgactccctctttccctccctcctcctccgtccgcccgtccgtccgcgcgtctgtccgttcggcccggtccggcccgaagcatggccggcgtcagcttcagcggccaccgcctggagctgctggcggcttacgaggaggtgatccgagaggagagcgcggccgactgggctctgtacacatatgaagatggctccgatgacctcaagcttgcagcatcaggagaagggggcttgcaggagctttcgggacactttgagaaccagaaggtgatgtacggcttctgcagtgtcaaggactcccaagctgctctgccaaaatacgtgctcatcaactgggtgggcgaagatgtgcctgatgcccgcaagtgcgcttgtgccagccacgtggctaaggtggcagagttcttccagggtgtcgacgtgatcgtgaacgccagcagcgtggaagacatagacgcgggtgccatcgggcagcggctctctaacgggctggcgcgactctccagccctgtgctgcaccgactgcggctgcgagaggatgagaacgcagagcccgtgggcaccacctaccagaagacggatgcagctgtggaaatgaagcggattaaccgagagcagttctgggagcaggccaagagaaggaagaaganctgcggaaaggaagaaggaaccggaaaaaaggncctnggaattaaaaggctcaaggtttcgaagcaaggaanccggattggaancaaggaaccggcaaggagcaaagnaaggaagccccgaagcgggggcctaaccggggaancggggaagcaaccaagn

SEQ ID NO: 299919 - DNA, 249 bp, Homo sapiens
  misc_feature (15)..(15): n is a, c, g, or t
  misc_feature (20)..(20): n is a, c, g, or t
  misc_feature (170)..(171): n is a, c, g, or t
aggaacggcggcaanaggancagtctatctttggtgaccatcgggatgaggaggaagagacccacatgaagaagtcagagtcggaggtggaggaggcagcagctattattgcccagcggcctgacaacccaagggagttcttcaagcagcaggaaagagtcgcaattcgnnatcagccaccacgtgttttcttgctgaatggccgtttctggaggtggcctggccgtcccgttttcctgagcccctcgg

SEQ ID NO: 299920 - DNA, 2909 bp, Homo sapiens
cccctcccccggccgctggctcgctcggctcgcgacgctgcagaggctccgaggcggcggcggcgactccctctttccctccctcctcctccgtccgcccgtccgtccgcgcgtctgtccgttcggcccggtccggcccgaagcatggccggcgtcagcttcagcggccaccgcctggagctgctggcggcttacgaggaggtgatccgagaggagagcgcggccgactgggctctgtacacatatgaagatggctccgatgacctcaagcttgcagcatcaggagaagggggcttgcaggagctttcgggacactttgagaaccagaaggtgatgtacggcttctgcagtgtcaaggactcccaagctgctctgccaaaatacgtgctcatcaactgggtgggcgaagatgtgcctgatgcccgcaagtgcgcttgtgccagccacgtggctaaggtggcagagttcttccagggtgtcgacgtgatcgtgaacgccagcagcgtggaagacatagacgcgggtgccatcgggcagcggctctctaacgggctggcgcgactctccagccctgtgctgcaccgactgcggctgcgagaggatgagaacgcagagcccgtgggcaccacctaccagaagacggatgcagctgtggaaatgaagcggattaaccgagagcagttctgggagcaggccaagaaggaagaagagctgcggaaggaggaggagcggaagaaggccctggatgagaggctcaggttcgagcaggagcggatggagcaggagcggcaggagcaagaggagcgcgagcggcgctaccgggagcgggagcagcagatcgaggagcacaggaggaaacagcagactttagaagcggaagaggccaagaggcggttgaaggagcagtctatctttggtgaccatcgggatgaggaggaagagacccacatgaagaagtcagagtcggaggtggaggaggcagcagctattattgcccagcggcctgacaacccaagggagttcttcaagcagcaggaaagagtcgcatcggcctctgcgggcagctgtgatgtaccctcgcccttcaaccatcgaccaggcagccacctggacagccaccggaggatggcgcccactcccatccccacgcggagcccgtctgactccagcaccgcctccacccctgtcgctgagcagatagagcgggccctggatgaggtcacctcctcgcagcctccaccactgccaccgccacccccaccagcccaagagacccaggagcccagccccatcctagacagtgaggagaccagagcagcagcccctcaggcctgggccggccccatggaggagccccctcaggcacaggcgcctccccgggggccaggcagccctgcagaggacttgatgttcatggagtctgcagagcaggctgtcctggctgctcccgtggagcctgccacagctgacgccacggaggtccacgatgcagctgacaccattgaaactgacactgccactgctgacaccactgttgccaacaacgtaccccccgccgccaccagcctcattgacctatggcctggcaacggggaaggggcctccacactccagggtgagcccagggcccccacgccaccctcgggtactgaggtcaccctggcagaggtgcccctgctggatgaggtggctccggagccactgctgccagcaggcgaaggctgtgccacccttctcaactttgatgagctgcctgagccgccagccaccttctgtgacccagaggaagtggaaggggagcccctggctgccccccagaccccaactctgccctcagcccttgaggagctggagcaagagcaggagccggagccccacctgctaaccaatggcgagaccacccagaaggaggggacccaggccagtgaggggtacttcagtcaatcacaggaggaggagtttgcccaatcggaagagctctgtgccaaggctccgcctcctgtgttctacaacaagcctccagagatcgacatcacatgctgggatgcagacccagttccagaagaggaggagggcttcgagggtggtgattagcggtggcgccagccctaggctacccttgccaaggccgcccacctgcatcagcctctggccagacggcccgccgtgcctgcattcgcagcagctccgcctggcacccactccggattccggccctggctggggacttggccgcttccctacccacagggcctgacttttacagcttttctctttttttaaaaagttgataggagacttgtacagttgactggctttcctctcgttggtagttgagacgctgttgcaaattccacccctccttccctggtccagattgtagctcttagtcctccctgctcagctggccgggttggaggcctcaccctgcttggggcctggcgtggggggagctctggtgggaaaatgtcccccacctcttttcctagttttatgtttcttgggaaaatatcactttgtattctctgtccagggcttcagatattttgcacgaattttaaaacatggcaataaatggctcgtgggctctggctccctgggaccccctccccgcccttcttttgaccccttcctgtctggcccaaaggaagtagcaggcccagctggggcccctcggctaccccccgtctcctgccgggcaggtcccaggttggaggccctaggcgcggttcaggtcagggctatggatggggcccaggggctttggtggcccctccccaactccttcctctttgcttgggttcctttttcacgtttagtaactgttttttttttttttttttttttggaaagcacaaacttctgtaacgggtcgtgctcatgtctgttaataaagaaatccagatccc

SEQ ID NO: 299921 - DNA, 2626 bp, Homo sapiens
cccctcccccggccgctggctcgctcggctcgcgacgctgcagaggctccgaggcggcggcggcgactccctctttccctccctcctcctccgtccgcccgtccgtccgcgcgtctgtccgttcggcccggtccggcccgaagcatggccggcgtcagcttcagcggccaccgcctggagctgctggcggcttacgaggaggtgatccgagaggagagcgcggccgactgggctctgtacacatatgaagatggctccgatgacctcaagcttgcagcatcaggagaagggggcttgcaggagctttcgggacactttgagaaccagaaggtgatgtacggcttctgcagtgtcaaggactcccaagctgctctgccaaaatacgtgctcatcaactgggtgggcgaagatgtgcctgatgcccgcaagtgcgcttgtgccagccacgtggctaaggtggcagagttcttccagggtgtcgacgtgatcgtgaacgccagcagcgtggaagacatagacgcgggtgccatcgggcagcggctctctaacgggctggcgcgactctccagccctgtgctgcaccgactgcggctgcgagaggatgagaacgcagagcccgtgggcaccacctaccagaagacggatgcagctgtggaaatgaagcggattaaccgagagcagttctgggagcaggccaagaaggaagaagagctgcggaaggaggaggagcggaagaaggccctggatgagaggctcaggttcgagcaggagcggatggagcaggagcggcaggagcaagaggagcgcgagcggcgctaccgggagcgggagcagcagatcgaggagcacaggaggaaacagcagactttagaagcggaagaggccaagaggcggttgaaggagcagtctatctttggtgaccatcgggatgaggaggaagagacccacatgaagaagtcagagtcggaggtggaggaggcagcagctattattgcccagcggcctgacaacccaagggagttcttcaagcagcaggaaagagtcgcatcggcctctgcgggcagctgtgatgtaccctcgcccttcaaccatcgaccaggcagccacctggacagccaccggaggatggcgcccactcccatccccacgcggagcccgtctgactccagcaccgcctccacccctgtcgctgagcagatagagcgggccctggatgaggtcacctcctcgcagcctccaccactgccaccgccacccccaccagcccaagagacccaggagcccagccccatcctagacagtgaggagaccagagcagcagcccctcaggcctgggccggccccatggaggagccccctcaggcacaggcgcctccccgggggccaggcagccctgcagaggacttgatgttcatggagtctgcagagcaggctgtcctggctgctcccgtggagcctgccacagctgacgccacggaggtccacgatgcagctgacaccattgaaactgacactgccactgctgacaccactgttgccaacaacgtaccccccgccgccaccagcctcattgacctatggcctggcaacggggaaggggcctccacactccagggtgagcccagggcccccacgccaccctcgggtactgaggtcaccctggcagaggtgcccctgctggatgaggtggctccggagccactgctgccagcaggcgaaggctgtgccacccttctcaactttgatgagctgcctgagccgccagccaccttctgtgacccagaggaagtggaaggggagcccctggctgccccccagaccccaactctgccctcagcccttgaggagctggagcaagagcaggagccggagccccacctgctaaccaatggcgagaccacccagaaggaggggacccaggccagtgaggggtacttcagtcaatcacaggaggaggagtttgcccaatcggaagagctctgtgccaaggctccgcctcctgtgttctacaacaagcctccagagatcgacatcacatgctgggatgcagacccagttccagaagaggaggagggcttcgagggtggtgattagcggtggcgccagccctaggctacccttgccaaggccgcccacctgcatcagcctctggccagacggcccgccgtgcctgcattcgcagcagctccgcctggcacccactccggattccggccctggctggggacttggccgcttccctacccacagggcctgacttttacagcttttctctttttttaaaaagttgataggagacttgtacagttgactggctttcctctcgttggtagttgagacgctgttgcaaattccacccctccttccctggtccagattgtagctcttagtcctccctgctcagctggccgggttggaggcctcaccctgcttggggcctggcgtggggggagctctggtgggaaaatgtcccccacctcttttcctagttttatgtttcttgggaaaatatcactttgtattctctgtccagggcttcagatattttgcacgaattttaaaacatggcaataaatggctcgtgggctctggctccctgggaaaaaaaagtcgtgccgaatcttgg

SEQ ID NO: 299922 - DNA, 2740 bp, Homo sapiens
cccctcccccggccgctggctcgctcggctcgcgacgctgcagaggctccgaggcggcggcggcgactccctctttccctccctcctcctccgtccgcccgtccgtccgcgcgtctgtccgttcggcccggtccggcccgaagcatggccggcgtcagcttcagcggccaccgcctggagctgctggcggcttacgaggaggtgatccgagaggagagcgcggccgactgggctctgtacacatatgaagatggctccgatgacctcaagcttgcagcatcaggagaagggggcttgcaggagctttcgggacactttgagaaccagaaggtgatgtacggcttctgcagtgtcaaggactcccaagctgctctgccaaaatacgtgctcatcaactgggtgggcgaagatgtgcctgatgcccgcaagtgcgcttgtgccagccacgtggctaaggtggcagagttcttccagggtgtcgacgtgatcgtgaacgccagcagcgtggaagacatagacgcgggtgccatcgggcagcggctctctaacgggctggcgcgactctccagccctgtgctgcaccgactgcggctgcgagaggatgagaacgcagagcccgtgggcaccacctaccagaagacggatgcagctgtggaaatgaagcggattaaccgagagcagttctgggagcaggccaagaaggaagaagagctgcggaaggaggaggagcggaagaaggccctggatgagaggctcaggttcgagcaggagcggatggagcaggagcggcaggagcaagaggagcgcgagcggcgctaccgggagcgggagcagcagatcgaggagcacaggaggaaacagcagactttagaagcggaagaggccaagaggcggttgaaggagcagtctatctttggtgaccatcgggatgaggaggaagagacccacatgaagaagtcagagtcggaggtggaggaggcagcagctattattgcccagcggcctgacaacccaagggagttcttcaagcagcaggaaagagtcgcatcggcctctgcgggcagctgtgatgtaccctcgcccttcaaccatcgaccaggtcgtccgtactgccctttcataaaggcatcggacagtgggccttcctcctcctcctcttcctcctcctcccctccacggactccctttccctatatcacctgccaccgcaccccaaacctctcttcctccctcccatgcagccacctggacagccaccggaggatggcgcccactcccatccccacgcggagcccgtctgactccagcaccgcctccacccctgtcgctgagcagatagagcgggccctggatgaggtcacctcctcgcagcctccaccactgccaccgccacccccaccagcccaagagacccaggagcccagccccatcctagacagtgaggagaccagagcagcagcccctcaggcctgggccggccccatggaggagccccctcaggcacaggcgcctccccgggggccaggcagccctgcagaggacttgatgttcatggagtctgcagagcaggctgtcctggctgctcccgtggagcctgccacagctgacgccacggaggtccacgatgcagctgacaccattgaaactgacactgccactgctgacaccactgttgccaacaacgtaccccccgccgccaccagcctcattgacctatggcctggcaacggggaaggggcctccacactccagggtgagcccagggcccccacgccaccctcgggtactgaggtcaccctggcagaggtgcccctgctggatgaggtggctccggagccactgctgccagcaggcgaaggctgtgccacccttctcaactttgatgagctgcctgagccgccagccaccttctgtgacccagaggaagtggaaggggagcccctggctgccccccagaccccaactctgccctcagcccttgaggagctggagcaagagcaggagccggagccccacctgctaaccaatggcgagaccacccagaaggaggggacccaggccagtgaggggtacttcagtcaatcacaggaggaggagtttgcccaatcggaagagctctgtgccaaggctccgcctcctgtgttctacaacaagcctccagagatcgacatcacatgctgggatgcagacccagttccagaagaggaggagggcttcgagggtggtgattagcggtggcgccagccctaggctacccttgccaaggccgcccacctgcatcagcctctggccagacggcccgccgtgcctgcattcgcagcagctccgcctggcacccactccggattccggccctggctggggacttggccgcttccctacccacagggcctgacttttacagcttttctctttttttaaaaagttgataggagacttgtacagttgactggctttcctctcgttggtagttgagacgctgttgcaaattccacccctccttccctggtccagattgtagctcttagtcctccctgctcagctggccgggttggaggcctcaccctgcttggggcctggcgtggggggagctctggtgggaaaatgtcccccacctcttttcctagttttatgtttcttgggaaaatatcactttgtattctctgtccagggcttcagatattttgcacgaattttaaaacatggcaataaatggctcgtgggctctggctccctggga

SEQ ID NO: 299923 - DNA, 3074 bp, Homo sapiens
  misc_feature (20)..(20): n is a, c, g, or t
gggcggccggacgcggcccngaggcgcggggtcccgatgtggggcccggggccgcgtggcctgcgggagcccatcccccaccctaccccccgggcccgggggacaggtgtgcacggggcggccaagggcaccttcgccaccttcgagcgggcgaggtccgggcggggacggggcggggaccgagctagcggagccagcgcagcctgcccggctcagcccggcccggccacagcacaaaggaaagcgagggcgggggaggagcggagcgggctgggggccgggcgccccgcccaccggggggcctctcggagtgggccgccctccccccgaaacctgggctggagtgaggtggaaggatgtttgctgccacatggcgaccgcgaagtgactcccttaccgccgcgggtcgcggaggaggcagggggaaggtgcccatctggttcctaggcctcctctccctgctggcagatgggaacaggttcttcttgaggaaactgaggcaaagaggagggcaggtctgagggaccccgcttgggctggcctcacccgcacactgggagggcagccaggtggggactctgacctgggggcttctggaggagaggatgagatggctgggcatccatggcatggtactgcagcactggccagcagccaggcctggagggatggacgcgagagacaagctctcgtgtcctgcagggctctgtacacatatgaagatggctccgatgacctcaagcttgcagcatcaggagaagggggcttgcaggagctttcgggacactttgagaaccagaaggtgatgtacggcttctgcagtgtcaaggactcccaagctgctctgccaaaatacgtgctcatcaactgggtgggcgaagatgtgcctgatgcccgcaagtgcgcttgtgccagccacgtggctaaggtggcagagttcttccagggtgtcgacgtgatcgtgaacgccagcagcgtggaagacatagacgcgggtgccatcgggcagcggctctctaacgggctggcgcgactctccagccctgtgctgcaccgactgcggctgcgagaggatgagaacgcagagcccgtgggcaccacctaccagaagacggatgcagctgtggaaatgaagcggattaaccgagagcagttctgggagcaggccaagaaggaagaagagctgcggaaggaggaggagcggaagaaggccctggatgagaggctcaggttcgagcaggagcggatggagcaggagcggcaggagcaagaggagcgcgagcggcgctaccgggagcgggagcagcagatcgaggagcacaggaggaaacagcagactttagaagcggaagaggccaagaggcggttgaaggagcagtctatctttggtgaccatcgggatgaggaggaagagacccacatgaagaagtcagagtcggaggtggaggaggcagcagctattattgcccagcggcctgacaacccaagggagttcttcaagcagcaggaaagagtcgcatcggcctctgcgggcagctgtgatgtaccctcgcccttcaaccatcgaccaggcagccacctggacagccaccggaggatggcgcccactcccatccccacgcggagcccgtctgactccagcaccgcctccacccctgtcgctgagcagatagagcgggccctggatgaggtcacctcctcgcagcctccaccactgccaccgccacccccaccagcccaagagacccaggagcccagccccatcctagacagtgaggagaccagagcagcagcccctcaggcctgggccggccccatggaggagccccctcaggcacaggcgcctccccgggggccaggcagccctgcagaggacttgatgttcatggagtctgcagagcaggctgtcctggctgctcccgtggagcctgccacagctgacgccacggaggtccacgatgcagctgacaccattgaaactgacactgccactgctgacaccactgttgccaacaacgtaccccccgccgccaccagcctcattgacctatggcctggcaacggggaaggggcctccacactccagggtgagcccagggcccccacgccaccctcgggtactgaggtcaccctggcagaggtgcccctgctggatgaggtggctccggagccactgctgccagcaggcgaaggctgtgccacccttctcaactttgatgagctgcctgagccgccagccaccttctgtgacccagaggaagtggaaggggagcccctggctgccccccagaccccaactctgccctcagcccttgaggagctggagcaagagcaggagccggagccccacctgctaaccaatggcgagaccacccagaaggaggggacccaggccagtgaggggtacttcagtcaatcacaggaggaggagtttgcccaatcggaagagctctgtgccaaggctccgcctcctgtgttctacaacaagcctccagagatcgacatcacatgctgggatgcagacccagttccagaagaggaggagggcttcgagggtggtgattagcggtggcgccagccctaggctacccttgccaaggccgcccacctgcatcagcctctggccagacggcccgccgtgcctgcattcgcagcagctccgcctggcacccactccggattccggccctggctggggacttggccgcttccctacccacagggcctgacttttacagcttttctctttttttaaaaagttgataggagacttgtacagttgactggctttcctctcgttggtagttgagacgctgttgcaaattccacccctccttccctggtccagattgtagctcttagtcctccctgctcagctggccgggttggaggcctcaccctgcttggggcctggcgtggggggagctctggtgggaaaatgtcccccacctcttttcctagttttatgtttcttgggaaaatatcactttgtattctctgtccagggcttcagatattttgcacgaattttaaaacatggcaataaatggctcgtgggctctggctccctggga

SEQ ID NO: 299924 - DNA, 2677 bp, Homo sapiens
cccctcccccggccgctggctcgctcggctcgcgacgctgcagaggctccgaggcggcggcggcgactccctctttccctccctcctcctccgtccgcccgtccgtccgcgcgtctgtccgttcggcccggtccggcccgaagcatggccggcgtcagcttcagcggccaccgcctggagctgctggcggcttacgaggaggtgatccgagaggagagcgcggccgactgggctctgtacacatatgaagatggctccgatgacctcaagcttgcagcatcaggagaagggggcttgcaggagctttcgggacactttgagaaccagaaggtgatgtacggcttctgcagtgtcaaggactcccaagctgctctgccaaaatacgtgctcatcaactgggtgggcgaagatgtgcctgatgcccgcaagtgcgcttgtgccagccacgtggctaaggtggcagagttcttccagggtgtcgacgtgatcgtgaacgccagcagcgtggaagacatagacgcgggtgccatcgggcagcggctctctaacgggctggcgcgactctccagccctgtgctgcaccgactgcggctgcgagaggatgagaacgcagagcccgtgggcaccacctaccagaagacggatgcagctgtggaaatgaagcggattaaccgagagcagttctgggagcaggccaagaaggaagaagagctgcggaaggaggaggagcggaagaaggccctggatgagaggctcaggttcgagcaggagcggatggagcaggagcggcaggagcaagaggagcgcgagcggcgctaccgggagcgggagcagcagatcgaggagcacaggtgagcctgcccgcccggagcgctccaggggcccccgggcgcaccctgacgggtgctggctgcttatcgttccaggaggaaacagcagactttagaagcggaagaggccaagaggcggttgaaggagcagtctatctttggtgaccatcgggatgaggaggaagagacccacatgaagaagtcagagtcggaggtggaggaggcagcagctattattgcccagcggcctgacaacccaagggagttcttcaagcagcaggaaagagtcgcatcggcctctgcgggcagctgtgatgtaccctcgcccttcaaccatcgaccaggcagccacctggacagccaccggaggatggcgcccactcccatccccacgcggagcccgtctgactccagcaccgcctccacccctgtcgctgagcagatagagcgggccctggatgaggtcacctcctcgcagcctccaccactgccaccgccacccccaccagcccaagagacccaggagcccagccccatcctagacagtgaggagaccagagcagcagcccctcaggcctgggccggccccatggaggagccccctcaggcacaggcgcctccccgggggccaggcagccctgcagaggacttgatgttcatggagtctgcagagcaggctgtcctggctgctcccgtggagcctgccacagctgacgccacggaggtccacgatgcagctgacaccattgaaactgacactgccactgctgacaccactgttgccaacaacgtaccccccgccgccaccagcctcattgacctatggcctggcaacggggaaggggcctccacactccagggtgagcccagggcccccacgccaccctcgggtactgaggtcaccctggcagaggtgcccctgctggatgaggtggctccggagccactgctgccagcaggcgaaggctgtgccacccttctcaactttgatgagctgcctgagccgccagccaccttctgtgacccagaggaagtggaaggggagcccctggctgccccccagaccccaactctgccctcagcccttgaggagctggagcaagagcaggagccggagccccacctgctaaccaatggcgagaccacccagaaggaggggacccaggccagtgaggggtacttcagtcaatcacaggaggaggagtttgcccaatcggaagagctctgtgccaaggctccgcctcctgtgttctacaacaagcctccagagatcgacatcacatgctgggatgcagacccagttccagaagaggaggagggcttcgagggtggtgattagcggtggcgccagccctaggctacccttgccaaggccgcccacctgcatcagcctctggccagacggcccgccgtgcctgcattcgcagcagctccgcctggcacccactccggattccggccctggctggggacttggccgcttccctacccacagggcctgacttttacagcttttctctttttttaaaaagttgataggagacttgtacagttgactggctttcctctcgttggtagttgagacgctgttgcaaattccacccctccttccctggtccagattgtagctcttagtcctccctgctcagctggccgggttggaggcctcaccctgcttggggcctggcgtggggggagctctggtgggaaaatgtcccccacctcttttcctagttttatgtttcttgggaaaatatcactttgtattctctgtccagggcttcagatattttgcacgaattttaaaacatggcaataaatggctcgtgggctctggctccctggga

SEQ ID NO: 299925 - DNA, 2795 bp, Homo sapiens
  misc_feature (20)..(20): n is a, c, g, or t
gggcggccggacgcggcccngaggcgcggggtcccgatgtggggcccggggccgcgtggcctgcgggagcccatcccccaccctaccccccgggcccgggggacaggtgtgcacggggcggccaagggcaccttcgccaccttcgagcgggcgaggtccgggcggggacggggcggggaccgagctagcggagccagcgcagcctgcccggctcagcccggcccggccacagcacaaaggaaagcgagggcgggggaggagcggagcgggctgggggccgggcgccccgcccaccggggggcctctcggagtgggccgccctccccccgaaacctgggctggagtgaggtggaaggatgtttgctgccacatggcgaccgcgaagtgactcccttaccgccgcgggtcgcggaggaggcagggggctctgtacacatatgaagatggctccgatgacctcaagcttgcagcatcaggagaagggggcttgcaggagctttcgggacactttgagaaccagaaggtgatgtacggcttctgcagtgtcaaggactcccaagctgctctgccaaaatacgtgctcatcaactgggtgggcgaagatgtgcctgatgcccgcaagtgcgcttgtgccagccacgtggctaaggtggcagagttcttccagggtgtcgacgtgatcgtgaacgccagcagcgtggaagacatagacgcgggtgccatcgggcagcggctctctaacgggctggcgcgactctccagccctgtgctgcaccgactgcggctgcgagaggatgagaacgcagagcccgtgggcaccacctaccagaagacggatgcagctgtggaaatgaagcggattaaccgagagcagttctgggagcaggccaagaaggaagaagagctgcggaaggaggaggagcggaagaaggccctggatgagaggctcaggttcgagcaggagcggatggagcaggagcggcaggagcaagaggagcgcgagcggcgctaccgggagcgggagcagcagatcgaggagcacaggaggaaacagcagactttagaagcggaagaggccaagaggcggttgaaggagcagtctatctttggtgaccatcgggatgaggaggaagagacccacatgaagaagtcagagtcggaggtggaggaggcagcagctattattgcccagcggcctgacaacccaagggagttcttcaagcagcaggaaagagtcgcatcggcctctgcgggcagctgtgatgtaccctcgcccttcaaccatcgaccaggcagccacctggacagccaccggaggatggcgcccactcccatccccacgcggagcccgtctgactccagcaccgcctccacccctgtcgctgagcagatagagcgggccctggatgaggtcacctcctcgcagcctccaccactgccaccgccacccccaccagcccaagagacccaggagcccagccccatcctagacagtgaggagaccagagcagcagcccctcaggcctgggccggccccatggaggagccccctcaggcacaggcgcctccccgggggccaggcagccctgcagaggacttgatgttcatggagtctgcagagcaggctgtcctggctgctcccgtggagcctgccacagctgacgccacggaggtccacgatgcagctgacaccattgaaactgacactgccactgctgacaccactgttgccaacaacgtaccccccgccgccaccagcctcattgacctatggcctggcaacggggaaggggcctccacactccagggtgagcccagggcccccacgccaccctcgggtactgaggtcaccctggcagaggtgcccctgctggatgaggtggctccggagccactgctgccagcaggcgaaggctgtgccacccttctcaactttgatgagctgcctgagccgccagccaccttctgtgacccagaggaagtggaaggggagcccctggctgccccccagaccccaactctgccctcagcccttgaggagctggagcaagagcaggagccggagccccacctgctaaccaatggcgagaccacccagaaggaggggacccaggccagtgaggggtacttcagtcaatcacaggaggaggagtttgcccaatcggaagagctctgtgccaaggctccgcctcctgtgttctacaacaagcctccagagatcgacatcacatgctgggatgcagacccagttccagaagaggaggagggcttcgagggtggtgattagcggtggcgccagccctaggctacccttgccaaggccgcccacctgcatcagcctctggccagacggcccgccgtgcctgcattcgcagcagctccgcctggcacccactccggattccggccctggctggggacttggccgcttccctacccacagggcctgacttttacagcttttctctttttttaaaaagttgataggagacttgtacagttgactggctttcctctcgttggtagttgagacgctgttgcaaattccacccctccttccctggtccagattgtagctcttagtcctccctgctcagctggccgggttggaggcctcaccctgcttggggcctggcgtggggggagctctggtgggaaaatgtcccccacctcttttcctagttttatgtttcttgggaaaatatcactttgtattctctgtccagggcttcagatattttgcacgaattttaaaacatggcaataaatggctcgtgggctctggctccctggga

SEQ ID NO: 299926 - DNA, 1154 bp, Homo sapiens
cccctcccccggccgctggctcgctcggctcgcgacgctgcagaggctccgaggcggcggcggcgactccctctttccctccctcctcctccgtccgcccgtccgtccgcgcgtctgtccgttcggcccggtccggcccgaagcatggccggcgtcagcttcagcggccaccgcctggagctgctggcggcttacgaggaggtgatccgagaggagagcgcggccgactgggctctgtacacatatgaagatggctccgatgacctcaagcttgcagcatcaggagaagggggcttgcaggagctttcgggacactttgagaaccagaaggtgatgtacggcttctgcagtgtcaaggactcccaagctgctctgccaaaatacgtgctcatcaactgggtgggcgaagatgtgcctgatgcccgcaagtgcgcttgtgccagccacgtggctaaggtggcagagttcttccagggtgtcgacgtgatcgtgaacgccagcagcgtggaagacatagacgcgggtgccatcgggcagcggctctctaacgggctggcgcgactctccagccctgtgctgcaccgactgcggctgcgagaggatgagaacgcagagcccgtgggcaccacctaccagaagacggatgcagctgtggaaatgaagcggattaaccgagagcagttctgggagcaggccaagaaggaagaagagctgcggaaggaggaggagcggaagaaggccctggatgagaggctcaggttcgagcaggagcggatggagcaggagcggcaggagcaagaggagcgcgagcggcgctaccgggagcgggagcagcagatcgaggagcacaggaggaaacagcagactttagaagcggaagaggccaagaggcggttgaaggagcagtctatctttggtgaccatcgggatgaggaggaagagacccacatgaagaagtcagagtcggaggtggaggaggcagcagctattattgcccagcggcctgacaacccaagggagttcttcaagcagcaggaaagagtcgcatcggcctctgcgggcagctgtgatgtaccctcgcccttcaaccatcgaccagctgagctgcagctcgccccaactcaggggcgagctgcaggagggaaagcatgtcc

SEQ ID NO: 299927 - DNA, 2308 bp, Homo sapiens
cccctcccccggccgctggctcgctcggctcgcgacgctgcagaggctccgaggcggcggcggcgactccctctttccctccctcctcctccgtccgcccgtccgtccgcgcgtctgtccgttcggcccggtccggcccgaagcatggccggcgtcagcttcagcggccaccgcctggagctgctggcggcttacgaggaggtgatccgagaggagagcgcggccgactgggctctgtacacatatgaagatggctccgatgacctcaagcttgcagcatcaggagaagggggcttgcaggagctttcgggacactttgagaaccagaaggtgatgtacggcttctgcagtgtcaaggactcccaagctgctctgccaaaatacgtgctcatcaactgggtgggcgaagatgtgcctgatgcccgcaagtgcgcttgtgccagccacgtggctaaggtggcagagttcttccagggtgtcgacgtgatcgtgaacgccagcagcgtggaagacatagacgcgggtgccatcgggcagcggctctctaacgggctggcgcgactctccagccctgtgctgcaccgactgcggctgcgagaggatgagaacgcagagcccgtgggcaccacctaccagaagacggatgcagctgtggaaatgaagcggattaaccgagagcagttctgggagcaggccaagaaggaagaagagctgcggaaggaggaggagcggaagcagcaggaaagagtcgcatcggcctctgcgggcagctgtgatgtaccctcgcccttcaaccatcgaccaggcagccacctggacagccaccggaggatggcgcccactcccatccccacgcggagcccgtctgactccagcaccgcctccacccctgtcgctgagcagatagagcgggccctggatgaggtcacctcctcgcagcctccaccactgccaccgccacccccaccagcccaagagacccaggagcccagccccatcctagacagtgaggagaccagagcagcagcccctcaggcctgggccggccccatggaggagccccctcaggcacaggcgcctccccgggggccaggcagccctgcagaggacttgatgttcatggagtctgcagagcaggctgtcctggctgctcccgtggagcctgccacagctgacgccacggaggtccacgatgcagctgacaccattgaaactgacactgccactgctgacaccactgttgccaacaacgtaccccccgccgccaccagcctcattgacctatggcctggcaacggggaaggggcctccacactccagggtgagcccagggcccccacgccaccctcgggtactgaggtcaccctggcagaggtgcccctgctggatgaggtggctccggagccactgctgccagcaggcgaaggctgtgccacccttctcaactttgatgagctgcctgagccgccagccaccttctgtgacccagaggaagtggaaggggagcccctggctgccccccagaccccaactctgccctcagcccttgaggagctggagcaagagcaggagccggagccccacctgctaaccaatggcgagaccacccagaaggaggggacccaggccagtgaggggtacttcagtcaatcacaggaggaggagtttgcccaatcggaagagctctgtgccaaggctccgcctcctgtgttctacaacaagcctccagagatcgacatcacatgctgggatgcagacccagttccagaagaggaggagggcttcgagggtggtgattagcggtggcgccagccctaggctacccttgccaaggccgcccacctgcatcagcctctggccagacggcccgccgtgcctgcattcgcagcagctccgcctggcacccactccggattccggccctggctggggacttggccgcttccctacccacagggcctgacttttacagcttttctctttttttaaaaagttgataggagacttgtacagttgactggctttcctctcgttggtagttgagacgctgttgcaaattccacccctccttccctggtccagattgtagctcttagtcctccctgctcagctggccgggttggaggcctcaccctgcttggggcctggcgtggggggagctctggtgggaaaatgtcccccacctcttttcctagttttatgtttcttgggaaaatatcactttgtattctctgtccagggcttcagatattttgcacgaattttaaaacatggcaataaatggctcgtgggctctggctccctggga

SEQ ID NO: 299928 - DNA, 2324 bp, Homo sapiens
ctacttgtaccatggagtcagagtttgaatcccagtttacctggtttccaaacccaccgttgtctattgcaacaggcttttttcatttcacccaatatccacaatgaatagaacccctgtgaaataagtattattagtaggctgtgcacacgtggaagacatagacgcgggtgccatcgggcagcggctctctaacgggctggcgcgactctccagccctgtgctgcaccgactgcggctgcgagaggatgagaacgcagagcccgtgggcaccacctaccagaagacggatgcagctgtggaaatgaagcggattaaccgagagcagttctgggagcaggccaagaaggaagaagagctgcggaaggaggaggagcggaagaaggccctggatgagaggctcaggttcgagcaggagcggatggagcaggagcggcaggagcaagaggagcgcgagcggcgctaccgggagcgggagcagcagatcgaggagcacaggtgagcctgcccgcccggagcgctccaggggcccccgggcgcaccctgacgggtgctggctgcttatcgttccaggaggaaacagcagactttagaagcggaagaggccaagaggcggttgaaggagcagtctatctttggtgaccatcgggatgaggaggaagagacccacatgaagaagtcagagtcggaggtggaggaggcagcagctattattgcccagcggcctgacaacccaagggagttcttcaagcagcaggaaagagtcgcatcggcctctgcgggcagctgtgatgtaccctcgcccttcaaccatcgaccaggcagccacctggacagccaccggaggatggcgcccactcccatccccacgcggagcccgtctgactccagcaccgcctccacccctgtcgctgagcagatagagcgggccctggatgaggtcacctcctcgcagcctccaccactgccaccgccacccccaccagcccaagagacccaggagcccagccccatcctagacagtgaggagaccagagcagcagcccctcaggcctgggccggccccatggaggagccccctcaggcacaggcgcctccccgggggccaggcagccctgcagaggacttgatgttcatggagtctgcagagcaggctgtcctggctgctcccgtggagcctgccacagctgacgccacggaggtccacgatgcagctgacaccattgaaactgacactgccactgctgacaccactgttgccaacaacgtaccccccgccgccaccagcctcattgacctatggcctggcaacggggaaggggcctccacactccagggtgagcccagggcccccacgccaccctcgggtactgaggtcaccctggcagaggtgcccctgctggatgaggtggctccggagccactgctgccagcaggcgaaggctgtgccacccttctcaactttgatgagctgcctgagccgccagccaccttctgtgacccagaggaagtggaaggggagcccctggctgccccccagaccccaactctgccctcagcccttgaggagctggagcaagagcaggagccggagccccacctgctaaccaatggcgagaccacccagaaggaggggacccaggccagtgaggggtacttcagtcaatcacaggaggaggagtttgcccaatcggaagagctctgtgccaaggctccgcctcctgtgttctacaacaagcctccagagatcgacatcacatgctgggatgcagacccagttccagaagaggaggagggcttcgagggtggtgattagcggtggcgccagccctaggctacccttgccaaggccgcccacctgcatcagcctctggccagacggcccgccgtgcctgcattcgcagcagctccgcctggcacccactccggattccggccctggctggggacttggccgcttccctacccacagggcctgacttttacagcttttctctttttttaaaaagttgataggagacttgtacagttgactggctttcctctcgttggtagttgagacgctgttgcaaattccacccctccttccctggtccagattgtagctcttagtcctccctgctcagctggccgggttggaggcctcaccctgcttggggcctggcgtggggggagctctggtgggaaaatgtcccccacctcttttcctagttttatgtttcttgggaaaatatcactttgtattctctgtccagggcttcagatattttgcacgaattttaaaacatggcaataaatggctcgtgggctctggctccctggga

SEQ ID NO: 299929 - DNA, 1083 bp, Homo sapiens
cccctcccccggccgctggctcgctcggctcgcgacgctgcagaggctccgaggcggcggcggcgactccctctttccctccctcctcctccgtccgcccgtccgtccgcgcgtctgtccgttcggcccggtccggcccgaagcatggccggcgtcagcttcagcggccaccgcctggagctgctggcggcttacgaggaggtgatccgagaggagagcgcggccgactgggctctgtacacatatgaagatggctccgatgacctcaagcttgcagcatcaggagaagggggcttgcaggagctttcgggacactttgagaaccagaaggtgatgtacggcttctgcagtgtcaaggactcccaagctgctctgccaaaatacgtgctcatcaactgggtgggcgaagatgtgcctgatgcccgcaagtgcgcttgtgccagccacgtggctaaggtggcagagttcttccagggtgtcgacgtgatcgtgaacgccagcagcgtggaagacatagacgcgggtgccatcgggcagcggctctctaacgggctggcgcgactctccagccctgtgctgcaccgactgcggctgcgagaggatgagaacgcagagcccgtgggcaccacctaccagaagacggatgcagctgtggaaatgaagcggattaaccgagagcagttctgggagcaggccaagaaggaagaagagctgcggaaggaggaggagcggaagaaggccctggatgagaggctcaggttcgagcaggagcggatggagcaggagcggcaggagcaagaggagcgcgagcggcgctaccgggagcgggagcagcagatcgaggagcacaggaggacccctgcagactttagaagcggaagaggcatgagaagggtgtagggaagattcttttgatgtgtgtgggcaggaggagggagagagttaggaaccagtctgctccttccacagccctagatagggctacggcccctcagtgggggctctgacccagcaggtgggcaaagatccagggtagctgagggatggaggggcccctaaacccagagctcaccccaaaatgca

SEQ ID NO: 299930 - DNA, 1519 bp, Homo sapiens
agacagacagaacagacagacagacagacagacagacagaacagacagacagacagacagacagacagaacagacagacagacagacagacagacagaacagacagacagacagacagacagacagaacagacagacagacagacagacagacagaacagacagacagacagacagacagacagaacagacagacagacagacagacagacagaacagacagacagacagacagacagacagaacagacagacagacagacagacagacagaacagacagacagacagacagacagacagaacagacagacagacagacagacagacagacacagacagacagacagacagacagacagacacagacagacagacagacagacagacagacacagacagacagacagacagacagacagacacagacagacagacagacagacagacagacacagacagacagacagacagacagacagacacagacagacagacagacagacagacagacacagacagacagacagacagacagacagacacagacagacagacagacagacagacagacacagacagacagacagacagacagacagacacagacagacagacagacagacagacagacacagacagacagacagacagacagacagacacagacagacagacagacagacagacagacacagacagacagacagacagacagacagacacagacagacagacagacagacagacagacacagacagacagacagacagacagagcaggagccggagccccacctgctaaccaatggcgagaccacccagaaggaggggacccaggccagtgaggggtacttcagtcaatcacaggaggaggagtttgcccaatcggaagagctctgtgccaaggctccgcctcctgtgttctacaacaagcctccagagatcgacatcacatgctgggatgcagacccagttccagaagaggaggagggcttcgagggtggtgattagcggtggcgccagccctaggctacccttgccaaggccgcccacctgcatcagcctctggccagacggcccgccgtgcctgcattcgcagcagctccgcctggcacccactccggattccggccctggctggggacttggccgcttccctacccacagggcctgacttttacagcttttctctttttttaaaaagttgataggagacttgtacagttgactggctttcctctcgttggtagttgagacgctgttgcaaattccacccctccttccctggtccagattgtagctcttagtcctccctgctcagctggccgggttggaggcctcaccctgcttggggcctggcgtggggggagctctggtgggaaaatgtcccccacctcttttcctagttttatgtttcttgggaaaatatcactttgtattctctgtccagggcttcagatattttgcacgaattttaaaacatggcaataaatggctcgtgggctctggctccctggga

SEQ ID NO: 299931 - DNA, 1199 bp, Homo sapiens
cccctcccccggccgctggctcgctcggctcgcgacgctgcagaggctccgaggcggcggcggcgactccctctttccctccctcctcctccgtccgcccgtccgtccgcgcgtctgtccgttcggcccggtccggcccgaagcatggccggcgtcagcttcagcggccaccgcctggagctgctggcggcttacgaggaggtgatccgagaggagagcgcggccgactgggctctgtacacatatgaagatggctccgatgacctcaagcttgcagcatcaggagaagggggcttgcaggagctttcgggacactttgagaaccagaaggtgatgtacggcttctgcagtgtcaaggactcccaagctgctctgccaaaatacgtgctcatcaactgggtgggcgaagatgtgcctgatgcccgcaagtgcgcttgtgccagccacgtggctaaggtggcagagttcttccagggtgtcgacgtgatcgtgaacgccagcagcgtggaagacatagacgcgggtgccatcgggcagcggctctctaacgggctggcgcgactctccagccctgtgctgcaccgactgcggctgcgagaggatgagaacgcagagcccgtgggcaccacctaccagaagacggatgcagctgtggaaatgaagcggattaaccgagagcagttctgggagcaggccaagagacccaggagcccagccccatcctagacagtgaggagaccagagcagcagcccctcaggcctgggccggccccatggaggagccccctcaggcacaggcgcctccccgggggccaggcagccctgcagaggacttgatgttcatggagtctgcagagcaggctgtcctgggtgtccgggagctgcgaagtggaccagaggtcacagcgtgcacctgaatgactggctgtggcctgtgcgaataccggcggcactagtaggggaggaggcccacgggagccccccgtaggctagacgctaagatgccgtccaaggtctgggcgctgcggggagacgacgagagaaggacggagacatgagacaaaacacaaaaacaaaaacaccagaaacaagcaaacgaaaacaaacaaaacgacaaacaacgaacacaacagaacacaaacataacaaacatataaatagacacacaaaacacaacaaaaacaaaacagcaacaacac

SEQ ID NO: 299932 - DNA, 309 bp, Homo sapiens
ttttttggaaagcacaaacttctgtaacgggtcgtgctcatgtctgttaataaagaaatccagatcccttcgggctgccgcctgccctgacccaggttcccaactcctcccacctccgaggccgcagcacctccttgccaccagggggcgtcctcaccctaattccaaggcccgccaggcgggggcggggtgggggggcggtgctaggggctaaggctcccaggggaagccgcttggcacctacaaccaccggagaagggttggtcttagacttagtgctgtacccttaggttctgttgtggcggaaac

SEQ ID NO: 299933 - DNA, 3127 bp, Homo sapiens
gcctcgggagcccggtgtggtgctcgcggacaggaagcaggagagtttgccaatagggatgtgacagcggttcccattaagcggtgatggtggttttgggacctgataatcgagctgggagtcagaggcgggatgtgtgcggtgaaggatgttttgatacccccatataaaataatctgtctgtcatgggagcccccacgtcctctgaaatagttcagctctgtctgcatgacttgtcctgggactgaggaaaatttaccagtcatctggccttttggaagagcaaaaaatgatgaagtcccaggggttagtatcattcaaggatgtggctgtggatttcacccaggaggagtggcagcaacttgacccttctcagaggaccctgtacagggatgtgatgctggagaactacagccacctggtctcaatggggtatccagtttccaaaccagatgtcatctccaagttggaacaaggagaagagccatggatcataaagggagacatatcaaattggatctatccagatgaatatcaggcagatgggagacaagacaggaagagtaaccttcacaactcccagtcatgtattttggggacagtttccttccatcataagatactgaaaggagtcacaagggatggttcattgtgctccattttaaaagtctgtcaaggtgatggtcagctgcagagatttctagagaatcaagacaaactcttcaggcaggtcacatttgttaacagcaaaacagtgactgaggcatcagggcataaatataatccactggggaaaatatttcaagagtgcatagaaacagatatatcaatacagagattccataaatatgatgcttttaaaaagaacttaaaaccaaatattgacctaccgagttgttataagagcaattcaagaaaaaaacctgatcagagttttggaggtggaaaatcatctagccagagtgagcccaattctaatcttgagaagattcacaatggagtaataccttttgatgataatcagtgtggaaacgtttttagaaatacacaatcccttattcaatatcagaatgtggaaactaaagagaaaagctgtgtatgtgttacatgtggaaaagcctttgctaagaagtcacaactcattgtacatcaaagaattcatactggaaagaaaccatatgattgtggtgcatgcggaaaagccttcagtgagaagtttcatcttgttgtacatcagagaactcatactggggagaaaccttatgattgttctgaatgtggaaaagccttctctcagaaatcgtcccttattatacatcagagagttcacactggggaaaaaccctatgaatgtagtgaatgcgggaaagccttctcccagaaatcacccctcattatacatcagagaatacatactggggaaaaaccctatgaatgtagagagtgtgggaaggccttttcccagaagtcacagctgattatacaccacagagctcatactggagagaagccgtatgagtgtaccgaatgtgggaaagccttctgtgagaagtcccacctcattatacataaaagaattcacactggtgagaaaccctacaaatgtgctcaatgtgaggaagccttcagcaggaagacagaactcattacacatcagttagttcatactggggaaaaaccttatgaatgtactgaatgtggaaagacattctcccgcaagtcacagctcatcatacatcagagaacacatactggagaaaaaccctataaatgtagtgaatgtggcaaagccttctgccagaagtcacatctcattggacatcagagaattcacacaggagaaaaaccttatatatgtactgaatgtgggaaagccttctctcagaagtcccaccttccgggacaccagcgaattcatacaggagagaaaccttacatatgtgctgaatgtggaaaggccttttctcagaagtcagaccttgttttacatcagaggattcatactggggaaagaccctatcaatgtgctatatgtgggaaggccttcatccagaagtcacaactaactgtacaccagagaattcacacagtggtaaaatcataatgaactggccacagaaaagccttagtattagctcaagccttaataattactagaaacccaattaatttgataagcttggggacaacatcccaatagataaaaatttttaagggaatttgtttctagtttggtgatgcctaacttttccagcaaagatgatggaaaatagttatataaatgaagaacatttttaatatggcatgtaaagcttttaaagttatgaactcagtgatcagcacagcaagttaagcatacagaatattgtcaagttgcatattccttatactacaaaatgataatcagccattgtgaaactgctaatattagcttgtcataattatggccataaactaatttttctataaaagacgtggaagaaagcttaagtaaacaataaaataaaacctatacactattttaagaaggggcttgagcatgacccctaaagctacatgtaaagttcttgtacaaaaaatggaatgataggttgatcagattcagtaaagttgatctgtatgcattttcccatctcaagcatataagttgacctgcatctctggaaggaccttgagattgatgcattttgagcaggtctcccttttactcttcccaactgggaacttggagctgaaaaacattggcactgaggccagatggccttgggtttaatcctggctcagtgcctcacagattgtgtgactttaggcaaacatacttctcctagctgagtattttttatcagtaagtacaaatacaatgcagagctcattttcagttaatattagtactttttaaatctttactctctatcttgaagcattagatgttaagactaatgtgtaaaaaccacgtctgagcttgcttttccctctggacactctgcttttgattgcctatccctataagtggctcattttactgtcttctgatcctggtggccttatttttgctatgttaaggttgtgttttttaatacttggatttattttcatatacttacataaaccgtggtgattgcacata

SEQ ID NO: 299934 - DNA, 551 bp, Homo sapiens
gaattccgtaaccgccaccgtccggcagcgatgaagcggctggtggatatcgccgcgatctccaagttggaacaaggagaagagccatggatcataaagggagacatatcaaattggatctatccagatgaatatcaggcagatgggagacaagacaggaagagtaaccttcacaactcccagtcatgtattttggggacagtttccttccatcataagatactgaaaggagtcacaagggatggttcattgtgctccattttaaaagtctgtcaaggtgatggtcagctgcagagatttctagagaatcaagacaaactcttcaggcaggtcacatttgttaacagcaaaacagtgactgaggcatcagggcataaatataatccactggggaaaatatttcaagagtgcatagaaacagatatatcaatacagagattccataaatatgatgcttttaaaaagaacttaaaaccaaatattgacctaccgagttgttataagagccagagagagagtcttgctatgttgaccaggctggtcttgaattc

SEQ ID NO: 299935 - DNA, 3112 bp, Homo sapiens
atccaattataaaaccttggtcaacttctatgtgatcatattataggtacaagaggagtaaagaatgatccctcctccacatggtgcctgctgagacttctgtaaggctcaaacaaccttatcccacagggtagcccattagttacttgacttctgatgttagttgttgcaagattggtgaatgtgaaagctgcagtctgggtttggactatgaaaaacattctgatcaccagttttgctttttcagtcatctggccttttggaagagcaaaaaatgatgaagtcccaggggttagtatcattcaaggatgtggctgtggatttcacccaggaggagtggcagcaacttgacccttctcagaggaccctgtacagggatgtgatgctggagaactacagccacctggtctcaatggggtatccagtttccaaaccagatgtcatctccaagttggaacaaggagaagagccatggatcataaagggagacatatcaaattggatctatccagatgaatatcaggcagatgggagacaagacaggaagagtaaccttcacaactcccagtcatgtattttggggacagtttccttccatcataagatactgaaaggagtcacaagggatggttcattgtgctccattttaaaagtctgtcaaggtgatggtcagctgcagagatttctagagaatcaagacaaactcttcaggcaggtcacatttgttaacagcaaaacagtgactgaggcatcagggcataaatataatccactggggaaaatatttcaagagtgcatagaaacagatatatcaatacagagattccataaatatgatgcttttaaaaagaacttaaaaccaaatattgacctaccgagttgttataagagcaattcaagaaaaaaacctgatcagagttttggaggtggaaaatcatctagccagagtgagcccaattctaatcttgagaagattcacaatggagtaataccttttgatgataatcagtgtggaaacgtttttagaaatacacaatcccttattcaatatcagaatgtggaaactaaagagaaaagctgtgtatgtgttacatgtggaaaagcctttgctaagaagtcacaactcattgtacatcaaagaattcatactggaaagaaaccatatgattgtggtgcatgcggaaaagccttcagtgagaagtttcatcttgttgtacatcagagaactcatactggggagaaaccttatgattgttctgaatgtggaaaagccttctctcagaaatcgtcccttattatacatcagagagttcacactggggaaaaaccctatgaatgtagtgaatgcgggaaagccttctcccagaaatcacccctcattatacatcagagaatacatactggggaaaaaccctatgaatgtagagagtgtgggaaggccttttcccagaagtcacagctgattatacaccacagagctcatactggagagaagccgtatgagtgtaccgaatgtgggaaagccttctgtgagaagtcccacctcattatacataaaagaattcacactggtgagaaaccctacaaatgtgctcaatgtgaggaagccttcagcaggaagacagaactcattacacatcagttagttcatactggggaaaaaccttatgaatgtactgaatgtggaaagacattctcccgcaagtcacagctcatcatacatcagagaacacatactggagaaaaaccctataaatgtagtgaatgtggcaaagccttctgccagaagtcacatctcattggacatcagagaattcacacaggagaaaaaccttatatatgtactgaatgtgggaaagccttctctcagaagtcccaccttccgggacaccagcgaattcatacaggagagaaaccttacatatgtgctgaatgtggaaaggccttttctcagaagtcagaccttgttttacatcagaggattcatactggggaaagaccctatcaatgtgctatatgtgggaaggccttcatccagaagtcacaactaactgtacaccagagaattcacacagtggtaaaatcataatgaactggccacagaaaagccttagtattagctcaagccttaataattactagaaacccaattaatttgataagcttggggacaacatcccaatagataaaaatttttaagggaatttgtttctagtttggtgatgcctaacttttccagcaaagatgatggaaaatagttatataaatgaagaacatttttaatatggcatgtaaagcttttaaagttatgaactcagtgatcagcacagcaagttaagcatacagaatattgtcaagttgcatattccttatactacaaaatgataatcagccattgtgaaactgctaatattagcttgtcataattatggccataaactaatttttctataaaagacgtggaagaaagcttaagtaaacaataaaataaaacctatacactattttaagaaggggcttgagcatgacccctaaagctacatgtaaagttcttgtacaaaaaatggaatgataggttgatcagattcagtaaagttgatctgtatgcattttcccatctcaagcatataagttgacctgcatctctggaaggaccttgagattgatgcattttgagcaggtctcccttttactcttcccaactgggaacttggagctgaaaaacattggcactgaggccagatggccttgggtttaatcctggctcagtgcctcacagattgtgtgactttaggcaaacatacttctcctagctgagtattttttatcagtaagtacaaatacaatgcagagctcattttcagttaatattagtactttttaaatctttactctctatcttgaagcattagatgttaagactaatgtgtaaaaaccacgtctgagcttgcttttccctctggacactctgcttttgattgcctatccctataagtggctcattttactgtcttctgatcctggtggccttatttttgctatgttaaggttgtgttttttaatacttggatttattttcatatacttacataaaccgtggtgattgcacata

SEQ ID NO: 299936 - DNA, 3877 bp, Homo sapiens
gcctcgggagcccggtgtggtgctcgcggacaggaagcaggagagtttgccaatagggatgtgacagcggttcccattaagcggtgatggtggttttgggacctgataatcgagctgggagtcagaggcgggatgtgtgcggtgaaggatgttttgatacccccatataaaataatctgtctgtcatgggagcccccacgtcctctgaaatagttcagctctgtctgcatgacttgtcctgggactgaggaaaatttaccagtcatctggccttttggaagagcaaaaaatgatgaagtcccaggggttagtatcattcaaggatgtggctgtggatttcacccaggaggagtggcagcaacttgacccttctcagaggaccctgtacagggatgtgatgctggagaactacagccacctggtctcaatggggtatccagtttccaaaccagatgtcatctccaagttggaacaaggagaagagccatggatcataaagggagacatatcaaattggatctatccagatgaatatcaggcagatgggagacaagacaggaagagtaaccttcacaactcccagtcatgtattttggggacagtttccttccatcataagatactgaaaggagtcacaagggatggttcattgtgctccattttaaaagtctgtcaaggtgatggtcagctgcagagatttctagagaatcaagacaaactcttcaggcaggtcacatttgttaacagcaaaacagtgactgaggcatcagggcataaatataatccactggggaaaatatttcaagagtgcatagaaacagatatatcaatacagagattccataaatatgatgcttttaaaaagaacttaaaaccaaatattgacctaccgagttgttataagagcaattcaagaaaaaaacctgatcagagttttggaggtggaaaatcatctagccagagtgagcccaattctaatcttgagaagattcacaatggagtaataccttttgatgataatcagtgtggaaacgtttttagaaatacacaatcccttattcaatatcagaatgtggaaactaaagagaaaagctgtgtatgtgttacatgtggaaaagcctttgctaagaagtcacaactcattgtacatcaaagaattcatactggaaagaaaccatatgattgtggtgcatgcggaaaagccttcagtgagaagtttcatcttgttgtacatcagagaactcatactggggagaaaccttatgattgttctgaatgtggaaaagccttctctcagaaatcgtcccttattatacatcagagagttcacactggggaaaaaccctatgaatgtagtgaatgcgggaaagccttctcccagaaatcacccctcattatacatcagagaatacatactggggaaaaaccctatgaatgtagagagtgtgggaaggccttttcccagaagtcacagctgattatacaccacagagctcatactggagagaagccgtatgagtgtaccgaatgtgggaaagccttctgtgagaagtcccacctcattatacataaaagaattcacactggtgagaaaccctacaaatgtgctcaatgtgaggaagccttcagcaggaagacagaactcattacacatcagttagttcatactggggaaaaaccttatgaatgtactgaatgtggaaagacattctcccgcaagtcacagctcatcatacatcagagaacacatactggagaaaaaccctataaatgtagtgaatgtggcaaagccttctgccagaagtcacatctcattggacatcagagaattcacacaggagaaaaaccttatatatgtactgaatgtgggaaagccttctctcagaagtcccaccttccgggacaccagcgaattcatacaggagagaaaccttacatatgtgctgaatgtggaaaggccttttctcagaagtcagaccttgttttacatcagaggattcatactggggaaagaccctatcaatgtgctatatgtgggaaggccttcatccagaagtcacaactaactgtacaccagagaattcacacagtggtaaaatcataatgaactggccacagaaaagccttagtattagctcaagccttaataattactagaaacccaattaatttgataagcttggggacaacatcccaatagataaaaatttttaagggaatttgtttctagtttggtgatgcctaacttttccagcaaagatgatggaaaatagttatataaatgaagaacatttttaatatggcatgtaaagcttttaaagttatgaactcagtgatcagcacagcaagttaagcatacagaatattgtcaagttgcatattccttatactacaaaatgataatcagccattgtgaaactgctaatattagcttgtcataattatggccataaactaatttttctataaaagacgtggaagaaagcttaagtaaacaataaaataaaacctatacactattttaagaaggggcttgagcatgacccctaaagctacatgtaaagttcttgtacaaaaaatggaatgataggttgatcagattcagtaaagttgatctgtatgcattttcccatctcaagcatataagttgacctgcatctctggaaggaccttgagattgatgcattttgagcaggtctcccttttactcttcccaactgggaacttggagctgaaaaacattggcactgaggccagatggccttgggtttaatcctggctcagtgcctcacagattgtgtgactttaggcaaacatacttctcctagctgagtattttttatcagtaagtacaaatacaatgcagagctcattttcagttaatattagtactttttaaatctttactctctatcttgaagcattagatgttaagactaatgtgtaaaaaccacgtctgagcttgcttttccctctggacactctgcttttgattgcctatccctataagtggctcattttactgtcttctgatcctggtggccttatttttgctatgttaaggttgtgttttttaatacttggatttattttcatatacttacataaaccgtggtgattgcacataaagaccctgcctaatgtctcttcacttctttgtgatcctttccctgaagccccaactgtttgccctgaaaacttacaggggaaaactcttggtgtgagaagtaatgcctgtatagccttgagaactggaggcctctaagataacacctactatctgtcattccatccattcccccataagcatttttagatgagcacccttgctggaagtgacctgcaggagagcatacttggcaaggatgagaatacctgtgtgataaacacagcatctgcacatatttcctgcttgatttcctatccacttgatccccttcctgcttggctaaactgtctgttgtgaaaacatggggctcctctagttgagaacaactgtagagtagagggcacactggacagggatgtgggaactgagaattaaagatgccattcactggacagggatgtgggaactcaatgttaaagatatcactccccccacatcccaggtgatttatatattgttggggtgggaaaagagaaatccaaaagagcaaacccattcataaaatggatctgctaattttattgttgaataacagaaataaaaatactatgtagcatttgggtagctagcacatggctataaaactagtggatttttagctctatttatatggaactgaagctacagttgtgtggaactaagcttcccctctgttggtaaatggcagatacctagttttcatcaatagttacattgagcttactctga

SEQ ID NO: 299937 - DNA, 3084 bp, Homo sapiens
gcctcgggagcccggtgtggtgctcgcggacaggaagcaggagagtttgccaatagggatgtgacagcggttcccattaagcggtgatggtggttttgggacctgataatcgagctgggagtcagaggcgggatgtgtgcggtgaaggatgttttgatacccccatataaaataatctgtctgtcatgggagcccccacgtcctctgaaatagttcagctctgtctgcatgacttgtcctgggactgaggaaaatttaccagtcatctggccttttggaagagcaaaaaatgatgaagtcccaggggttagtatcattcaaggatgtggctgtggatttcacccaggaggagtggcagcaacttgacccttctcagaggaccctgtacagggatgtgatgctggagaactacagccacctggtctcaatggggtatccagtttccaaaccagatgtcatctccaagttggaacaaggagaagagccatggatcataaagggagacatatcaaattggatctatccagatgaatatcaggcagatgggagacaagacaggaagagtaaccttcacaactcccagtcatgtattttggggacagtttccttccatcataagatactgaaaggagtcacaagggatggttcattgtgctccattttaaaagtctgtcaaggtgatggtcagctgcagagatttctagagaatcaagacaaactcttcaggcaggtcacatttgttaacagcaaaacagtgactgaggcatcagggcataaatataatccactggggaaaatatttcaagagtgcatagaaacagatatatcaatacagagattccataaatatgatgcttttaaaaagaacttaaaaccaaatattgacctaccgagttgttataagagcaattcaagaaaaaaacctgatcagagttttggaggtggaaaatcatctagccagagtgagcccaattctaatcttgagaagattcacaatggagtaataccttttgatgataatcagtgtggaaacgtttttagaaatacacaatcccttattcaatatcagaatgtggaaactaaagagaaaagctgtgtatgtgttacatgtggaaaagcctttgctaagaagtcacaactcattgtacatcaaagaattcatactggaaagaaaccatatgattgtggtgcatgcggaaaagccttcagtgagaagtttcatcttgttgtacatcagagaactcatactggggagaaaccttatgattgttctgaatgtggaaaagccttctctcagaaatcgtcccttattatacatcagagagttcacactggggaaaaaccctatgaatgtagtgaatgcgggaaagccttctcccagaaatcacccctcattatacatcagagaatacatactggggaaaaaccctatgaatgtagagagtgtgggaaggccttttcccagaagtcacagctgattatacaccacagagctcatactggagagaagccgtatgagtgtaccgaatgtgggaaagccttctgtgagaagtcccacctcattatacataaaagaattcacactggtgagaaaccctacaaatgtgctcaatgtgaggaagccttcagcaggaagacagaactcattacacatcagttagttcatactggggaaaaaccttatgaatgtactgaatgtggaaagacattctcccgcaagtcacagctcatcatacatcagagaacacatactggagaaaaaccctataaatgtagtgaatgtggcaaagccttctgccagaagtcacatctcattggacatcagagaattcacacaggagaaaaaccttatatatgtactgaatgtgggaaagccttctctcagaagtcccaccttccgggacaccagcgaattcatacaggagagaaaccttacatatgtgctgaatgtggaaaggccttttctcagaagtcagaccttgttttacatcagaggattcatactggggaaagaccctatcaatgtgctatatgtgggaaggccttcatccagaagtcacaactaactgtacaccagagaattcacacagtggtaaaatcataatgaactggccacagaaaagccttagtattagctcaagccttaataattactagaaacccaattaatttgataagcttggggacaacatcccaatagataaaaatttttaagggaatttgtttctagtttggtgatgcctaacttttccagcaaagatgatggaaaatagttatataaatgaagaacatttttaatatggcatgtaaagcttttaaagttatgaactcagtgatcagcacagcaagttaagcatacagaatattgtcaagttgcatattccttatactacaaaatgataatcagccattgtgaaactgctaatattagcttgtcataattatggccataaactaatttttctataaaagacgtggaagaaagcttaagtaaacaataaaataaaacctatacactattttaagaaggggcttgagcatgacccctaaagctacatgtaaagttcttgtacaaaaaatggaatgataggttgatcagattcagtaaagttgatctgtatgcattttcccatctcaagcatataagttgacctgcatctctggaaggaccttgagattgatgcattttgagcaggtctcccttttactcttcccaactgggaacttggagctgaaaaacattggcactgaggccagatggccttgggtttaatcctggctcagtgcctcacagattgtgtgactttaggcaaacatacttctcctagctgagtattttttatcagtaagtacaaatacaatgcagagctcattttcagttaatattagtactttttaaatctttactctctatcttgaagcattagatgttaagactaatgtgtaaaaaccacgtctgagcttgcttttccctctggacactctgcttttgattgcctatccctataagggcaccaggatcagaagacagtaaaatgggccacttataggtcgacgcggccgcgaatttaatagtaggaggcg

SEQ ID NO: 299938 - DNA, 616 bp, Homo sapiens
atccaattataaaaccttggtcaacttctatgtgatcatattataggtacaagaggagtaaagaatgatccctcctccacatggtgcctgctgagacttctgtaaggctcaaacaaccttatcccacagggtagcccattagttacttgacttctgatgttagttgttgcaagattggtgaatgtgaaagctgcagtctgggtttggactatgaaaaacattctgatcaccagttttgctttttcagtcatctggccttttggaagagcaaaaaatgatgaagtcccaggggttagtatcattcaaggatgtggctgtggatttcacccaggaggagtggcagcaacttgacccttctcagaggaccctgtacagggatgtgatgctggagaactacagccacctggtctcaatggggtatccagtttccaaaccagatgtcatctccaagttggaacaaggagaagagccatggatcataaagggagacatatcaaattggatctatccagatgaatatcaggcagatgggagacaagggaagtgaaatatcaatttatgtttttttaattgattggtgcctgaggtttatgtttctatccttatcaaaatctcc

SEQ ID NO: 299939 - DNA, 459 bp, Homo sapiens
tccatttggtcattcccattcttactgccaaggagctccatcttcacttatatccttatatagctatccatgattattgcctcatgaaaatcttctataaatagaattgctgattcccaaggggaacagtaagttgttagtaaatcaactggaaacatatcttcacatctatccaattataaaaccttggtcaacttctatgtgatcatattataggtacaagaggagtaaagaatgatccctcctccacatggtgcctgctgagacttctgtaaggctcaaacaaccttatcccacagggtagcccattagttacttgacttctgatgttagttgttgcaagattggtgaatgtgaaagctgcagtctgggtttggactatgaaaaacattctgatcaccagttttgctttttcagtcatctggccttttggaagagcaaaaaatgatgaagtcccag

SEQ ID NO: 299940 - DNA, 377 bp, Homo sapiens
gttacttgatatttgattttctttctgtttgactttgtaaatttctgccaggtgcgccatttatatgatactggcgaaacaaaagatattcacctggaaatggagagcctggtgaattcccgaaccacccccaaattgactcgcaatgagtctgtagctcatcccagcatcatgaagcatttaccaacccagagctctccaatcctgccacttaggagtttttaacggagtttcattcagtagggatgattgcttaaatcactggccaactcatctccagccccctaccctccctggagattggaagccatcgaggagaccccagctgccagctatcttattaacatgcaaaatgaacccttatcacttagagatct

SEQ ID NO: 299941 - DNA, 4890 bp, Homo sapiens
ggggagcgacaggccccgggcgagcagacaacttaatggaggccccttccccctcagatcagaccaggagggcatcagtcaccaaatctgccacagccatcccacctccccctctggggagtgctgagagtgaggcagcatggaggagaggaagcatgagaccatgaacccagctcatgtcctctttgaccggtttgtccaggccaccacctgcaagggaaccctcaaggctttccaggagctctgtgaccacctggaactaaagccaaaggactaccgctccttctatcacaagctcaagtccaagcttaactactggaaagccaaagccctctgggcaaaattggacaaacggggcagtcacaaagactacaaaaagggaaaagcgtgcactatgtctcatcattggggctggcccctgtggtctccgtacagccatcgacttatccttactgggggccaaggtggttgttattgagaaacgagatgccttctcccgcaacaacgtcttgcatctctggccattcaccatacatgatctacgaggtctgggtgccaagaagttctatggcaagttctgtgctggagccatcgaccatatcagtatccgtcagctccaactaatacttttgaaagtagccttgatcctaggcattgaaatccacgtcaatgtggaattccaaggacttatacagcctcctgaggaccaagagaatgaacggataggctggcgggcactggtgcaccccaagactcatcctgtgtcagagtatgaatttgaagtgatcatcggtggggatggtcggaggaacaccttggaagggtttcgtcggaaagaattccgtggcaaactggccatcgccatcacggcaaattttatcaaccgaaatacaacagcagaagctaaagtggaagagatcagtggtgtggcttttatattcaaccaaaaatttttccaggaactgagggaagccacagcaggtattgacttggagaacatcgtttactacaaagatgacacacactatttcgttatgacagccaaaaagcagagtttgctggacaaaggagtgatactacatgactacgccgacacagagctcctgctttcccgagaaaacgtggaccaggaggctctgctcagctatgccagggaggcggcagacttctctacccagcagcagctgccgtctctggattttgccatcaatcactatgggcagcccgatgtggccatgtttgacttcacttgtatgtatgcctccgagaacgccgccttggtgcgggagcagaacggacaccagttactagtggctctggtcggggacagcctcctagagcctttctggccaatgggaacaggaatagcccggggctttctagctgctatggactctgcctggatggtccgaagttggtctctaggaacgagccctttggaagtgctggcagagagggaaagtatttacaggttgctgcctcagaccacccctgagaatgtgagtaagaacttcagccagtacagtatcgaccctgtcactcggtatcccaatatcaacgtcaacttcctccggccaagccaggtgcgccatttatatgatactggcgaaacaaaagatattcacctggaaatggagagcctggtgaattcccgaaccacccccaaattgactcgcaatgagtctgtagctcgttcaagcaaactgctgggttggtgccagaggcagacagatggctatgcaggggtaaacgtgacagatctcaccatgtcctggaaaagtggcttggccctttgtgcaattatccatagataccgccctgacctgatagattttgattctttggatgagcaaaatgtggagaagaataaccaactggcctttgacattgctgagaaggaattgggcatttctcccatcatgacaggcaaagaaatggcctccgtgggggagcctgataagctgtccatggtgatgtacctgactcagttctacgagatgtttaaggactccctcccctctagcgacaccttggacctaaatgccgaggagaaagcagtcctgatagccagcaccagatcccctatctccttcctaagcaaacttggccagaccatctctcggaagcgttctcccaaggataaaaaggaaaaggacttggatggtgctgggaagaggagaaagaccagtcaatcagaggaggaggaagctcctcggggccacagaggagaaagaccgaccctggtgagcactctgacagacaggaggatggacgttgccgttgggaaccagaacaaagtgaagtacatggcgacccagctgctggccaaatttgaagagaatgcgcccgcacagtccatcggcatacggagacagctgacacaagagcgtggggccagccagccgtcctgctgcctgcctgggcaggttcgccctgcccccaccccccggtggaaacagggctccatgaagaaggagttcccgcagaacctgggaggcagcgacacatgctacttctgccagaagcgggtctacgtgatggagaggctgagtgccgagggcaagttcttccaccggagctgcttcaagtgcgagtactgcgccaccaccctgcgcctctcggcctacgcctacgacatcgaggatggtaaattctactgtaagccacactactgctatcgactctctggctacgcacaaaggaagagaccggcagtggctcccctgtctggaaaggaggccaaaggacccctgcaggatggcgccaccacagatgcaaacggacgggccaacgccgtggccagctccactgagagaaccccaggttcaggcgtgaacggcctggaggagcccagcatcgccaagcgactgaggggcaccccagagcggatcgagctggagaactaccgcctgtccctgaggcaggctgaggcactgcaggaggtaccggaggagactcaggccgagcacaacctgagcagcgtgctggacacgggcgccgaggaggacgtcgccagcaggtcagcacgcagggctgcagggcgcccacccgccacacggccctaagagcctcctcacctctgtgtgtctcggtttcttctcagtgaagggaggcctcctgtctttcctgctgcccgcagtccattctccccagtcccttttaggttcttagcctcatcttctagtcagtgaggactcctccatcagactcaattcagagattcaggaagtatttattccttgaggacctgacatgtccccagctccaagtctgtcattgggaaggaaagtggcaggctctgcccccgggttattcacagattcagcagagggaaggacgggcacacggggagggactctgggtgattcagccaccagtgcaccgggccgtcttgagggaggcctagtccgtcccccaggcatctttttttctcctgtaggtaaagaaagggactgaaaatgtgtgccccaggggccgcatgcagcaccagtggatgcatgcttaggcagttccagagctgtaatcacatccagctgggtgacacctttggggatgtgcatgctataaccctaggactccctatatccactgccctgcaccccagggcttccagtatcagcgaaggcttcaaagtgttcagccgattacagatgatcaagagagccaagaatcaaaagggggtccggtgtcctgtggggcttcaggacagaaacacaggctgcaaacccgaggggcagaggcctcaagtggccttggagagcatttgaatcacacaccttgatttagccatgatgaagggaacatgtggggataaggagagcagagcagtttttttaaggtccaagaacgctttccagaaggtgtttgctgggccgagctgctttcagctgcacccgccacctcagccctcatgtcagacaccctctgcctagattcattcttgggctgcctcacagaccgctcctccgtgcatgccgggggcagcctctgccttggtgtctgcagttccaaagctgtcactgatggtgcatcctcatccagaactctgcttccctatccagagcacccatggaggccccactctccccactgtgcccagatgagggggagcccactctctctctccactgaccctgcagtgagggtgagagatgctgtgtgtcaaaacacatttataaacccttgagcagagctactggcttgaccttgggctgagtgtgggtcagcaccattttctccactgtaatttataaattgtgagaggcagtggggcagcaagttcatgtaatgtagcaaggacattccaggaaggctaacccctggcatttatggcaggtatgacaggagggcagcacagaaaacatgaaatcagtcagcatctatgcaatgcaatacatgcctcatcttactcagattgaagttaaaaaaagattttaaaactagcattcatgctgggcgcagtggctcatgcctgtaatcccagcactttgggaggccaaggtgggcacatcacttaaggtcaggagttcaagaccagcctggccaacataatgaaaccctgtctctactaaaaatacaaaaattagctgggcatggtggtgcacacctgtaatcccagctacttgggagggtaaggcatgagaattgcttgaacctgggaggcggaggttgcagcgagccgagatcatgccactgcaccactgcactccagcctgtgtgacagaatgagactccatctcaaaaaaaattaaaattaaaatcaaaaaataaaataaaggccaggcacggtggctcacacaggagaatcacttgaacctgggaggcggaggttgcagtgatctgagatcacaccagtacactccagcctgggagatggtgagactccgtctc

SEQ ID NO: 299942 - DNA, 4806 bp, Homo sapiens
ggggagcgacaggccccgggcgagcagacaacttaatggaggccccttccccctcagatcagaccaggagggcatcagtcaccaaatctgccacagccatcccacctccccctctggggagtgctgagagtgaggcagcatggaggagaggaagcatgagaccatgaacccagctcatgtcctctttgaccggtttgtccaggccaccacctgcaagggaaccctcaaggctttccaggagctctgtgaccacctggaactaaagccaaaggactaccgctccttctatcacaagctcaagtccaagcttaactactggaaagccaaagccctctgggcaaaattggacaaacggggcagtcacaaagactacaaaaagggaaaagcgtgcactatgtctcatcattggggctggcccctgtggtctccgtacagccatcgacttatccttactgggggccaaggtggttgttattgagaaacgagatgccttctcccgcaacaacgtcttgcatctctggccattcaccatacatgatctacgaggtctgggtgccaagaagttctatggcaagttctgtgctggagccatcgaccatatcagtatccgtcagctccaactaatacttttgaaagtagccttgatcctaggcattgaaatccacgtcaatgtggaattccaaggacttatacagcctcctgaggaccaagagaatgaacggataggctggcgggcactggtgcaccccaagactcatcctgtgtcagagtatgaatttgaagtgatcatcggtggggatggtcggaggaacaccttggaagggtttcgtcggaaagaattccgtggcaaactggccatcgccatcacggcaaattttatcaaccgaaatacaacagcagaagctaaagtggaagagatcagtggtgtggcttttatattcaaccaaaaatttttccaggaactgagggaagccacagcaggtattgacttggagaacatcgtttactacaaagatgacacacactatttcgttatgacagccaaaaagcagagtttgctggacaaaggagtgatactacatgactacgccgacacagagctcctgctttcccgagaaaacgtggaccaggaggctctgctcagctatgccagggaggcggcagacttctctacccagcagcagctgccgtctctggattttgccatcaatcactatgggcagcccgatgtggccatgtttgacttcacttgtatgtatgcctccgagaacgccgccttggtgcgggagcagaacggacaccagttactagtggctctggtcggggacagcctcctagagcctttctggccaatgggaacaggaatagcccggggctttctagctgctatggactctgcctggatggtccgaagttggtctctaggaacgagccctttggaagtgctggcagagagggaaagtatttacaggttgctgcctcagaccacccctgagaatgtgagtaagaacttcagccagtacagtatcgaccctgtcactcggtatcccaatatcaacgtcaacttcctccggccaagccaggtgcgccatttatatgatactggcgaaacaaaagatattcacctggaaatggagagcctggtgaattcccgaaccacccccaaattgactcgcaatgagtctgtagctcgttcaagcaaactgctgggttggtgccagaggcagacagatggctatgcaggggtaaacgtgacagatctcaccatgtcctggaaaagtggcttggccctttgtgcaattatccatagataccgccctgacctgatagattttgattctttggatgagcaaaatgtggagaagaataaccaactggcctttgacattgctgagaaggaattgggcatttctcccatcatgacaggcaaagaaatggcctccgtgggggagcctgataagctgtccatggtgatgtacctgactcagttctacgagatgtttaaggactccctcccctctagcgacaccttggacctaaatgccgaggagaaagcagtcctgatagccagcaccagatcccctatctccttcctaagcaaacttggccagaccatctctcggaagcgttctcccaaggataaaaaggaaaaggacttggatggtgctgggaagaggagaaagaccagtcaatcagaggaggaggaagctcctcggggccacagaggagaaagaccgaccctggtgagcactctgacagacaggaggatggacgttgccgttgggaaccagaacaaagtgaagtacatggcgacccagctgctggccaaatttgaagagaatgcgcccgcacagtccatcggcatacggagacagggctccatgaagaaggagttcccgcagaacctgggaggcagcgacacatgctacttctgccagaagcgggtctacgtgatggagaggctgagtgccgagggcaagttcttccaccggagctgcttcaagtgcgagtactgcgccaccaccctgcgcctctcggcctacgcctacgacatcgaggatggtaaattctactgtaagccacactactgctatcgactctctggctacgcacaaaggaagagaccggcagtggctcccctgtctggaaaggaggccaaaggacccctgcaggatggcgccaccacagatgcaaacggacgggccaacgccgtggccagctccactgagagaaccccaggttcaggcgtgaacggcctggaggagcccagcatcgccaagcgactgaggggcaccccagagcggatcgagctggagaactaccgcctgtccctgaggcaggctgaggcactgcaggaggtaccggaggagactcaggccgagcacaacctgagcagcgtgctggacacgggcgccgaggaggacgtcgccagcaggtcagcacgcagggctgcagggcgcccacccgccacacggccctaagagcctcctcacctctgtgtgtctcggtttcttctcagtgaagggaggcctcctgtctttcctgctgcccgcagtccattctccccagtcccttttaggttcttagcctcatcttctagtcagtgaggactcctccatcagactcaattcagagattcaggaagtatttattccttgaggacctgacatgtccccagctccaagtctgtcattgggaaggaaagtggcaggctctgcccccgggttattcacagattcagcagagggaaggacgggcacacggggagggactctgggtgattcagccaccagtgcaccgggccgtcttgagggaggcctagtccgtcccccaggcatctttttttctcctgtaggtaaagaaagggactgaaaatgtgtgccccaggggccgcatgcagcaccagtggatgcatgcttaggcagttccagagctgtaatcacatccagctgggtgacacctttggggatgtgcatgctataaccctaggactccctatatccactgccctgcaccccagggcttccagtatcagcgaaggcttcaaagtgttcagccgattacagatgatcaagagagccaagaatcaaaagggggtccggtgtcctgtggggcttcaggacagaaacacaggctgcaaacccgaggggcagaggcctcaagtggccttggagagcatttgaatcacacaccttgatttagccatgatgaagggaacatgtggggataaggagagcagagcagtttttttaaggtccaagaacgctttccagaaggtgtttgctgggccgagctgctttcagctgcacccgccacctcagccctcatgtcagacaccctctgcctagattcattcttgggctgcctcacagaccgctcctccgtgcatgccgggggcagcctctgccttggtgtctgcagttccaaagctgtcactgatggtgcatcctcatccagaactctgcttccctatccagagcacccatggaggccccactctccccactgtgcccagatgagggggagcccactctctctctccactgaccctgcagtgagggtgagagatgctgtgtgtcaaaacacatttataaacccttgagcagagctactggcttgaccttgggctgagtgtgggtcagcaccattttctccactgtaatttataaattgtgagaggcagtggggcagcaagttcatgtaatgtagcaaggacattccaggaaggctaacccctggcatttatggcaggtatgacaggagggcagcacagaaaacatgaaatcagtcagcatctatgcaatgcaatacatgcctcatcttactcagattgaagttaaaaaaagattttaaaactagcattcatgctgggcgcagtggctcatgcctgtaatcccagcactttgggaggccaaggtgggcacatcacttaaggtcaggagttcaagaccagcctggccaacataatgaaaccctgtctctactaaaaatacaaaaattagctgggcatggtggtgcacacctgtaatcccagctacttgggagggtaaggcatgagaattgcttgaacctgggaggcggaggttgcagcgagccgagatcatgccactgcaccactgcactccagcctgtgtgacagaatgagactccatctcaaaaaaaattaaaattaaaatcaaaaaataaaataaaggccaggcacggtggctcacacaggagaatcacttgaacctgggaggcggaggttgcagtgatctgagatcacaccagtacactccagcctgggagatggtgagactccgtctc

SEQ ID NO: 299943 - DNA, 3548 bp, Homo sapiens
agttacaacagctcctggattcgttaattttttgaacggacaccagttactagtggctctggtcggggacagcctcctagagcctttctggccaatgggaacaggaatagcccggggctttctagctgctatggactctgcctggatggtccgaagttggtctctaggaacgagccctttggaagtgctggcagagagggaaagtatttacaggttgctgcctcagaccacccctgagaatgtgagtaagaacttcagccagtacagtatcgaccctgtcactcggtatcccaatatcaacgtcaacttcctccggccaagccaggtgcgccatttatatgatactggcgaaacaaaagatattcacctggaaatggagagcctggtgaattcccgaaccacccccaaattgactcgcaatgagtctgtagctcgttcaagcaaactgctgggttggtgccagaggcagacagatggctatgcaggggtaaacgtgacagatctcaccatgtcctggaaaagtggcttggccctttgtgcaattatccatagataccgccctgacctgatagattttgattctttggatgagcaaaatgtggagaagaataaccaactggcctttgacattgctgagaaggaattgggcatttctcccatcatgacaggcaaagaaatggcctccgtgggggagcctgataagctgtccatggtgatgtacctgactcagttctacgagatgtttaaggactccctcccctctagcgacaccttggacctaaatgccgaggagaaagcagtcctgatagccagcaccagatcccctatctccttcctaagcaaacttggccagaccatctctcggaagcgttctcccaaggataaaaaggaaaaggacttggatggtgctgggaagaggagaaagaccagtcaatcagaggaggaggaagctcctcggggccacagaggagaaagaccgaccctggtgagcactctgacagacaggaggatggacgttgccgttgggaaccagaacaaagtgaagtacatggcgacccagctgctggccaaatttgaagagaatgcgcccgcacagtccatcggcatacggagacagggctccatgaagaaggagttcccgcagaacctgggaggcagcgacacatgctacttctgccagaagcgggtctacgtgatggagaggctgagtgccgagggcaagttcttccaccggagctgcttcaagtgcgagtactgcgccaccaccctgcgcctctcggcctacgcctacgacatcgaggatggtaaattctactgtaagccacactactgctatcgactctctggctacgcacaaaggaagagaccggcagtggctcccctgtctggaaaggaggccaaaggacccctgcaggatggcgccaccacagatgcaaacggacgggccaacgccgtggccagctccactgagagaaccccaggttcaggcgtgaacggcctggaggagcccagcatcgccaagcgactgaggggcaccccagagcggatcgagctggagaactaccgcctgtccctgaggcaggctgaggcactgcaggaggtaccggaggagactcaggccgagcacaacctgagcagcgtgctggacacgggcgccgaggaggacgtcgccagcaggtcagcacgcagggctgcagggcgcccacccgccacacggccctaagagcctcctcacctctgtgtgtctcggtttcttctcagtgaagggaggcctcctgtctttcctgctgcccgcagtccattctccccagtcccttttaggttcttagcctcatcttctagtcagtgaggactcctccatcagactcaattcagagattcaggaagtatttattccttgaggacctgacatgtccccagctccaagtctgtcattgggaaggaaagtggcaggctctgcccccgggttattcacagattcagcagagggaaggacgggcacacggggagggactctgggtgattcagccaccagtgcaccgggccgtcttgagggaggcctagtccgtcccccaggcatctttttttctcctgtaggtaaagaaagggactgaaaatgtgtgccccaggggccgcatgcagcaccagtggatgcatgcttaggcagttccagagctgtaatcacatccagctgggtgacacctttggggatgtgcatgctataaccctaggactccctatatccactgccctgcaccccagggcttccagtatcagcgaaggcttcaaagtgttcagccgattacagatgatcaagagagccaagaatcaaaagggggtccggtgtcctgtggggcttcaggacagaaacacaggctgcaaacccgaggggcagaggcctcaagtggccttggagagcatttgaatcacacaccttgatttagccatgatgaagggaacatgtggggataaggagagcagagcagtttttttaaggtccaagaacgctttccagaaggtgtttgctgggccgagctgctttcagctgcacccgccacctcagccctcatgtcagacaccctctgcctagattcattcttgggctgcctcacagaccgctcctccgtgcatgccgggggcagcctctgccttggtgtctgcagttccaaagctgtcactgatggtgcatcctcatccagaactctgcttccctatccagagcacccatggaggccccactctccccactgtgcccagatgagggggagcccactctctctctccactgaccctgcagtgagggtgagagatgctgtgtgtcaaaacacatttataaacccttgagcagagctactggcttgaccttgggctgagtgtgggtcagcaccattttctccactgtaatttataaattgtgagaggcagtggggcagcaagttcatgtaatgtagcaaggacattccaggaaggctaacccctggcatttatggcaggtatgacaggagggcagcacagaaaacatgaaatcagtcagcatctatgcaatgcaatacatgcctcatcttactcagattgaagttaaaaaaagattttaaaactagcattcatgctgggcgcagtggctcatgcctgtaatcccagcactttgggaggccaaggtgggcacatcacttaaggtcaggagttcaagaccagcctggccaacataatgaaaccctgtctctactaaaaatacaaaaattagctgggcatggtggtgcacacctgtaatcccagctacttgggagggtaaggcatgagaattgcttgaacctgggaggcggaggttgcagcgagccgagatcatgccactgcaccactgcactccagcctgtgtgacagaatgagactccatctcaaaaaaaattaaaattaaaatcaaaaaataaaataaaggccaggcacggtggctcacacaggagaatcacttgaacctgggaggcggaggttgcagtgatctgagatcacaccagtacactccagcctgggagatggtgagactccgtctc

SEQ ID NO: 299944 - DNA, 3677 bp, Homo sapiens
ttttctttaaaattgaagtaaatattgggatgcttgaaaaaataaaagagtaaatgtgtgaccttttgagttggaggcagcatctgtgggcgctcacggttttgtgcctgctctctctcctcggctcttacccggtcggttcctgtgggatcactgcaggtgggtgtggggagcaggggctgacgtaggactcaagaagactggtcaaggatgaggatttgtcaggcatgtcaggtgacttgctgcgctgtcagaacaatcatgaaacgagagggagatgttcatggtgctggtcccgattctgagtatattgttgtgttattgcagggaaagtatttacaggttgctgcctcagaccacccctgagaatgtgagtaagaacttcagccagtacagtatcgaccctgtcactcggtatcccaatatcaacgtcaacttcctccggccaagccaggtgcgccatttatatgatactggcgaaacaaaagatattcacctggaaatggagagcctggtgaattcccgaaccacccccaaattgactcgcaatgagtctgtagctcgttcaagcaaactgctgggttggtgccagaggcagacagatggctatgcaggggtaaacgtgacagatctcaccatgtcctggaaaagtggcttggccctttgtgcaattatccatagataccgccctgacctgatagattttgattctttggatgagcaaaatgtggagaagaataaccaactggcctttgacattgctgagaaggaattgggcatttctcccatcatgacaggcaaagaaatggcctccgtgggggagcctgataagctgtccatggtgatgtacctgactcagttctacgagatgtttaaggactccctcccctctagcgacaccttggacctaaatgccgaggagaaagcagtcctgatagccagcaccagatcccctatctccttcctaagcaaacttggccagaccatctctcggaagcgttctcccaaggataaaaaggaaaaggacttggatggtgctgggaagaggagaaagaccagtcaatcagaggaggaggaagctcctcggggccacagaggagaaagaccgaccctggtgagcactctgacagacaggaggatggacgttgccgttgggaaccagaacaaagtgaagtacatggcgacccagctgctggccaaatttgaagagaatgcgcccgcacagtccatcggcatacggagacagggctccatgaagaaggagttcccgcagaacctgggaggcagcgacacatgctacttctgccagaagcgggtctacgtgatggagaggctgagtgccgagggcaagttcttccaccggagctgcttcaagtgcgagtactgcgccaccaccctgcgcctctcggcctacgcctacgacatcgaggatggtaaattctactgtaagccacactactgctatcgactctctggctacgcacaaaggaagagaccggcagtggctcccctgtctggaaaggaggccaaaggacccctgcaggatggcgccaccacagatgcaaacggacgggccaacgccgtggccagctccactgagagaaccccaggttcaggcgtgaacggcctggaggagcccagcatcgccaagcgactgaggggcaccccagagcggatcgagctggagaactaccgcctgtccctgaggcaggctgaggcactgcaggaggtaccggaggagactcaggccgagcacaacctgagcagcgtgctggacacgggcgccgaggaggacgtcgccagcaggtcagcacgcagggctgcagggcgcccacccgccacacggccctaagagcctcctcacctctgtgtgtctcggtttcttctcagtgaagggaggcctcctgtctttcctgctgcccgcagtccattctccccagtcccttttaggttcttagcctcatcttctagtcagtgaggactcctccatcagactcaattcagagattcaggaagtatttattccttgaggacctgacatgtccccagctccaagtctgtcattgggaaggaaagtggcaggctctgcccccgggttattcacagattcagcagagggaaggacgggcacacggggagggactctgggtgattcagccaccagtgcaccgggccgtcttgagggaggcctagtccgtcccccaggcatctttttttctcctgtaggtaaagaaagggactgaaaatgtgtgccccaggggccgcatgcagcaccagtggatgcatgcttaggcagttccagagctgtaatcacatccagctgggtgacacctttggggatgtgcatgctataaccctaggactccctatatccactgccctgcaccccagggcttccagtatcagcgaaggcttcaaagtgttcagccgattacagatgatcaagagagccaagaatcaaaagggggtccggtgtcctgtggggcttcaggacagaaacacaggctgcaaacccgaggggcagaggcctcaagtggccttggagagcatttgaatcacacaccttgatttagccatgatgaagggaacatgtggggataaggagagcagagcagtttttttaaggtccaagaacgctttccagaaggtgtttgctgggccgagctgctttcagctgcacccgccacctcagccctcatgtcagacaccctctgcctagattcattcttgggctgcctcacagaccgctcctccgtgcatgccgggggcagcctctgccttggtgtctgcagttccaaagctgtcactgatggtgcatcctcatccagaactctgcttccctatccagagcacccatggaggccccactctccccactgtgcccagatgagggggagcccactctctctctccactgaccctgcagtgagggtgagagatgctgtgtgtcaaaacacatttataaacccttgagcagagctactggcttgaccttgggctgagtgtgggtcagcaccattttctccactgtaatttataaattgtgagaggcagtggggcagcaagttcatgtaatgtagcaaggacattccaggaaggctaacccctggcatttatggcaggtatgacaggagggcagcacagaaaacatgaaatcagtcagcatctatgcaatgcaatacatgcctcatcttactcagattgaagttaaaaaaagattttaaaactagcattcatgctgggcgcagtggctcatgcctgtaatcccagcactttgggaggccaaggtgggcacatcacttaaggtcaggagttcaagaccagcctggccaacataatgaaaccctgtctctactaaaaatacaaaaattagctgggcatggtggtgcacacctgtaatcccagctacttgggagggtaaggcatgagaattgcttgaacctgggaggcggaggttgcagcgagccgagatcatgccactgcaccactgcactccagcctgtgtgacagaatgagactccatctcaaaaaaaattaaaattaaaatcaaaaaataaaataaaggccaggcacggtggctcacacaggagaatcacttgaacctgggaggcggaggttgcagtgatctgagatcacaccagtacactccagcctgggagatggtgagactccgtctc

SEQ ID NO: 299945 - DNA, 3314 bp, Homo sapiens
ggggagcgacaggccccgggcgagcagacaacttaatggaggccccttccccctcagatcagaccaggagggcatcagtcaccaaatctgccacagccatcccacctccccctctggggagtgctgagagtgaggcagcatggaggagaggaagcatgagaccatgaacccagctcatgtcctctttgaccggtttgtccaggccaccacctgcaagggaaccctcaaggctttccaggagctctgtgaccacctggaactaaagccaaaggactaccgctccttctatcacaagctcaagtccaagcttaactactggaaagccaaagccctctgggcaaaattggacaaacggggcagtcacaaagactacaaaaagggaaaagcgtgcactatgtctcatcattggggctggcccctgtggtctccgtacagccatcgacttatccttactgggggccaaggtggttgttattgagaaacgagatgccttctcccgcaacaacgtcttgcatctctggccattcaccatacatgatctacgaggtctgggtgccaagaagttctatggcaagttctgtgctggagccatcgaccatatcagtatccgtcagctccaactaatacttttgaaagtagccttgatcctaggcattgaaatccacgtcaatgtggaattccaaggacttatacagcctcctgaggaccaagagaatgaacggataggctggcgggcactggtgcaccccaagactcatcctgtgtcagagtatgaatttgaagtgatcatcggtggggatggtcggaggaacaccttggaagggtttcgtcggaaagaattccgtggcaaactggccatcgccatcacggcaaattttatcaaccgaaatacaacagcagaagctaaagtggaagagatcagtggtgtggcttttatattcaaccaaaaatttttccaggaactgagggaagccacagcaggtattgacttggagaacatcgtttactacaaagatgacacacactatttcgttatgacagccaaaaagcagagtttgctggacaaaggagtgatactacatgactacgccgacacagagctcctgctttcccgagaaaacgtggaccaggaggctctgctcagctatgccagggaggcggcagacttctctacccagcagcagctgccgtctctggattttgccatcaatcactatgggcagcccgatgtggccatgtttgacttcacttgtatgtatgcctccgagaacgccgccttggtgcgggagcagaacggacaccagttactagtggctctggtcggggacagcctcctagagcctttctggccaatgggaacaggaatagcccggggctttctagctgctatggactctgcctggatggtccgaagttggtctctaggaacgagccctttggaagtgctggcagagagggaaagtatttacaggttgctgcctcagaccacccctgagaatgtgagtaagaacttcagccagtacagtatcgaccctgtcactcggtatcccaatatcaacgtcaacttcctccggccaagccaggtgcgccatttatatgatactggcgaaacaaaagatattcacctggaaatggagagcctggtgaattcccgaaccacccccaaattgactcgcaatgagtctgtagctcgttcaagcaaactgctgggttggtgccagaggcagacagatggctatgcaggggtaaacgtgacagatctcaccatgtcctggaaaagtggcttggccctttgtgcaattatccatagataccgccctgacctgatagattttgattctttggatgagcaaaatgtggagaagaataaccaactggcctttgacattgctgagaaggaattgggcatttctcccatcatgacaggcaaagaaatggcctccgtgggggagcctgataagctgtccatggtgatgtacctgactcagttctacgagatgtttaaggactccctcccctctagcgacaccttggacctaaatgccgaggagaaagcagtcctgatagccagcaccagatcccctatctccttcctaagcaaacttggccagaccatctctcggaagcgttctcccaaggataaaaaggaaaaggacttggatggtgctgggaagaggagaaagaccagtcaatcagaggaggaggaagctcctcggggccacagaggagaaagaccgaccctggtgagcactctgacagacaggaggatggacgttgccgttgggaaccagaacaaagtgaagtacatggcgacccagctgctggccaaatttgaagagaatgcgcccgcacagtccatcggcatacggagacagggctccatgaagaaggagttcccgcagaacctgggaggcagcgacacatgctacttctgccagaagcgggtctacgtgatggagaggctgagtgccgagggcaagttcttccaccggagctgcttcaagtgcgagtactgcgccaccaccctgcgcctctcggcctacgcctacgacatcgaggatggtaaattctactgtaagccacactactgctatcgactctctggctacgcacaaaggaagagaccggcagtggctcccctgtctggaaaggaggccaaaggacccctgcaggatggcgccaccacagatgcaaacggacgggccaacgccgtggccagctccactgagagaaccccaggtagcctcacttccttgtttggctgggtggcgcgtcactccctcggcctctgtgacaaggccaagggcatgagccagcacctccaaagcaacatttcttcattcgggcaacaagtggcccaaaaccctctggactcctttttcatgtgccagctgcttgcgttcggagtcccctttctctatggcctgtcggaggtgctggtgcaaatcagaggggagttccactggcaggctgtggcccagtgatggggccgtccggtgggcggcagagccgtgaagtgctgtccctcagccccgtcccgcaccatcacacctgagggcggcccaggtcctgtgtaggtagacaggagctcgcaggcgctcagacactgctcccatcacccgccctggtgaggccaaggccactcggccttcatgcagtttgcttccaagctcctctgacggcctggagctgtgttgattaagccccgtggtcttgttttgggttcaccttcacttaagattctgcgtcctgttccctgtcactgtgtgtggatgagctgtggctgctctcctgtctgccctgcaccgtgatgg

SEQ ID NO: 299946 - DNA, 3039 bp, Homo sapiens
  misc_feature (3039)..(3039): n is a, c, g, or t
ggggagcgacaggccccgggcgagcagacaacttaatggaggccccttccccctcagatcagaccaggagggcatcagtcaccaaatctgccacagccatcccacctccccctctggggagtgctgagagtgaggcagcatggaggagaggaagcatgagaccatgaacccagctcatgtcctctttgaccggtttgtccaggccaccacctgcaagggaaccctcaaggctttccaggagctctgtgaccacctggaactaaagccaaaggactaccgctccttctatcacaagctcaagtccaagcttaactactggaaagccaaagccctctgggcaaaattggacaaacggggcagtcacaaagactacaaaaagggaaaagcgtgcactatgtctcatcattggggctggcccctgtggtctccgtacagccatcgacttatccttactgggggccaaggtggttgttattgagaaacgagatgccttctcccgcaacaacgtcttgcatctctggccattcaccatacatgatctacgaggtctgggtgccaagaagttctatggcaagttctgtgctggagccatcgaccatatcagtatccgtcagctccaactaatacttttgaaagtagccttgatcctaggcattgaaatccacgtcaatgtggaattccaaggacttatacagcctcctgaggaccaagagaatgaacggataggctggcgggcactggtgcaccccaagactcatcctgtgtcagagtatgaatttgaagtgatcatcggtggggatggtcggaggaacaccttggaagggtttcgtcggaaagaattccgtggcaaactggccatcgccatcacggcaaattttatcaaccgaaatacaacagcagaagctaaagtggaagagatcagtggtgtggcttttatattcaaccaaaaatttttccaggaactgagggaagccacagcaggtattgacttggagaacatcgtttactacaaagatgacacacactatttcgttatgacagccaaaaagcagagtttgctggacaaaggagtgatactacatgactacgccgacacagagctcctgctttcccgagaaaacgtggaccaggaggctctgctcagctatgccagggaggcggcagacttctctacccagcagcagctgccgtctctggattttgccatcaatcactatgggcagcccgatgtggccatgtttgacttcacttgtatgtatgcctccgagaacgccgccttggtgcgggagcagaacggacaccagttactagtggctctggtcggggacagcctcctagagcctttctggccaatgggaacaggaatagcccggggctttctagctgctatggactctgcctggatggtccgaagttggtctctaggaacgagccctttggaagtgctggcagagagggaaagtatttacaggttgctgcctcagaccacccctgagaatgtgagtaagaacttcagccagtacagtatcgaccctgtcactcggtatcccaatatcaacgtcaacttcctccggccaagccaggtgcgccatttatatgatactggcgaaacaaaagatattcacctggaaatggagagcctggtgaattcccgaaccacccccaaattgactcgcaatgagtctgtagctcgttcaagcaaactgctgggttggtgccagaggcagacagatggctatgcaggggtaaacgtgacagatctcaccatgtcctggaaaagtggcttggccctttgtgcaattatccatagataccgccctgacctgatagattttgattctttggatgagcaaaatgtggagaagaataaccaactggcctttgacattgctgagaaggaattgggcatttctcccatcatgacaggcaaagaaatggcctccgtgggggagcctgataagctgtccatggtgatgtacctgactcagttctacgagatgtttaaggactccctcccctctagcgacaccttggacctaaatgccgaggagaaagcagtcctgatagccagcaccagatcccctatctccttcctaagcaaacttggccagaccatctctcggaagcgttctcccaaggataaaaaggaaaaggacttggatggtgctgggaagaggagaaagaccagtcaatcagaggaggaggaagctcctcggggccacagaggagaaagaccgaccctggtgagcactctgacagacaggaggatggacgttgccgttgggaaccagaacaaagtgaagtacatggcgacccagctgctggccaaatttgaagagaatgcgcccgcacagtccatcggcatacggagacagggctccatgaagaaggagttcccgcagaacctgggaggcagcgacacatgctacttctgccagaagcgggtctacgtgatggagaggctgagtgccgagggcaagttcttccaccggagctgcttcaagtgcgagtactgcgccaccaccctgcgcctctcggcctacgcctacgacatcgaggatggtaaattctactgtaagccacactactgctatcgactctctggctacgcacaaaggaagagaccggcagtggctcccctgtctggaaaggaggccaaaggacccctgcaggatggcgccaccacagatgcaaacggacgggccaacgccgtggccagctccactgagagaaccccaggttcaggcgtgaacggcctggaggagcccagcatcgccaagcgactgaggggcaccccagagcggatcgagctggagaactaccgcctgtccctgaggcaggctgaggcactgcaggaggtaccggaggagactcaggccgagcacaacctgagcagcgtgctggacacgggcgccgaggaggacgtcgccagcagtttgcttgaacgagctacagactcattgcgagtcaatttggggggggttcgggaattcaccaggctctccatttccaggtgaatatcgcttgtttccccagtgn

SEQ ID NO: 299947 - DNA, 1686 bp, Homo sapiens
ggggagcgacaggccccgggcgagcagacaacttaatggaggccccttccccctcagatcagaccaggagggcatcagtcaccaaatctgccacagccatcccacctccccctctggggagtgctgagagtgaggcagcatggaggagaggaagcatgagaccatgaacccagctcatgtcctctttgaccggtttgtccaggccaccacctgcaagggaaccctcaaggctttccaggagctctgtgaccacctggaactaaagccaaaggactaccgctccttctatcacaagctcaagtccaagcttaactactggaaagccaaagccctctgggcaaaattggacaaacggggcagtcacaaagactacaaaaagggaaaagcgtgcactatgtctcatcattggggctggcccctgtggtctccgtacagccatcgacttatccttactgggggccaaggtggttgttattgagaaacgagatgccttctcccgcaacaacgtcttgcatctctggccattcaccatacatgatctacgaggtctgggtgccaagaagttctatggcaagttctgtgctggagccatcgaccatatcagtatccgtcagctccaactaatacttttgaaagtagccttgatcctaggcattgaaatccacgtcaatgtggaattccaaggacttatacagcctcctgaggaccaagagaatgaacggataggctggcgggcactggtgcaccccaagactcatcctgtgtcagagtatgaatttgaagtgatcatcggtggggatggtcggaggaacaccttggaagggtttcgtcggaaagaattccgtggcaaactggccatcgccatcacggcaaattttatcaaccgaaatacaacagcagaagctaaagtggaagagatcagtggtgtggcttttatattcaaccaaaaatttttccaggaactgagggaagccacagcaggtattgacttggagaacatcgtttactacaaagatgacacacactatttcgttatgacagccaaaaagcagagtttgctggacaaaggagtgatactacatgactacgccgacacagagctcctgctttcccgagaaaacgtggaccaggaggctctgctcagctatgccagggaggcggcagacttctctacccagcagcagctgccgtctctggattttgccatcaatcactatgggcagcccgatgtggccatgtttgacttcacttgtatgtatgcctccgagaacgccgccttggtgcgggagcagaacggacaccagttactagtggctctggtcggggacagcctcctagagcctttctggccaatgggaacaggaatagcccggggctttctagctgctatggactctgcctggatggtccgaagttggtctctaggaacgagccctttggaagtgctggcagagagggaaagtatttacaggttgctgcctcagaccacccctgagaatgtgagtaagaacttcagccagtacagtatcgaccctgtcactcggtatcccaatatcaacgtcaacttcctccggccaagccaggtaagaccttcttgtcagtatttacatctgggcccatctgcagtgagccatcatcatggcatcattgcattccagcctgggcaacagagcaagacctcgtctc

SEQ ID NO: 299948 - DNA, 874 bp, Homo sapiens
ggggagcgacaggccccgggcgagcagacaacttaatggaggccccttccccctcagatcagaccaggagggcatcagtcaccaaatctgccacagccatcccacctccccctctggggagtgctgagagtgaggcagcatggaggagaggaagcatgagaccatgaacccagctcatgtcctctttgaccggtttgtccaggccaccacctgcaagggaaccctcaaggctttccaggagctctgtgaccacctggaactaaagccaaaggactaccgctccttctatcacaagctcaagtccaagcttaactactggaaagccaaagccctctgggcaaaattggacaaacggggcagtcacaaagactacaaaaagggaaaagcgtgcactacaggtattgacttggagaacatcgtttactacaaagatgacacacactatttcgttatgacagccaaaaagcagagtttgctggacaaaggagtgatactacatgtgagccacggatttccttcaaaactctttcttattgaagtggttaatatcaccaagagaaagaattgtctgatgggtttttcctgcaagggaatgaaaatgagcactgaatgcatcttctggtaacccctgatgttttccagtttagcgtgaacaactcttaactatggctaatttcaaatgtaaataaaaacggggggagaatagtgtaatgaaccctcacgtacctaccgtccagctttcacagttctcaacacgtggccagtgttctgtcagtaatatttctgtgcactccttcttcaccactggattcttgcaaagcaggtttcagacagcatttcatgcataaatactcagtttaattttaaaaaaaaa

SEQ ID NO: 299949 - DNA, 312 bp, Homo sapiens
agatggctatgcaggggtaaacgtgacagatctcaccatgtcctggaaaagtggcttggccctttgtgcaattatccatagataccgccctgacctgatgtaagttgtgatcaaactttgtgtttttttatactcctcaaggatctcagaccactctgctatcaagtaacattttgtcctttttcctagaatgaggtacatagtaagatactttctctagaaggcagtgattttgatttcactatatttgaaactctgtatgtcatgtattatatagctcaacccaggaatgatttttatttttgttttttt

SEQ ID NO: 299950 - DNA, 428 bp, Homo sapiens
ctccatccctaccctcctctttctctggagacaggactacgccgacacagagctcctgctttcccgagaaaacgtggaccaggaggctctgctcagctatgccagggaggcggcagacttctctacccagcagcagctgccgtctctggattttgccatcaatcactatgggcagcccgatgtggccatgtttgacttcacttgtatgtatgcctccgagaacgccgccttggtgcgggagcagaacggacaccagttactagtggctctggtcggggacagcctcctagaggtgagtgctaagcatggcagcactctgtggtaggggcaggaataattaggagtgaatctgggcatcctgggtcttggaatgagcgtctgcagtgttgtacagcacaggtaaactccctgcaggagtcacaccagga

SEQ ID NO: 299951 - DNA, 561 bp, Homo sapiens
acaggtcccagtactctttatacggccctacctccaggcttgctgtctctgtgtggacacgggaaccttgagagctgagccagtccaccagcccccatgccaggtcctgagtgcacttctgtgagggaggggcatggggggagcctcctgtcacagcgccgggttctttggggttggcattgaccaggaggaagctcctcggggccacagaggagaaagaccgaccctggtgagcactctgacagacaggaggatggacgttgccgttgggaaccagaacaaagtgaagtacatggcgacccagctgctggccaaatttgaagagaatgcgcccgcacagtccatcggcatacggagacaggtaaacccaacccgtgccctgcccacaccgatttggtcagatcacacaagaaggggggatcttttccatccattgagatgggctgtgtcacagaccccagcgttcgtgggctggcatctggctttccctcgcctgactgcagcaaagaagagccctgtatatgcttgcttcaggctctgagggttgctccgtcctcagtg

SEQ ID NO: 299952 - DNA, 169 bp, Homo sapiens
tgggaaggaaactacttgggcttttaaagaaaaggaaacctgaagagcaagacggtgagcaagtacagcaaagaactgagggtgtgtgtgtacacatacacataaagcaaaagtgcaagagatgtgttacgttctcagtctcgagcctcaaaaaagtacctctaggtag

SEQ ID NO: 299953 - DNA, 1424 bp, Homo sapiens
agcgggtaccgcgcctgcgtgctgcagtagcgcctggtggcggtggcagtttgcccgcgggtgtgtgaagggagacagtgtggaggccacagggtactcgccacgatgagcagcaccttagctaagatcgcggagatagaagcagagatggctcggactcaaaagaacaaggccacagcacaccacttagggctgcttaaggctcgtcttgctaagcttcgtcgagaactcattactccaaagggtggtggtggtggaggtccaggagaaggttttgatgtggccaagacaggtgatgctcgaattggatttgttggttttccatctgtggggaagtcaacactgcttagtaacctggcaggggtatattctgaggtggcagcctatgaattcactactctgaccactgtgcctggtgtcatcagatacaaaggtgccaagatccagctcctggatctcccaggtatcattgaaggtgccaaggatgggaaaggtagaggtcgtcaagtcattgcagtggcccgaacctgtaacttgatcttgattgttctggatgtcctgaaacctttgggacataagaagataattgaaaatgagctggaaggctttggcattcgcttgaacagcaaaccccccaacattggctttaagaagaaggacaagggaggcattaatctcacagccacttgcccccagagtgagctggatgctgaaactgtgaagagcattctggctgaatacaagattcataatgccgatgtgactctacgtagtgatgctacagctgatgacctcattgatgtggtggaaggaaacagagtttatatcccctgtatctatgtgttaaataagattgaccaaatctccattgaggaattggatatcatctataaggtgcctcactgtgtacccatctctgcccatcaccgctggaattttgatgacctattggaaaagatctgggactatctgaaactagtgagaatttacaccaaacccaaaggccagttaccagattacacatccccagtggtgcttccttactccaggaccacagtggaggatttctgcatgaagattcacaaaaatcttatcaaagaatttaaatatgctctggtctggggtctctctgtgaaacacaatcctcagaaagtgggtaaagaccatacgttggaggatgaggatgtcattcaaattgtgaagaagtgaaacctttcccttttcccatctgccggacgaaccacaacagcgttccccatgatcaagcaccctaccccagttctttctggttttggcagtcactggatcaggatccaggggagggagatggaggcacccaaactggaacttcatttgtcttaccttggtgtcaccttgtatgtcgaactgcataaaagatctggtaggctggtcagctacatgca

SEQ ID NO: 299954 - DNA, 1932 bp, Homo sapiens
  misc_feature (1603)..(1603): n is a, c, g, or t
agcgggtaccgcgcctgcgtgctgcagtagcgcctggtggcggtggcagtttgcccgcgggtgtgtgaagggagacagtgtggaggccacagggtactcgccacgatgagcagcaccttagctaagatcgcggagatagaagcagagatggctcggactcaaaagaacaaggccacagcacaccacttagggctgcttaaggctcgtcttgctaagcttcgtcgagaactcattactccaaagggtggtggtggtggaggtccaggagaaggttttgatgtggccaagacaggtgatgctcgaattggatttgttggttttccatctgtggggaagtcaacactgcttagtaacctggcaggggtatattctgaggtggcagcctatgaattcactactctgaccactgtgcctggtgtcatcagatacaaaggtgccaagatccagctcctggatctcccaggtatcattgaaggtgccaaggatgggaaaggtagaggtcgtcaagtcattgcagtggcccgaacctgtaacttgatcttgattgttctggatgtcctgaaacctttgggacataagaagataattgaaaatgagctggaaggctttggcattcgcttgaacagcaaaccccccaacattggctttaagaagaaggacaagggaggcattaatctcacagccacttgcccccagagtgagctggatgctgaaactgtgaagagcattctggctgaatacaagattcataatgccgatgtgactctacgtagtgatgctacagctgatgacctcattgatgtggtggaaggaaacagagtttatatcccctgtatctatgtgttaaataagattgaccaaatctccattgaggaattggatatcatctataaggtgcctcactgtgtacccatctctgcccatcaccgctggaattttgatgacctattggaaaagatctgggactatctgaaactagtgagaatttacaccaaacccaaaggccagttaccagattacacatccccagtggtgcttccttactccaggaccacagtggaggatttctgcatgaagattcacaaaaatcttatcaaagaatttaaatatgctctggtctggggtctctctgtgaaacacaatcctcagaaagtgggtaaagaccatacgttggaggatgaggatgtcattcaaattgtgaagaagtgaaacctttcccttttcccatctgccggacgaaccacaacagcgttccccatgatcaagcaccctaccccagttctttctggttttggcagtcactggatcaggatccaggggagggagatggaggcacccaaactggaacttcatttgtcttaccttggtgtcaccttgtatgtcgaactgcataaaagatctggtaggctggtcagctacatgcagctcatgtgtcattgtcagaatttgttttgggatgggctgaatgaggaagggtatatacggtgaagcagctacagaagggatccttgggaacttcatcttgagtgtgaaatggataaaaatatgacatgctgcatcttacttgatgtttacttatgggaaccccttccaaactagatanggctttcagtcctttcaagtagtctttcccacatgatactggagagaggaaggactttatgtaagttaactgatcactccccgcaaggctaacctattttgggagatcatgtaattaagtactccgaccaggcagatcagggtttgaaattgcaggtccacctctagttagctgtggagccctgaacaaattacccaacctttatgagcctcagtttcctcatgtaacatggggatagtaatagcacttactttctgcggtggtgattgttagtaatggagggagatggtacttatatgtcaaatactgtgctaagcaatttgtaagta

SEQ ID NO: 299955 - DNA, 710 bp, Homo sapiens
agcgggtaccgcgcctgcgtgctgcagtagcgcctggtggcggtggcagtttgcccgcgggtgtgtgaagggagacagtgtggaggccacagggtactcgccacgatgagcagcaccttagctaagatcgcggagatagaagcagagatggctcggactcaaaagaacaaggccacagcacaccacttagggctgcttaaggctcgtcttgctaagcttcgtcgagaactcattactccaaagggtggtggtggtggaggtccaggagaaggttttgatgtggccaagacaggtgatgctcgaattggatttgttggttttccatctgtggggaagtcaacactgcttagtaacctggcaggggtatattctgaggtggcagcctatgaattcactactctgaccactgtgcctggtgtcatcagatacaaaggtgccaagatccagctcctggatctcccaggtatcattgaaggtgccaaggatgggaaaggtagaggtcgtcaagtcattgcagtggcccgaacctgtaacttgatcttgattgttctggatgtcctgaaacctttgggacataagaagataattgaaaatgaggacagggaggcataatttacagccctaaacgagatttgcatggtgccagctggcttgacttttgcctaagctgctctggttggcttcccagagtgggatacagggccccaaag

SEQ ID NO: 299956 - DNA, 752 bp, Homo sapiens
taatttttgtatttttagtggagacggggtttcaccatgttggccaggcttttcttgaacgcctgatctcaggtgatccacacccttcggcctcccaaagtggtgggattacaggcatgagcccctgcgcccggcccagagtatttctctataacaaatccatgctttcttttaattttaaactaggctctttatactaaacatgttttttgtctttgactttctgcaataagaggaaccacacaacttccagaagtctttaccggcttttatgttaaggcttcagtgtctcatgctgctagggaagataaagcttttgtaggtctatggttcttaagggtatgatactaaatctgagcagaagggtggcatccaggcaaatagggcagaagctaggttattatttacactgactgttctttttcccttccatgcagtgctctggtctggggtctctctgtgaaacacaatcctcagaaagtgggtaaagaccatacgttggaggatgaggatgtcattcaaattgtgaagaagtgaaacctttcccttttcccatctgccggacgaaccacaacagcgttccccatgatcaagcaccctaccccagttctttctggttttggcagtcactggatcaggatccaggggagggagatggaggcacccaaactggaacttcatttgtcttaccttggtgtcaccttgtatgtcgaactgcataaaagatctggtaggctggtcagctacatgca

SEQ ID NO: 299957 - DNA, 1624 bp, Homo sapiens
  misc_feature (1295)..(1295): n is a, c, g, or t
agcgggtaccgcgcctgcgtgctgcagtagcgcctggtggcggtggcagtttgcccgcgggtgtgtgaagggagacagtgtggaggccacagggtactcgccacgatgagcagcaccttagctaagatcgcggagatagaagcagagatggctcggactcaaaagaacaaggccacagcacaccacttagggctgcttaaggctcgtcttgctaagcttcgtcgagaactcattactccaaagggtggtggtggtggaggtccaggagaaggttttgatgtggccaagacaggtgatgctcgaattggatttgttggttttccatctgtggggaagtcaacactgcttagtaacctggcaggggtatattctgaggtggcagcctatgaattcactactctgaccactgtgcctggtgtcatcagatacaaaggtgccaagatccagctcctggatctcccaggtatcattgaaggtgccaaggatgggaaaggtagaggtcgtcaagtcattgcagtggcccgaacctgtaacttgatcttgattgttctggatgtcctgaaacctttgggacataagaagataattgaaaatgagctggaaggctttggcattcgcttgaacagcaaaccccccaacattggctttaagaagaaggacaagggaggcattaatctcacagccacttgcccccagagtgagctggatgctgaaactgtgaagagcattctggctgaatacaagattcataatgccgatgtgactctacgtagtgatgctacagctgatgacctcattgatgtggtggaaggaaacagagtttatatcccctgtatctatgtgttaaataagattgaccaaatctccattgaggaattggatatcatctataaggtgcctcactgtgtacccatctctgcccatcaccgctggaattttgatgacctattggaaaagatctgggactatctgaaactagtgagaatttacaccaaacccaaaggccagttaccagattacacatccccccaaactggaacttcatttgtcttaccttggtgtcaccttgtatgtcgaactgcataaaagatctggtaggctggtcagctacatgcagctcatgtgtcattgtcagaatttgttttgggatgggctgaatgaggaagggtatatacggtgaagcagctacagaagggatccttgggaacttcatcttgagtgtgaaatggataaaaatatgacatgctgcatcttacttgatgtttacttatgggaaccccttccaaactagatanggctttcagtcctttcaagtagtctttcccacatgatactggagagaggaaggactttatgtaagttaactgatcactccccgcaaggctaacctattttgggagatcatgtaattaagtactccgaccaggcagatcagggtttgaaattgcaggtccacctctagttagctgtggagccctgaacaaattacccaacctttatgagcctcagtttcctcatgtaacatggggatagtaatagcacttactttctgcggtggtgattgttagtaatggagggagatggtacttatatgtcaaatactgtgctaagcaatttgtaagta

SEQ ID NO: 299958 - DNA, 1116 bp, Homo sapiens
agcgggtaccgcgcctgcgtgctgcagtagcgcctggtggcggtggcagtttgcccgcgggtgtgtgaagggagacagtgtggaggccacagggtactcgccacgatgagcagcaccttagctaagatcgcggagatagaagcagagatggctcggactcaaaagaacaaggccacagcacaccacttagggctgcttaaggctcgtcttgctaagcttcgtcgagaactcattactccaaagggtggtggtggtggaggtccaggagaaggttttgatgtggccaagacaggtgatgctcgaattggatttgttggttttccatctgtggggaagtcaacactgcttagtaacctggcaggggtatattctgaggtggcagcctatgaattcactactctgaccactgtgcctggtgtcatcagatacaaaggtgccaagatccagctcctggatctcccaggtatcattgaaggtgccaaggatgggaaaggtagaggtcgtcaagtcattgcagtggcccgaacctgtaacttgatcttgattgttctggatgtcctgaaacctttgggacataagaagataattgaaaatgagctggaaggctttggcattcgcttgaacagcaaaccccccaacattggctttaagaagaaggacaagggaggcattaatctcacagccacttgcccccagagtgagctggatgctgaaactgtgaagagcattctggctgaatacaagattcataatgccgatgtgactctacgtagtgatgctacagctgatgacctcattgatgtggtggaaggaaacagagtttatatcccctgtatctatgtgttaaataagattgaccaaatctccattgaggaattggatatcatctataaggtgcctcactgtgtacccatctctgcccatcaccgctggaattttgatgacctattggaaaagatctgggactatctgaaactagtgagaatttacaccaaacccaaaggccagttaccagattacacatccccccaaactggaacttcatttgtcttaccttggtgtcaccttgtatgtcgaactgcataaaagatctggtaggctggtcagctacatgca

SEQ ID NO: 299959 - DNA, 1075 bp, Homo sapiens
agcgggtaccgcgcctgcgtgctgcagtagcgcctggtggcggtggcagtttgcccgcgggtgtgtgaagggagacagtgtggaggccacagggtactcgccacgatgagcagcaccttagctaagatcgcggagatagaagcagagatggctcggactcaaaagaacaaggccacagcacaccacttagggctgcttaaggctcgtcttgctaagcttcgtcgagaactcattactccaaagggtggtggtggtggaggtccaggagaaggttttgatgtggccaagacaggtgatgctcgaattggatttgttggttttccatctgtggggaagtcaacactgcttagtaacctggcaggggtatattctgaggtggcagcctatgaattcactactctgaccactgtgcctggtgtcatcagatacaaaggtgccaagatccagctcctggatctcccaggtatcattgaaggtgccaaggatgggaaaggtagaggtcgtcaagtcattgcagtggcccgaacctgtaacttgatcttgattgttctggatgtcctgaaacctttgggacataagaagataattgaaaatgagctggaaggctttggcattcgcttgaacagcaaaccccccaacattggctttaagaagaaggacaagggaggcattaatctcacagccacttgcccccagagtgagctggatgctgaaactgtgaagagcattctggctgaatacaagattcataatgccgatgtgactctacgtagtgatgctacagctgatgacctcattgatgtggtggaaggaaacagagtttatatcccctgtatctatgtgttaaataagattgaccaaatctccattgaggaattggatatcatctataaggtgcctcactgtgtacccatctctgcccatcaccgctggaattttgatgacctattggaaaagatctgggactatctgaaactagtgagaatcccaaactggaacttcatttgtcttaccttggtgtcaccttgtatgtcgaactgcataaaagatctggtaggctggtcagctacatgca

SEQ ID NO: 299960 - DNA, 1430 bp, Homo sapiens
ctaggtacgatccgtttggtgtgcgggcccactatgtgaagtgaccacatgggtcatatcgctgatctgacctgtaggagaatccctgaggtctatagaatagctgcatgagtagtaacgtcagcacgattgagaatcgagagctccggaggaacaccgacccgtgctgaacacttccggatgatgatcggacgtcttgcttggctcctatcagacaaggacattctactccaaacgtgcgagtgatgcgaagagttgagcagcgccacgcaggaaggttttgatgtggccaagacaggtgatgctcgaattggatttgttggttttccatctgtggggaagtcaacactgcttagtaacctggcaggggtatattctgaggtggcagcctatgaattcactactctgaccactgtgcctggtgtcatcagatacaaaggtgccaagatccagctcctggatctcccaggtatcattgaaggtgccaaggatgggaaaggtagaggtcgtcaagtcattgcagtggcccgaacctgtaacttgatcttgattgttctggatgtcctgaaacctttgggacataagaagataattgaaaatgagctggaaggctttggcattcgcttgaacagcaaaccccccaacattggctttaagaagaaggacaagggaggcattaatctcacagccacttgcccccagagtgagctggatgctgaaactgtgaagagcattctggctgaatacaagattcataatgccgatgtgactctacgtagtgatgctacagctgatgacctcattgatgtggtggaaggaaacagagtttatatcccctgtatctatgtgttaaataagattgaccaaatctccattgaggaattggatatcatctataaggtgcctcactgtgtacccatctctgcccatcaccgctggaattttgatgacctattggaaaagatctgggactatctgaaactagtgagaatttacaccaaacccaaaggccagttaccagattacacatccccagtggtgcttccttactccaggaccacagtggaggatttctgcatgaagattcacaaaaatcttatcaaagaatttaaatatgctctggtctggggtctctctgtgaaacacaatcctcagaaagtgggtaaagaccatacgttggaggatgaggatgtcattcaaattgtgaagaagtgaaacctttcccttttcccatctgccggacgaaccacaacagcgttccccatgatcaagcaccctaccccagttctttctggttttggcagtcactggatcaggatccaggggagggagatggaggcacccaaactggaacttcatttgtcttaccttggtgtcaccttgtatgtcgaactgcataaaagatctggtaggctggtcagctacatgca

SEQ ID NO: 299961 - DNA, 1516 bp, Homo sapiens
agcgggtaccgcgcctgcgtgctgcagtagcgcctggtggcggtggcagtttgcccgcgggtgtgtgaagggagacagtgtggaggccacagggtactcgccacgatgagcagcaccttagctaagatcgcggagatagaagcagagatggctcggactcaaaagaacaaggccacagcacaccacttagggctgcttaaggctcgtcttgctaagcttcgtcgagaactcattactccaaagggtggtggtggtggaggtccaggagaaggttttgatgtggccaagacaggtgatgctcgaattggatttgttggttttccatctgtggggaagtcaacactgcttagtaacctggcaggggtatattctgaggtggcagcctatgaattcactactctgaccactgtgcctggtgtcatcagatacaaaggtgccaagatccagctcctggatctcccaggtatcattgaaggtgccaaggatgggaaaggtagaggtcgtcaagtcattgcagtggcccgaacctgtaacttgatcttgattgttctggatgtcctgaaacctttgggacataagaagataattgaaaatgagctggaaggctttggcattcgcttgaacagcaaaccccccaacattggctttaagaagaaggacaagggaggcattaatctcacagccactaaacggagatttgccatgttgcccaggctggtcttgaacttttggcctcaagctgtctcctgcttcggtctcccaaagtgttgggattacagtgcccccagagtgagctggatgctgaaactgtgaagagcattctggctgaatacaagattcataatgccgatgtgactctacgtagtgatgctacagctgatgacctcattgatgtggtggaaggaaacagagtttatatcccctgtatctatgtgttaaataagattgaccaaatctccattgaggaattggatatcatctataaggtgcctcactgtgtacccatctctgcccatcaccgctggaattttgatgacctattggaaaagatctgggactatctgaaactagtgagaatttacaccaaacccaaaggccagttaccagattacacatccccagtggtgcttccttactccaggaccacagtggaggatttctgcatgaagattcacaaaaatcttatcaaagaatttaaatatgctctggtctggggtctctctgtgaaacacaatcctcagaaagtgggtaaagaccatacgttggaggatgaggatgtcattcaaattgtgaagaagtgaaacctttcccttttcccatctgccggacgaaccacaacagcgttccccatgatcaagcaccctaccccagttctttctggttttggcagtcactggatcaggatccaggggagggagatggaggcacccaaactggaacttcatttgtcttaccttggtgtcaccttgtatgtcgaactgcataaaagatctggtaggctggtcagctacatgca

SEQ ID NO: 299962 - DNA, 1340 bp, Homo sapiens
agcgggtaccgcgcctgcgtgctgcagtagcgcctggtggcggtggcagtttgcccgcgggtgtgtgaagggagacagtgtggaggccacagggtactcgccacgatgagcagcaccttagctaagatcgcggagatagaagcagagatggctcggactcaaaagaacaaggccacagcacaccacttagggctgcttaaggctcgtcttgctaagcttcgtcgagaactcattactccaaagggtggtggtggtggaggtccaggagaagctcctggatctcccaggtatcattgaaggtgccaaggatgggaaaggtagaggtcgtcaagtcattgcagtggcccgaacctgtaacttgatcttgattgttctggatgtcctgaaacctttgggacataagaagataattgaaaatgagctggaaggctttggcattcgcttgaacagcaaaccccccaacattggctttaagaagaaggacaagggaggcattaatctcacagccactaaacggagatttgccatgttgcccaggctggtcttgaacttttggcctcaagctgtctcctgcttcggtctcccaaagtgttgggattacagtgcccccagagtgagctggatgctgaaactgtgaagagcattctggctgaatacaagattcataatgccgatgtgactctacgtagtgatgctacagctgatgacctcattgatgtggtggaaggaaacagagtttatatcccctgtatctatgtgttaaataagattgaccaaatctccattgaggaattggatatcatctataaggtgcctcactgtgtacccatctctgcccatcaccgctggaattttgatgacctattggaaaagatctgggactatctgaaactagtgagaatttacaccaaacccaaaggccagttaccagattacacatccccagtggtgcttccttactccaggaccacagtggaggatttctgcatgaagattcacaaaaatcttatcaaagaatttaaatatgctctggtctggggtctctctgtgaaacacaatcctcagaaagtgggtaaagaccatacgttggaggatgaggatgtcattcaaattgtgaagaagtgaaacctttcccttttcccatctgccggacgaaccacaacagcgttccccatgatcaagcaccctaccccagttctttctggttttggcagtcactggatcaggatccaggggagggagatggaggcacccaaactggaacttcatttgtcttaccttggtgtcaccttgtatgtcgaactgcataaaagatctggtaggctggtcagctacatgca

SEQ ID NO: 299963 - DNA, 1236 bp, Homo sapiens
agcgggtaccgcgcctgcgtgctgcagtagcgcctggtggcggtggcagtttgcccgcgggtgtgtgaagggagacagtgtggaggccacagggtactcgccacgatgagcagcaccttagctaagatcgcggagatagaagcagagatggctcggactcaaaagaacaaggccacagcacaccacttagggctgcttaaggctcgtcttgctaagcttcgtcgagaactcattactccaaagggtggtggtggtggaggtccaggagaaggttttgatgtggccaagacaggtgatgctcgaattggatttgttggttttccatctgtggggaagtcaacactgcttagtaacctggcaggggtatattctgaggtggcagcctatgaattcactactctgaccactgtgcctggtgtcatcagatacaaaggtgccaagatccagctcctggatctcccaggtatcattgaaggtgccaaggatgggaaaggtagaggtcgtcaagtcattgcagtggcccgaacctgtaacttgatcttgattgttctggatgtcctgaaacctttgggacataagaagataattgaaaatgagtgatgacctcattgatgtggtggaaggaaacagagtttatatcccctgtatctatgtgttaaataagattgaccaaatctccattgaggaattggatatcatctataaggtgcctcactgtgtacccatctctgcccatcaccgctggaattttgatgacctattggaaaagatctgggactatctgaaactagtgagaatttacaccaaacccaaaggccagttaccagattacacatccccagtggtgcttccttactccaggaccacagtggaggatttctgcatgaagattcacaaaaatcttatcaaagaatttaaatatgctctggtctggggtctctctgtgaaacacaatcctcagaaagtgggtaaagaccatacgttggaggatgaggatgtcattcaaattgtgaagaagtgaaacctttcccttttcccatctgccggacgaaccacaacagcgttccccatgatcaagcaccctaccccagttctttctggttttggcagtcactggatcaggatccaggggagggagatggaggcacccaaactggaacttcatttgtcttaccttggtgtcaccttgtatgtcgaactgcataaaagatctggtaggctggtcagctacatgca

SEQ ID NO: 299964 - DNA, 1287 bp, Homo sapiens
ggttgacagcgctctccccccctacccgaaccatggaatctgccacaggggaggaaaagcccccacttccaagcccctgctttttttcttaaaaggactttaaaaggaaatttgtttgtattttttataccaatttataattttggacaaattgttagggtccacccattttaatgatctcggatgacccaacccgccttcggagcgttctctgtcctacttctgactttacttgtggtgtgaccctgttccattataatctccaaggagaaaaaaaaccttgtaaaaaagccaaatgaccacaggaaaaccatcttattccgagcattcccgtaacttttttgtgtatgtacttagctgtgactataagtagttggtttgtatgagatggttaaaaaggcccaagataaaaggtttctttttttttccctttttgtctatgaagttgctgtttattttttttggcccgtttgatgtatgtgtgaaaccatgttgtcccacaataaacaggaattttattttctgagttgttttaaaaaaaaaaaaaaagggcggccgctcgcgatctagaactagtcctgtgaagagcattctggctgaatacaagattcataatgccgatgtgactctacgtagtgatgctacagctgatgacctcattgatgtggtggaaggaaacagagtttatatcccctgtatctatgtgttaaataagattgaccaaatctccattgaggaattggatatcatctataaggtgcctcactgtgtacccatctctgcccatcaccgctggaattttgatgacctattggaaaagatctgggactatctgaaactagtgagaatttacaccaaacccaaaggccagttaccagattacacatccccagtggtgcttccttactccaggaccacagtggaggatttctgcatgaagattcacaaaaatcttatcaaagaatttaaatatgctctggtctggggtctctctgtgaaacacaatcctcagaaagtgggtaaagaccatacgttggaggatgaggatgtcattcaaattgtgaagaagtgaaacctttcccttttcccatctgccggacgaaccacaacagcgttccccatgatcaagcaccctaccccagttctttctggttttggcagtcactggatcaggatccaggggagggagatggaggcacccaaactggaacttcatttgtcttaccttggtgtcaccttgtatgtcgaactgcataaaagatctggtaggctggtcagctacatgca

SEQ ID NO: 299965 - DNA, 897 bp, Homo sapiens
gagggccagctgggattagaatcagtctgagcacttcaaagcttgtgttctttccactgcagtatgctttcctagcagttagctttgtggctggtactagggcctgacttctgttacttttcaacccatagttcactttttctttttcttttttctttttctggctgatctgctacttacagtccctcttgggagcgccagttgggtctgggtgagggtgtgctgttcaacagtctgacagttctgtcaacaactccagactaataccctgtttttcttcactttctgtagagtttatatcccctgtatctatgtgttaaataagattgaccaaatctccattgaggaattggatatcatctataaggtgcctcactgtgtacccatctctgcccatcaccgctggaattttgatgacctattggaaaagatctgggactatctgaaactagtgagaatttacaccaaacccaaaggccagttaccagattacacatccccagtggtgcttccttactccaggaccacagtggaggatttctgcatgaagattcacaaaaatcttatcaaagaatttaaatatgctctggtctggggtctctctgtgaaacacaatcctcagaaagtgggtaaagaccatacgttggaggatgaggatgtcattcaaattgtgaagaagtgaaacctttcccttttcccatctgccggacgaaccacaacagcgttccccatgatcaagcaccctaccccagttctttctggttttggcagtcactggatcaggatccaggggagggagatggaggcacccaaactggaacttcatttgtcttaccttggtgtcaccttgtatgtcgaactgcataaaagatctggtaggctggtcagctacatgca

SEQ ID NO: 299966 - DNA, 829 bp, Homo sapiens
  misc_feature (729)..(729): n is a, c, g, or t
gtagagacaaaggaaacacagagacatagacatggatctgggaaatacaccttttgctactcgttcagttttagcaaggaggtttcttgcatggctaagcaaaacttaaacttcctctgagaattacaggaattacaggacctgacaaagctatgaagattaaaacctataggaagaaaatctgaaccagaaacagtatggcagaattgggatctgactcacagagggaagaacttataattcttcacaggtcacatagaagcatgagaatttgggttcaagcaagtaaattctaaatcagaatccatacataaagtgtttgcaatgtccagttatatctccatgatattttctttgtggaagttgattgttcttccttacaataaattgcttgaattgtctgtctattcatttagctatttcttttcttgtctttgcgatatttttttttgtaagtaaaaaattttcagactaaacagaacaagaaacatatccaaggaatatcacatttttcggcacctgttgcccttcggaaacggtgtttatgaagacgatttcgtttaggcgcctcggggccccgttcggtaagtgaacactgtgggcccaagcgcgagtctgccgaaggaaaacacctgggggctctagcagaattagcggcgcgggattctccctccactattaaaatagcccgcgcggttcggggacaaacccgaagctgtctcctgtacnacaactctccagaacggagtgctcggaagaggagtccatccaccgggagcctacttgacgcggggaagcccaccaggagcacctcgaatatcaaatacgt

SEQ ID NO: 299967 - DNA, 719 bp, Homo sapiens
  misc_feature (400)..(400): n is a, c, g, or t
gtagagacaaaggaaacacagagacatagacatggatctgggaaatacaccttttgctactcgttcagttttagcaaggaggtttcttgcatggctaagcaaaacttaaacttcctctgagaattacaggaattacaggacctgacaaagctatgaagattaaaacctataggaagaaaatctgaaccagaaacagtatggcagaattgggatctgactcacagagggaagaacttataattcttcacaggtcacatagaagcatgagaatttgggttcaagcaagtaaattctaaatcagaatccatacataaagtgtttgcaatgtccagttatatctccatgatattttctttgtggaagttgattgttcttccttacaataaattgcttgaattgncaaaaaaaaaaaaaaaaaaaaaaaaatttggggggggctggggccggaaaaagagcttgtaacaccactccggttggggcgcggagcggggggcccacaagagagtaaaagagagacgatggggcgccaagcagctggtccccaaagagaagactccgtcggcacggagcatcgggcgcggggctttcccaccacaataaaaacacgcggggggaaaccgagcgtctttggggacactcccagaagggggtcaggagggccaaaggggcgctacaaacgggagccaaggggaaccaaaaaatacaggaggcgagggggc

SEQ ID NO: 299968 - DNA, 649 bp, Homo sapiens
  misc_feature (477)..(477): n is a, c, g, or t
  misc_feature (506)..(506): n is a, c, g, or t
gtagagacaaaggaaacacagagacatagacatggatctgggaaatacaccttttgctactcgttcagttttagcaaggaggtttcttgcatggctaagcaaaacttaaacttcctctgagaattacaggaattacaggacctgacaaagctatgaagattaaaacctataggaagaaaatctgaaccagaaacagtatggcagaattgggatctgactcacagagggaagaacttataattcttcacaggtcacatagaagcatgagaatttgggttcaagcaagtaaattctaaatcagaatccatacataaagtgtttgcaatgtccagttatatctccatgatattttctttgtggaagttgattgttcttccttacaataaattgcttgaattgtctgtctattcatttagctatttcttttcttgtctttgcgatatttttttttgtaagtaaaaaattttcagactaaancaaaaaaaaaaaaaaaaactcgagtgccnggctgcctatttttatacactttttttaaaataaaaaaaaggctgacattttattttcaggttggcacagtgttaaagcacagggctaatggctttggtgtcctggaacctgagggacggggggttggttcagccacgttcct

SEQ ID NO: 299969 - DNA, 974 bp, Homo sapiens
gtagagacaaaggaaacacagagacatagacatggatctgggaaatacaccttttgctactcgttcagttttagcaaggaggtttcttgcatggctaagcaaaacttaaacttcctctgagaattacaggaattacaggacctgacaaagctatgaagattaaaacctataggaagaaaatctgaaccagaaacagtatggcagaattgggatctgactcacagagggaagaacttataattcttcacaggtcacatagaagcatgagaatttgggttcaagcaaacgcctaaatacctgacgtgtgacagcaaatgcctgttcccatggagctgctgcttctgagaaagcttgaaacagacaaagaataaggtagaaatgacctcctcactagagatgaaaagaagctgtcctggtgaggaaattggatcccagcttttgccgctaagattcttctcttctgcctctggttttctttattgttcacccccagaagcaatcgctctctcacaaggcaacacacgcaatagagtgaacagtgattctacagtctgattctggaaaaggcgaccacagtggaaagagtgatccacacaagtatagggcctcctgattaaaacactaagatttcatctcacgctgtgcctttatactgttgagatactaaagaggacactaaagatcaaagtgctactttacaacattttgaagaaaacaactgctacctgtgtattagtttgtgcagatgtgttacacagcttagctgtgtctgtaccagtttattagaatcaaagtatttttaaagtacctaaggccaggcacagtggctcacacctgtaatcccagcactttgggaggctgaggcaagtggatcacttgagatcaggaattcaagaccagcctggccaacatggtgaaaccccatctctactaaaaatacaaaaattagccaggcatggtgtcacatgcctgta

SEQ ID NO: 299970 - DNA, 939 bp, Homo sapiens
gtagagacaaaggaaacacagagacatagacatggatctgggaaatacaccttttgctactcgttcagttttagcaaggaggtttcttgcatggctaagcaaaacttaaacttcctctgagaattacaggaattacaggacctgacaaagctatgaagattaaaacctataggaagaaaatctgaaccagaaacagtatggcagaattgggatctgactcacagagggaagaacttataattcttcacagacgcctaaatacctgacgtgtgacagcaaatgcctgttcccatggagctgctgcttctgagaaagcttgaaacagacaaagaataaggtagaaatgacctcctcactagagatgaaaagaagctgtcctggtgaggaaattggatcccagcttttgccgctaagattcttctcttctgcctctggttttctttattgttcacccccagaagcaatcgctctctcacaaggcaacacacgcaatagagtgaacagtgattctacagtctgattctggaaaaggcgaccacagtggaaagagtgatccacacaagtatagggcctcctgattaaaacactaagatttcatctcacgctgtgcctttatactgttgagatactaaagaggacactaaagatcaaagtgctactttacaacattttgaagaaaacaactgctacctgtgtattagtttgtgcagatgtgttacacagcttagctgtgtctgtaccagtttattagaatcaaagtatttttaaagtacctaaggccaggcacagtggctcacacctgtaatcccagcactttgggaggctgaggcaagtggatcacttgagatcaggaattcaagaccagcctggccaacatggtgaaaccccatctctactaaaaatacaaaaattagccaggcatggtgtcacatgcctgta

SEQ ID NO: 299971 - DNA, 7377 bp, Homo sapiens
ggggtaaagcggagcggctgcagcctgctgttgagtgagaaaacaaaattatcttcctttccaaatccaaaaagatgaaaacgactgagatactttcaaaagacaaccaagtgagcagcacagactaatgagtagaatcaataagaacgtggttttggcccttttaacgctgacaagttctgcatttctgctgtttcagttgtactactacaagcactatttatcaacaaagaatggagctggtttgtcaaaatccaaaggaagccgaattggatttgatagcacacagtggcgtgcagttaaaaaatttattatgttaacatccaaccaaaatgtaccagtgtttcttattgatcctttgatactggaattgattaataagaactttgaacaagtcaaaaatacttctcatggctctacttcacaatgcaagtttttctgtgttccaagagactttactgcatttgcactgcagtatcacctatggaagaatgaggaaggctggtttcggatagctgagaatatgggatttcagtgcctaaagattgagagtaaagatccccggctagacgggatagactcactctctggaactgaaatccccctgcactatatctgcaaactggccactcatgcgatccacttggtagtctttcatgagaggagtggcaactacctctggcacggccacttgagacttaaagaacacattgacaggaaatttgttcccttccaaaagttacagtttggtcgttatccaggagcttttgacaggccagagttacagcaagttactgttgatggactggaagttctcattccaaaggatccaatgcactttgtagaagaagtaccacactctaggtttattgagtgtaggtataaagaagctcgagcattctttcagcagtaccttgatgataacactgtggaagctgtggcctttcggaagagtgcaaaggaattactgcaactagcagcgaaaacattaaacaaattgggagtaccattctggctgagcagtggaacttgtctaggatggtatcgacaatgcaacattattccttatagcaaagatgttgacctaggaatttttatacaagattacaaatctgatattattttagcatttcaggatgcaggacttccgctcaaacacaaatttgggaaggtagaagacagcttggaactatccttccagggaaaagatgatgtaaaacttgatgtttttttcttctatgaagaaactgatcacatgtggaatggaggcactcaggccaaaacaggaaaaaaattcaaatacctgtttccgaagtttacactgtgctggactgagtttgtagacatgaaggtccatgtaccctgtgaaaccctcgaatacattgaagccaactatggtaagacctggaagattcctgtaaagacgtgggactggaagcgctctcctcccaatgtgcaacccaatggaatctggcctatttctgagtgggatgaggttatccagttatattgagatagtaggttgaaatgggagaatttctcttttggaaaaaaaggtagataactgtttaaaaaatacatgtctatttgtcaaacataagtgggaaccaaagaaaaaatgtgacaagtttgaagacacagaaagagtcatctgatgtaattctctcacttagtactgaggaattttcatgtgccacatacaatgctaggttacagtggagaagccaagatgaatgagacaaatacctacttcttttattcctccttttggtaaacaactcaattttcctttgagggaaccctcccccaccctttgaagagttcaagttctgtacaggtttttaaaacgtgaagtaatgtttgaactggaagatgagctcaccaggcaaagctaaggaaggatatactagttgaaaagaataacccactcctcttctgggcatttaagctggtatgttagtgctacttttaagattgtggagtctgagttaatattcaagtgatcagactttgagtgacatcaagaaaagatgatatcaggttcatttttcaactaatcttatgtggaattgaattagagaacaaggcattattcttttagggaaggtgagagcttatttgtatcagagcttattacttgtcaggataagtaaatttctgtacatgtactgttttcatatgtgaagtgagaagaaactttatgcttgtttaatgcttaaatttccatccattgtgagaatattttcactgacctctgatggcacttgttgacaaatcattcaagtgagaccatgttactagacatgatcttgaaagaggccatgatttcacaaaactcatttttattttattctcagacagtctgttaggtaaaaatatgagaaattcatgtacattttatattttctgaatttataatctgtgcactcccaattttaatgacactaaaatattaatagaattttttaaatatactctaatttttaaaacatactctttattatcttcatttatcaattacagcttcgtatctctaatttatggtctatataccaatttaaatggcatgtaaacctgcctgtttcttctcctcttctaatatatcagatctccaaaatggaagctaaatggtggacttgacaactattcaccctacctcagatcatagagtttgtaaagtttgtgtccctccccagtttttcagtctgttgaatgtcgatggggcaagaactcagacttctactttaccaagtaccacacactctggaatgctttagtttccttttcccctcaagatgtctgagtcagctaggatgctgtttaccccatctctctcttatatcacttgaatgatatattgtaagtgagaggtaaaggaaaatgtaggcacaataagcactgctatttttctctttgtctaggaaaggaagctgaatcttatatcttatctatgctatttaggactactttctggagcttggcagattttcctctgacaccagagaacaatagtagtctcaagaatggaaacctgaatgtctgagggaatgggctggtagactttttcgaaaacaaattagagaaagtaacttacaaccacccattccggatttgtaaagcaacatgaaaacctttgataaatgataaccaacagtcttctgtcctaatttgcattctcaatgcagaattattgggtctttcataaacaacatgagtggtttctggagacatttaagattgtcagcaaacttgtcccaaaatggcacatcatcataatccattttctctttgctagaaaatcagcccatagagtgcattcccaaattctaaatagctgaccctaaattcatttttcatgcttaaaaataatagaacaaataataatactatttttgggcaaaatccaccctacttgatgaggaccatttgcttgtgctcagtatttagaaatgcatacactccacatttctccccatttccaattgggactcccattctttgccaggagatcttacccatcccttttcagattaatcttttatcctttcctgaagtacaaagtcttaagagtgtctgaaatccaagacatcttggcccaattgacacaggttctatattcttccctacatagaccactggctgctgaaatacttttcttgtcttctggtttcacaggcttcagctcatgggttccaccctaacttggggaaacaaaagccttctctagaatctgaaggccaggcttacctctgattctgattcatccatacttcatcttatgtattttaacagttgggttctgtggagtgtccagagaccttgggttaggtatatccatcttcagtacctcattggatcacttttctttcatcacttgagtattctagcagtcattctcctaatctgaccactttcaggtttagtttacctggcttacctggggaagttgacaacttgttggtagttaggcacccatgaatgtctccagagacatcctgagaggcaagattcctcttaattgataaccaggacaaccaggtagtcacccagtcctctctaagcagggagcacttgtccttctctcctctgctgcagctactgatatctggcccctggaataaaaccatagttcctaaaattgagcatccctaagagtagctgcttggtgggacagctgatttctttgattccctagctgcaaaacctgaaattgaccactaggtgacagaatgtttgccagtatccccacaaaacaagttaaaacttaagtgaaaatcattctgcttttgaatcttaaaagctagaaaaaccataatgtaatattctttttaaaccctcttattttataactaaataaataatcacagaaaagaatgatctgaacaagaacagctgaggctaaaacccaagactgccgtgactcctagtccaatgtctgtttcgcatcacaacacagtatctttaacagtgcttgagatgcttaacagagaaggcatccagtgcttcattgaggctaagtctcagggtgtttctgccgcttagtatctttttgttcagattgagaacctaaggcgacagagaggtcaaggggaagtattttctagttcagaattcagaattcttaggcaaccttcatacctttatctggaaaatgccttctctccagacaataagacagttcacatctggagacatcagcctttggtacctaattctctaagctcaagatgcatcccattgccactttaccattctatttcccaagggaaccatcagcaccaacctgctaaatgcctgtatttgaagtctctccccttcctgaagtgaccttttatgaggctctttccttcctaagggacctttccctggtagtagtggtctcattcacaaaaaagaataatagatgtaactggagtcactttgcagttttcaagattttttttttatctgcttggctggaaaggagactagagtatctagtttttagtatttaaactacttttaattatttatattgatactctctgataaatgcaggtagttaagaatagattgtactcattcctttttgagtttgtgacctcaaaccattgtttttattcttacacgactacagtacttcaaatggcacatagataggcaggatattacataggtaagcaggaatttatacattgggtaccagagctaaatctggaaaacacatttggaatgagcttccacacttcagtctaaaatctcacccaaacttatggctacatatttttctaagtttcccccctagtttcactttctggaaagtgaacagttttttaaatcctaaatgttataaatccttaggagaaatattccctcaaaacctagtcaagaaagtgccacattcccaccttctaacaggtaattattagttgtaatagctttaatgcatggaaaaacttcagttactgaccagtcaagagaatttctcaagaaaaatcccagcaacgttccctctttcctccttgtcttccactatcattaagacctgggctagatcacctctaacatctcactcagggaaggcaatgtgttgccataaaaagaccacaagcttttgagttaggcctgaatttgaatttcagcttaatcatgtgggatttatggtgggggccctttcagtctcaatttccacattagtgaactggggaaatgatacatacttctaagggtttttagggggattaaatgaagtatacagttcttagcctcaggcctaggattaagtaagtactcaagaaatgtgcaattttctagttccatgtttcttttctaatcttcaaatggaattatagaaaccatgggtcagaacatattcctttactcaaaagattgcatgactgaatttgcttaagaaaaaaaaaattgtatcaagtcattaatacaattatacattaattatattacattaatacaatatatggtttgtgaattcagagacattaccagtttgcctccttctctcaatagaacttgtattttcattttcttggttaagcagttgtctcctaatattatcccatatgctacctagtttgctggtcccaagcagtttactgtacttcactagatttggtacctgctctcccctggacttctttttcaatattctagcctttcctagatgtaaatctttacctccttgttagtgaaattagatataagccatgatttggagagggaagaaatctggaatacttaatttcatttaattatctatgctgatgaatgcctgtatcattgttaataaaggagaattgaaaatactcatttctactttctgccctcaaatttctgtttctatctcaactaggcaagaatcagcagggtgcatgatgccattttaagctgcttcacatcagactgaaatcctaattacagttcataagtgaaacagactaattcaatggcaataccttttgtataggtcctgtgcttaaaggaggcaagtataaattttctaataagaaatccctgcttcttttgggtgcagtggctcacacctgtaataccagcagtttgagaagctaaggcaggtggatcacttgaggccaggagttcgagaccagcctggccaacatagtgaaaccccgtctcttctaaaaatacaaaaaaattagctgggcatggtggtgcacgcctatagtcccagctacacaggaggctgaggcaggagaatcacttgaacccgggaagcagagtctgcagtgagccaagatcgcggcattgcacttcagcctgggcgatagagcaagactctgtctcagaaaaaaaaaaaaggaaagaaagaaatctctgcttccgtactatcaaaacttctaccctagaataccccctggcaccttctaacccaacctaatacagagattttgtagggacccattaacaagctcctatataattataagcagctctcacagtagggttgaaagagaatataaggaaaattagaagtactgtatttttgctattggaaatgaaatattgtttcatgcacctttgaaaaaaataacaggattttacagccttctgatgattcattcaaagcatggggaatagttcatatgtttgttaaatgaaaatcttatgtagctatttgtgtgtccctcccacttcataactacaaaaacatatatatgaatttctaaacaaagtgatattttaaagatgaattgattcaatgtgtacttaccagtttactgtgtggttttatcttcaggtacagatagtttgtggtactacttgaaaatacctttaatattattttcatcagaatttgtaatatataatccagtttgggatgatgaataaaatttttctaatctcttgaaaaaacttgta

SEQ ID NO: 299972 - DNA, 365 bp, Homo sapiens
ggggtaaagcggagcggctgcagcctgctgttgagtgagaaaacaaaattatcttcctttccaaatccaaaaagatgaaaacgactgagatactttcaaaagacaaccaagtgagcagcacagactaatgagtagaatcaataagaacgtggttttggcccttttaacgctgacaagttctgcatttctgctgtttcagttgtactactacaagcactatttatcaacaaagaatggagctggtttgtcaaaatccaaaggaagccgaattggatttgatagcacacagtgggtatgtagaataaacaagaaatttctcaattataatgttcatttagttcattcatttactccgtaagtatttg

SEQ ID NO: 299973 - DNA, 7323 bp, Homo sapiens
ggggtaaagcggagcggctgcagcctgctgttgagtgagaaaacaaaattatcttcctttccaaatccaaaaagatgaaaacgactgagatactttcaaaagacaaccaagtgagcagcacagactaatgagtagaatcaataagaacgtggttttggcccttttaacgctgacaagttctgcatttctgctgtttcagttgtactactacaagcactatttatcaacaaagaatggagctggtttgtcaaaatccaaaggaagccgaattggatttgatagcacacagtggcgtgcagttaaaaaatttattatgttaacatccaaccaaaatgtaccagtgtttcttattgatcctttgatactggaattgattaataagaactttgaacaagtcaaaaatacttctcatggctctacttcacaatgcaagtttttctgtgttccaagagactttactgcatttgcactgcagtatcacctatggaagaatgaggaaggctggtttcggatagctgagaatatgggatttcagtgcctaaagattgagagtaaagatccccggctagacgggatagactcactctctggaactgaaatccccctgcactatatctgcaaactggccactcatgcgatccacttggtagtctttcatgagaggagtggcaactacctctggcacggccacttgagacttaaagaacacattgacaggaaatttgttcccttccaaaagttacagtttggtcgttatccaggagcttttgacaggccagagttacagcaagttactgttgatggactggaagttctcattccaaaggatccaatgcactttgtagaagaagtaccacactctaggtttattgagtgtaggtataaagaagctcgagcattctttcagcagtaccttgatgataacactgtggaagctgtggcctttcggaagagtgcaaaggaattactgcaactagcagcgaaaacattaaacaaattgggagtaccattctggctgagcagtggaacttgtctaggatggtatcgacaatgcaacattattccttatagcaaagatgttgacctaggaatttttatacaagattacaaatctgatattattttagcatttcaggatgcaggacttccgctcaaacacaaatttgggaaggtagaagacagcttggaactatccttccagggaaaagatgatgtaaaacttgatgtttttttcttctatgaagaaactgatcacatgtggaatggaggcactcaggccaaaacaggaaaaaaattcaaatacctgtttccgaagtttacactgtgctggactgagtttgtagacatgaaggtccatgtaccctgtgaaaccctcgaatacattgaagccaactatggtaagacctggaagattcctgtaaagacgtgggactggaagcgctctcctcccaatgtgcaacccaatggaatctggcctatttctgagtgggatgaggttatccagttatattgagatagtaggttgaaatgggagaatttctcttttggaaaaaaaggtagataactgtttaaaaaatacatgtctatttgtcaaacataagtgggaaccaaagaaaaaatgtgacaagtttgaagacacagaaagagtcatctgatgtaattctctcacttagtactgaggaattttcatgtgccacatacaatgctaggttacagtggagaagccaagatgaatgagacaaatacctacttcttttattcctccttttggtaaacaactcaattttcctttgagggaaccctcccccaccctttgaagagttcaagttctgtacaggtttttaaaacgtgaagtaatgtttgaactggaagatgagctcaccaggcaaagctaaggaaggatatactagttgaaaagaataacccactcctcttctgggcatttaagctggtatgttagtgctacttttaagattgtggagtctgagttaatattcaagtgatcagactttgagtgacatcaagaaaagatgatatcaggttcatttttcaactaatcttatgtggaattgaattagagaacaaggcattattcttttagggaaggtgagagcttatttgtatcagagcttattacttgtcaggataagtaaatttctgtacatgtactgttttcatatgtgaagtgagaagaaactttatgcttgtttaatgcttaaatttccatccattgtgagaatattttcactgacctctgatggcacttgttgacaaatcattcaagtgagaccatgttactagacatgatcttgaaagaggccatgatttcacaaaactcatttttattttattctcagacagtctgttaggtaaaaatatgagaaattcatgtacattttatattttctgaatttataatctgtgcactcccaattttaatgacactaaaatattaatagaattttttaaatatactctaatttttaaaacatactctttattatcttcatttatcaattacagcttcgtatctctaatttatggtctatataccaatttaaatggcatgtaaacctgcctgtttcttctcctcttctaatatatcagatctccaaaatggaagctaaatggtggacttgacaactattcaccctacctcagatcatagagtttgtaaagtttgtgtccctccccagtttttcagtctgttgaatgtcgatggggcaagaactcagacttctactttaccaagtaccacacactctggaatgctttagtttccttttcccctcaagatgtctgagtcagctaggatgctgtttaccccatctctctcttatatcacttgaatgatatattgtaagtgagaggtaaaggaaaatgtaggcacaataagcactgctatttttctctttgtctaggaaaggaagctgaatcttatatcttatctatgctatttaggactactttctggagcttggcagattttcctctgacaccagagaacaatagtagtctcaagaatggaaacctgaatgtctgagggaatgggctggtagactttttcgaaaacaaattagagaaagtaacttacaaccacccattccggatttgtaaagcaacatgaaaacctttgataaatgataaccaacagtcttctgtcctaatttgcattctcaatgcagaattattgggtctttcataaacaacatgagtggtttctggagacatttaagattgtcagcaaacttgtcccaaaatggcacatcatcataatccattttctctttgctagaaaatcagcccatagagtgcattcccaaattctaaatagctgaccctaaattcatttttcatgcttaaaaataatagaacaaataataatactatttttgggcaaaatccaccctacttgatgaggaccatttgcttgtgctcagtatttagaaatgcatacactccacatttctccccatttccaattgggactcccattctttgccaggagatcttacccatcccttttcagattaatcttttatcctttcctgaagtacaaagtcttaagagtgtctgaaatccaagacatcttggcccaattgacacaggttctatattcttccctacatagaccactggctgctgaaatacttttcttgtcttctggtttcacaggcttcagctcatgggttccaccctaacttggggaaacaaaagccttctctagaatctgaaggccaggcttacctctgattctgattcatccatacttcatcttatgtattttaacagttgggttctgtggagtgtccagagaccttgggttaggtatatccatcttcagtacctcattggatcacttttctttcatcacttgagtattctagcagtcattctcctaatctgaccactttcaggtttagtttacctggcttacctggggaagttgacaacttgttggtagttaggcacccatgaatgtctccagagacatcctgagaggcaagattcctcttaattgataaccaggacaaccaggtagtcacccagtcctctctaagcagggagcacttgtccttctctcctctgctgcagctactgatatctggcccctggaataaaaccatagttcctaaaattgagcatccctaagagtagctgcttggtgggacagctgatttctttgattccctagctgcaaaacctgaaattgaccactaggtgacagaatgtttgccagtatccccacaaaacaagttaaaacttaagtgaaaatcattctgcttttgaatcttaaaagctagaaaaaccataatgtaatattctttttaaaccctcttattttataactaaataaataatcacagaaaagaatgatctgaacaagaacagctgaggctagtatctttaacagtgcttgagatgcttaacagagaaggcatccagtgcttcattgaggctaagtctcagggtgtttctgccgcttagtatctttttgttcagattgagaacctaaggcgacagagaggtcaaggggaagtattttctagttcagaattcagaattcttaggcaaccttcatacctttatctggaaaatgccttctctccagacaataagacagttcacatctggagacatcagcctttggtacctaattctctaagctcaagatgcatcccattgccactttaccattctatttcccaagggaaccatcagcaccaacctgctaaatgcctgtatttgaagtctctccccttcctgaagtgaccttttatgaggctctttccttcctaagggacctttccctggtagtagtggtctcattcacaaaaaagaataatagatgtaactggagtcactttgcagttttcaagattttttttttatctgcttggctggaaaggagactagagtatctagtttttagtatttaaactacttttaattatttatattgatactctctgataaatgcaggtagttaagaatagattgtactcattcctttttgagtttgtgacctcaaaccattgtttttattcttacacgactacagtacttcaaatggcacatagataggcaggatattacataggtaagcaggaatttatacattgggtaccagagctaaatctggaaaacacatttggaatgagcttccacacttcagtctaaaatctcacccaaacttatggctacatatttttctaagtttcccccctagtttcactttctggaaagtgaacagttttttaaatcctaaatgttataaatccttaggagaaatattccctcaaaacctagtcaagaaagtgccacattcccaccttctaacaggtaattattagttgtaatagctttaatgcatggaaaaacttcagttactgaccagtcaagagaatttctcaagaaaaatcccagcaacgttccctctttcctccttgtcttccactatcattaagacctgggctagatcacctctaacatctcactcagggaaggcaatgtgttgccataaaaagaccacaagcttttgagttaggcctgaatttgaatttcagcttaatcatgtgggatttatggtgggggccctttcagtctcaatttccacattagtgaactggggaaatgatacatacttctaagggtttttagggggattaaatgaagtatacagttcttagcctcaggcctaggattaagtaagtactcaagaaatgtgcaattttctagttccatgtttcttttctaatcttcaaatggaattatagaaaccatgggtcagaacatattcctttactcaaaagattgcatgactgaatttgcttaagaaaaaaaaaattgtatcaagtcattaatacaattatacattaattatattacattaatacaatatatggtttgtgaattcagagacattaccagtttgcctccttctctcaatagaacttgtattttcattttcttggttaagcagttgtctcctaatattatcccatatgctacctagtttgctggtcccaagcagtttactgtacttcactagatttggtacctgctctcccctggacttctttttcaatattctagcctttcctagatgtaaatctttacctccttgttagtgaaattagatataagccatgatttggagagggaagaaatctggaatacttaatttcatttaattatctatgctgatgaatgcctgtatcattgttaataaaggagaattgaaaatactcatttctactttctgccctcaaatttctgtttctatctcaactaggcaagaatcagcagggtgcatgatgccattttaagctgcttcacatcagactgaaatcctaattacagttcataagtgaaacagactaattcaatggcaataccttttgtataggtcctgtgcttaaaggaggcaagtataaattttctaataagaaatccctgcttcttttgggtgcagtggctcacacctgtaataccagcagtttgagaagctaaggcaggtggatcacttgaggccaggagttcgagaccagcctggccaacatagtgaaaccccgtctcttctaaaaatacaaaaaaattagctgggcatggtggtgcacgcctatagtcccagctacacaggaggctgaggcaggagaatcacttgaacccgggaagcagagtctgcagtgagccaagatcgcggcattgcacttcagcctgggcgatagagcaagactctgtctcagaaaaaaaaaaaaggaaagaaagaaatctctgcttccgtactatcaaaacttctaccctagaataccccctggcaccttctaacccaacctaatacagagattttgtagggacccattaacaagctcctatataattataagcagctctcacagtagggttgaaagagaatataaggaaaattagaagtactgtatttttgctattggaaatgaaatattgtttcatgcacctttgaaaaaaataacaggattttacagccttctgatgattcattcaaagcatggggaatagttcatatgtttgttaaatgaaaatcttatgtagctatttgtgtgtccctcccacttcataactacaaaaacatatatatgaatttctaaacaaagtgatattttaaagatgaattgattcaatgtgtacttaccagtttactgtgtggttttatcttcaggtacagatagtttgtggtactacttgaaaatacctttaatattattttcatcagaatttgtaatatataatccagtttgggatgatgaataaaatttttctaatctcttgaaaaaacttgta

SEQ ID NO: 299974 - DNA, 7513 bp, Homo sapiens
agattgaaaggaaacacactgaatgaggaaaaactaacatacggtcatcaacatccttgtataacctagtttttaaaaaaattggatttcaaagctggagaacaaaagacatataaaccttagatatcaagcataagagaggtgtcagtatatttgaaggattgaaggaataaatgtaagcatttgaagaactaaatgtgtttaaccaaaatcaaacagtggagacaagaaaacaaaattatcttcctttccaaatccaaaaagatgaaaacgactgagatactttcaaaagacaaccaagtgagcagcacagactaatgagtagaatcaataagaacgtggttttggcccttttaacgctgacaagttctgcatttctgctgtttcagttgtactactacaagcactatttatcaacaaagaatggagctggtttgtcaaaatccaaaggaagccgaattggatttgatagcacacagtggcgtgcagttaaaaaatttattatgttaacatccaaccaaaatgtaccagtgtttcttattgatcctttgatactggaattgattaataagaactttgaacaagtcaaaaatacttctcatggctctacttcacaatgcaagtttttctgtgttccaagagactttactgcatttgcactgcagtatcacctatggaagaatgaggaaggctggtttcggatagctgagaatatgggatttcagtgcctaaagattgagagtaaagatccccggctagacgggatagactcactctctggaactgaaatccccctgcactatatctgcaaactggccactcatgcgatccacttggtagtctttcatgagaggagtggcaactacctctggcacggccacttgagacttaaagaacacattgacaggaaatttgttcccttccaaaagttacagtttggtcgttatccaggagcttttgacaggccagagttacagcaagttactgttgatggactggaagttctcattccaaaggatccaatgcactttgtagaagaagtaccacactctaggtttattgagtgtaggtataaagaagctcgagcattctttcagcagtaccttgatgataacactgtggaagctgtggcctttcggaagagtgcaaaggaattactgcaactagcagcgaaaacattaaacaaattgggagtaccattctggctgagcagtggaacttgtctaggatggtatcgacaatgcaacattattccttatagcaaagatgttgacctaggaatttttatacaagattacaaatctgatattattttagcatttcaggatgcaggacttccgctcaaacacaaatttgggaaggtagaagacagcttggaactatccttccagggaaaagatgatgtaaaacttgatgtttttttcttctatgaagaaactgatcacatgtggaatggaggcactcaggccaaaacaggaaaaaaattcaaatacctgtttccgaagtttacactgtgctggactgagtttgtagacatgaaggtccatgtaccctgtgaaaccctcgaatacattgaagccaactatggtaagacctggaagattcctgtaaagacgtgggactggaagcgctctcctcccaatgtgcaacccaatggaatctggcctatttctgagtgggatgaggttatccagttatattgagatagtaggttgaaatgggagaatttctcttttggaaaaaaaggtagataactgtttaaaaaatacatgtctatttgtcaaacataagtgggaaccaaagaaaaaatgtgacaagtttgaagacacagaaagagtcatctgatgtaattctctcacttagtactgaggaattttcatgtgccacatacaatgctaggttacagtggagaagccaagatgaatgagacaaatacctacttcttttattcctccttttggtaaacaactcaattttcctttgagggaaccctcccccaccctttgaagagttcaagttctgtacaggtttttaaaacgtgaagtaatgtttgaactggaagatgagctcaccaggcaaagctaaggaaggatatactagttgaaaagaataacccactcctcttctgggcatttaagctggtatgttagtgctacttttaagattgtggagtctgagttaatattcaagtgatcagactttgagtgacatcaagaaaagatgatatcaggttcatttttcaactaatcttatgtggaattgaattagagaacaaggcattattcttttagggaaggtgagagcttatttgtatcagagcttattacttgtcaggataagtaaatttctgtacatgtactgttttcatatgtgaagtgagaagaaactttatgcttgtttaatgcttaaatttccatccattgtgagaatattttcactgacctctgatggcacttgttgacaaatcattcaagtgagaccatgttactagacatgatcttgaaagaggccatgatttcacaaaactcatttttattttattctcagacagtctgttaggtaaaaatatgagaaattcatgtacattttatattttctgaatttataatctgtgcactcccaattttaatgacactaaaatattaatagaattttttaaatatactctaatttttaaaacatactctttattatcttcatttatcaattacagcttcgtatctctaatttatggtctatataccaatttaaatggcatgtaaacctgcctgtttcttctcctcttctaatatatcagatctccaaaatggaagctaaatggtggacttgacaactattcaccctacctcagatcatagagtttgtaaagtttgtgtccctccccagtttttcagtctgttgaatgtcgatggggcaagaactcagacttctactttaccaagtaccacacactctggaatgctttagtttccttttcccctcaagatgtctgagtcagctaggatgctgtttaccccatctctctcttatatcacttgaatgatatattgtaagtgagaggtaaaggaaaatgtaggcacaataagcactgctatttttctctttgtctaggaaaggaagctgaatcttatatcttatctatgctatttaggactactttctggagcttggcagattttcctctgacaccagagaacaatagtagtctcaagaatggaaacctgaatgtctgagggaatgggctggtagactttttcgaaaacaaattagagaaagtaacttacaaccacccattccggatttgtaaagcaacatgaaaacctttgataaatgataaccaacagtcttctgtcctaatttgcattctcaatgcagaattattgggtctttcataaacaacatgagtggtttctggagacatttaagattgtcagcaaacttgtcccaaaatggcacatcatcataatccattttctctttgctagaaaatcagcccatagagtgcattcccaaattctaaatagctgaccctaaattcatttttcatgcttaaaaataatagaacaaataataatactatttttgggcaaaatccaccctacttgatgaggaccatttgcttgtgctcagtatttagaaatgcatacactccacatttctccccatttccaattgggactcccattctttgccaggagatcttacccatcccttttcagattaatcttttatcctttcctgaagtacaaagtcttaagagtgtctgaaatccaagacatcttggcccaattgacacaggttctatattcttccctacatagaccactggctgctgaaatacttttcttgtcttctggtttcacaggcttcagctcatgggttccaccctaacttggggaaacaaaagccttctctagaatctgaaggccaggcttacctctgattctgattcatccatacttcatcttatgtattttaacagttgggttctgtggagtgtccagagaccttgggttaggtatatccatcttcagtacctcattggatcacttttctttcatcacttgagtattctagcagtcattctcctaatctgaccactttcaggtttagtttacctggcttacctggggaagttgacaacttgttggtagttaggcacccatgaatgtctccagagacatcctgagaggcaagattcctcttaattgataaccaggacaaccaggtagtcacccagtcctctctaagcagggagcacttgtccttctctcctctgctgcagctactgatatctggcccctggaataaaaccatagttcctaaaattgagcatccctaagagtagctgcttggtgggacagctgatttctttgattccctagctgcaaaacctgaaattgaccactaggtgacagaatgtttgccagtatccccacaaaacaagttaaaacttaagtgaaaatcattctgcttttgaatcttaaaagctagaaaaaccataatgtaatattctttttaaaccctcttattttataactaaataaataatcacagaaaagaatgatctgaacaagaacagctgaggctagtatctttaacagtgcttgagatgcttaacagagaaggcatccagtgcttcattgaggctaagtctcagggtgtttctgccgcttagtatctttttgttcagattgagaacctaaggcgacagagaggtcaaggggaagtattttctagttcagaattcagaattcttaggcaaccttcatacctttatctggaaaatgccttctctccagacaataagacagttcacatctggagacatcagcctttggtacctaattctctaagctcaagatgcatcccattgccactttaccattctatttcccaagggaaccatcagcaccaacctgctaaatgcctgtatttgaagtctctccccttcctgaagtgaccttttatgaggctctttccttcctaagggacctttccctggtagtagtggtctcattcacaaaaaagaataatagatgtaactggagtcactttgcagttttcaagattttttttttatctgcttggctggaaaggagactagagtatctagtttttagtatttaaactacttttaattatttatattgatactctctgataaatgcaggtagttaagaatagattgtactcattcctttttgagtttgtgacctcaaaccattgtttttattcttacacgactacagtacttcaaatggcacatagataggcaggatattacataggtaagcaggaatttatacattgggtaccagagctaaatctggaaaacacatttggaatgagcttccacacttcagtctaaaatctcacccaaacttatggctacatatttttctaagtttcccccctagtttcactttctggaaagtgaacagttttttaaatcctaaatgttataaatccttaggagaaatattccctcaaaacctagtcaagaaagtgccacattcccaccttctaacaggtaattattagttgtaatagctttaatgcatggaaaaacttcagttactgaccagtcaagagaatttctcaagaaaaatcccagcaacgttccctctttcctccttgtcttccactatcattaagacctgggctagatcacctctaacatctcactcagggaaggcaatgtgttgccataaaaagaccacaagcttttgagttaggcctgaatttgaatttcagcttaatcatgtgggatttatggtgggggccctttcagtctcaatttccacattagtgaactggggaaatgatacatacttctaagggtttttagggggattaaatgaagtatacagttcttagcctcaggcctaggattaagtaagtactcaagaaatgtgcaattttctagttccatgtttcttttctaatcttcaaatggaattatagaaaccatgggtcagaacatattcctttactcaaaagattgcatgactgaatttgcttaagaaaaaaaaaattgtatcaagtcattaatacaattatacattaattatattacattaatacaatatatggtttgtgaattcagagacattaccagtttgcctccttctctcaatagaacttgtattttcattttcttggttaagcagttgtctcctaatattatcccatatgctacctagtttgctggtcccaagcagtttactgtacttcactagatttggtacctgctctcccctggacttctttttcaatattctagcctttcctagatgtaaatctttacctccttgttagtgaaattagatataagccatgatttggagagggaagaaatctggaatacttaatttcatttaattatctatgctgatgaatgcctgtatcattgttaataaaggagaattgaaaatactcatttctactttctgccctcaaatttctgtttctatctcaactaggcaagaatcagcagggtgcatgatgccattttaagctgcttcacatcagactgaaatcctaattacagttcataagtgaaacagactaattcaatggcaataccttttgtataggtcctgtgcttaaaggaggcaagtataaattttctaataagaaatccctgcttcttttgggtgcagtggctcacacctgtaataccagcagtttgagaagctaaggcaggtggatcacttgaggccaggagttcgagaccagcctggccaacatagtgaaaccccgtctcttctaaaaatacaaaaaaattagctgggcatggtggtgcacgcctatagtcccagctacacaggaggctgaggcaggagaatcacttgaacccgggaagcagagtctgcagtgagccaagatcgcggcattgcacttcagcctgggcgatagagcaagactctgtctcagaaaaaaaaaaaaggaaagaaagaaatctctgcttccgtactatcaaaacttctaccctagaataccccctggcaccttctaacccaacctaatacagagattttgtagggacccattaacaagctcctatataattataagcagctctcacagtagggttgaaagagaatataaggaaaattagaagtactgtatttttgctattggaaatgaaatattgtttcatgcacctttgaaaaaaataacaggattttacagccttctgatgattcattcaaagcatggggaatagttcatatgtttgttaaatgaaaatcttatgtagctatttgtgtgtccctcccacttcataactacaaaaacatatatatgaatttctaaacaaagtgatattttaaagatgaattgattcaatgtgtacttaccagtttactgtgtggttttatcttcaggtacagatagtttgtggtactacttgaaaatacctttaatattattttcatcagaatttgtaatatataatccagtttgggatgatgaataaaatttttctaatctcttgaaaaaacttgta

SEQ ID NO: 299975 - DNA, 5799 bp, Homo sapiens
ggggtaaagcggagcggctgcagcctgctgttgagtgagaaaacaaaattatcttcctttccaaatccaaaaagatgaaaacgactgagatactttcaaaagacaaccaagtgagcagcacagactaatgagtagaatcaataagaacgtggttttggcccttttaacgctgacaagttctgcatttctgctgtttcagttgtactactacaagcactatttatcaacaaagaatggagctggtttgtcaaaatccaaaggaagccgaattggatttgatagcacacagtggcgtgcagttaaaaaatttattatgttaacatccaaccaaaatgtaccagtgtttcttattgatcctttgatactggaattgattaataagaactttgaacaagtcaaaaatacttctcatggctctacttcacaatgcaagtttttctgtgttccaagagactttactgcatttgcactgcagtatcacctatggaagaatgaggaaggctggtttcggatagctgagaatatgggatttcagtgcctaaagattgagagtaaagatccccggctagacgggatagactcactctctggaactgaaatccccctgcactatatctgcaaactggccactcatgcgatccacttggtagtctttcatgagaggagtggcaactacctctggcacggccacttgagacttaaagaacacattgacaggaaatttgttcccttccaaaagttacagtttggtcgttatccaggagcttttgacaggccagagttacagcaagttactgttgatggactggaagttctcattccaaaggatccaatgcactttgtagaagaagtaccacactctaggtttattgagtgtaggtataaagaagctcgagcattctttcagcagtaccttgatgataacactgtggaagctgtggcctttcggaagagtgcaaaggaattactgcaactagcagcgaaaacattaaacaaattgggagtaccattctggctgagcagtggaacttgtctaggatggtatcgacaatgcaacattattccttatagcaaagatgttgacctaggaatttttatacaagattacaaatctgatattattttagcatttcaggatgcaggacttccgctcaaacacaaatttgggaaggtagaagacagcttggaactatccttccagggaaaagatgatgtaaaacttgatgtttttttcttctatgaagaaactgatcacatgtggaatggaggcactcaggccaaaacaggaaaaaaattcaaatacctgtttccgaagtttacactgtgctggactgagtttgtagacatgaaggtccatgtaccctgtgaaaccctcgaatacattgaagccaactatggaaaggaagctgaatcttatatcttatctatgctatttaggactactttctggagcttggcagattttcctctgacaccagagaacaatagtagtctcaagaatggaaacctgaatgtctgagggaatgggctggtagactttttcgaaaacaaattagagaaagtaacttacaaccacccattccggatttgtaaagcaacatgaaaacctttgataaatgataaccaacagtcttctgtcctaatttgcattctcaatgcagaattattgggtctttcataaacaacatgagtggtttctggagacatttaagattgtcagcaaacttgtcccaaaatggcacatcatcataatccattttctctttgctagaaaatcagcccatagagtgcattcccaaattctaaatagctgaccctaaattcatttttcatgcttaaaaataatagaacaaataataatactatttttgggcaaaatccaccctacttgatgaggaccatttgcttgtgctcagtatttagaaatgcatacactccacatttctccccatttccaattgggactcccattctttgccaggagatcttacccatcccttttcagattaatcttttatcctttcctgaagtacaaagtcttaagagtgtctgaaatccaagacatcttggcccaattgacacaggttctatattcttccctacatagaccactggctgctgaaatacttttcttgtcttctggtttcacaggcttcagctcatgggttccaccctaacttggggaaacaaaagccttctctagaatctgaaggccaggcttacctctgattctgattcatccatacttcatcttatgtattttaacagttgggttctgtggagtgtccagagaccttgggttaggtatatccatcttcagtacctcattggatcacttttctttcatcacttgagtattctagcagtcattctcctaatctgaccactttcaggtttagtttacctggcttacctggggaagttgacaacttgttggtagttaggcacccatgaatgtctccagagacatcctgagaggcaagattcctcttaattgataaccaggacaaccaggtagtcacccagtcctctctaagcagggagcacttgtccttctctcctctgctgcagctactgatatctggcccctggaataaaaccatagttcctaaaattgagcatccctaagagtagctgcttggtgggacagctgatttctttgattccctagctgcaaaacctgaaattgaccactaggtgacagaatgtttgccagtatccccacaaaacaagttaaaacttaagtgaaaatcattctgcttttgaatcttaaaagctagaaaaaccataatgtaatattctttttaaaccctcttattttataactaaataaataatcacagaaaagaatgatctgaacaagaacagctgaggctagtatctttaacagtgcttgagatgcttaacagagaaggcatccagtgcttcattgaggctaagtctcagggtgtttctgccgcttagtatctttttgttcagattgagaacctaaggcgacagagaggtcaaggggaagtattttctagttcagaattcagaattcttaggcaaccttcatacctttatctggaaaatgccttctctccagacaataagacagttcacatctggagacatcagcctttggtacctaattctctaagctcaagatgcatcccattgccactttaccattctatttcccaagggaaccatcagcaccaacctgctaaatgcctgtatttgaagtctctccccttcctgaagtgaccttttatgaggctctttccttcctaagggacctttccctggtagtagtggtctcattcacaaaaaagaataatagatgtaactggagtcactttgcagttttcaagattttttttttatctgcttggctggaaaggagactagagtatctagtttttagtatttaaactacttttaattatttatattgatactctctgataaatgcaggtagttaagaatagattgtactcattcctttttgagtttgtgacctcaaaccattgtttttattcttacacgactacagtacttcaaatggcacatagataggcaggatattacataggtaagcaggaatttatacattgggtaccagagctaaatctggaaaacacatttggaatgagcttccacacttcagtctaaaatctcacccaaacttatggctacatatttttctaagtttcccccctagtttcactttctggaaagtgaacagttttttaaatcctaaatgttataaatccttaggagaaatattccctcaaaacctagtcaagaaagtgccacattcccaccttctaacaggtaattattagttgtaatagctttaatgcatggaaaaacttcagttactgaccagtcaagagaatttctcaagaaaaatcccagcaacgttccctctttcctccttgtcttccactatcattaagacctgggctagatcacctctaacatctcactcagggaaggcaatgtgttgccataaaaagaccacaagcttttgagttaggcctgaatttgaatttcagcttaatcatgtgggatttatggtgggggccctttcagtctcaatttccacattagtgaactggggaaatgatacatacttctaagggtttttagggggattaaatgaagtatacagttcttagcctcaggcctaggattaagtaagtactcaagaaatgtgcaattttctagttccatgtttcttttctaatcttcaaatggaattatagaaaccatgggtcagaacatattcctttactcaaaagattgcatgactgaatttgcttaagaaaaaaaaaattgtatcaagtcattaatacaattatacattaattatattacattaatacaatatatggtttgtgaattcagagacattaccagtttgcctccttctctcaatagaacttgtattttcattttcttggttaagcagttgtctcctaatattatcccatatgctacctagtttgctggtcccaagcagtttactgtacttcactagatttggtacctgctctcccctggacttctttttcaatattctagcctttcctagatgtaaatctttacctccttgttagtgaaattagatataagccatgatttggagagggaagaaatctggaatacttaatttcatttaattatctatgctgatgaatgcctgtatcattgttaataaaggagaattgaaaatactcatttctactttctgccctcaaatttctgtttctatctcaactaggcaagaatcagcagggtgcatgatgccattttaagctgcttcacatcagactgaaatcctaattacagttcataagtgaaacagactaattcaatggcaataccttttgtataggtcctgtgcttaaaggaggcaagtataaattttctaataagaaatccctgcttcttttgggtgcagtggctcacacctgtaataccagcagtttgagaagctaaggcaggtggatcacttgaggccaggagttcgagaccagcctggccaacatagtgaaaccccgtctcttctaaaaatacaaaaaaattagctgggcatggtggtgcacgcctatagtcccagctacacaggaggctgaggcaggagaatcacttgaacccgggaagcagagtctgcagtgagccaagatcgcggcattgcacttcagcctgggcgatagagcaagactctgtctcagaaaaaaaaaaaaggaaagaaagaaatctctgcttccgtactatcaaaacttctaccctagaataccccctggcaccttctaacccaacctaatacagagattttgtagggacccattaacaagctcctatataattataagcagctctcacagtagggttgaaagagaatataaggaaaattagaagtactgtatttttgctattggaaatgaaatattgtttcatgcacctttgaaaaaaataacaggattttacagccttctgatgattcattcaaagcatggggaatagttcatatgtttgttaaatgaaaatcttatgtagctatttgtgtgtccctcccacttcataactacaaaaacatatatatgaatttctaaacaaagtgatattttaaagatgaattgattcaatgtgtacttaccagtttactgtgtggttttatcttcaggtacagatagtttgtggtactacttgaaaatacctttaatattattttcatcagaatttgtaatatataatccagtttgggatgatgaataaaatttttctaatctcttgaaaaaacttgta

SEQ ID NO: 299976 - DNA, 7270 bp, Homo sapiens
ggggtaaagcggagcggctgcagcctgctgttgagtgagaaaacaaaattatcttcctttccaaatccaaaaagatgaaaacgactgagatactttcaaaagacaaccaagtgagcagcacagactaatgagtagaatcaataagaacgtggttttggcccttttaacgctgacaagttctgcatttctgctgtttcagttgtactactacaagcactatttatcaacaaagaatggagctggtttgtcaaaatccaaaggaagccgaattggatttgatagcacacagtggcgtgcagttaaaaaatttattatgttaacatccaaccaaaatgtaccagtgtttcttattgatcctttgatactggaattgattaataagaactttgaacaagtcaaaaatacttctcatggctctacttcacaatgcaagtttttctgtgttccaagagactttactgcatttgcactgcagtatcacctatggaagaatgaggaaggctggtttcggatagctgagaatatgggatttcagtgcctaaagattgagagtaaagatccccggctagacgggatagactcactctctggaactgaaatccccctgcactatatctgcaaactggccactcatgcgatccacttggtagtctttcatgagaggagtggcaactacctctggcacggccacttgagacttaaagaacacattgacaggaaatttgttcccttccaaaagttacagtttggtcgttatccaggagcttttgacaggccagagttacagcaagttactgttgatggactggaagttctcattccaaaggatccaatgcactttgtagaagaagtaccacactctaggtttattgagtgtaggtataaagaagctcgagcattctttcagcagtaccttgatgataacactgtggaagctgtggcctttcggaagagtgcaaaggaattactgcaactagcagcgaaaacattaaacaaattgggagtaccattctggctgagcagtggaacttgtctaggatggtatcgacaatgcaacattattccttatagcaaagatgttgacctaggaatttttatacaagattacaaatctgatattattttagcatttcaggatgcaggacttccgctcaaacacaaatttgggaaggtagaagacagcttggaactatccttccagggaaaagatgatgtaaaacttgatgtttttttcttctatgaagaaactgatcacatgtggaatggaggcactcaggccaaaacaggaaaaaaattcaaatacctgtttccgaagtttacactgtgctggactgagtttgtagacatgaaggtccatgtaccctgtgaaaccctcgaatacattgaagccaactatggtaagacctggaagattcctgtaaagacgtgggactggaagcgctctcctcccaatgtgcaacccaatggaatctggcctatttctgagtgggatgaggttatccagttatattgagatagtaggttgaaatgggagaatttctcttttggaaaaaaaggtagataactgtttaaaaaatacatgtctatttgtcaaacataagtgggaaccaaagaaaaaatgtgacaagtttgaagacacagaaagagtcatctgatgtaattctctcacttagtactgaggaattttcatgtgccacatacaatgctaggttacagtggagaagccaagatgaatgagacaaatacctacttcttttattcctccttttggtaaacaactcaattttcctttgagggaaccctcccccaccctttgaagagttcaagttctgtacaggtttttaaaacgtgaagtaatgtttgaactggaagatgagctcaccaggcaaagctaaggaaggatatactagttgaaaagaataacccactcctcttctgggcatttaagctggtatgttagtgctacttttaagattgtggagtctgagttaatattcaagtgatcagactttgagtgacatcaagaaaagatgatatcaggttcatttttcaactaatcttatgtggaattgaattagagaacaaggcattattcttttagggaaggtgagagcttatttgtatcagagcttattacttgtcaggataagtaaatttctgtacatgtactgttttcatatgtgaagtgagaagaaactttatgcttgtttaatgcttaaatttccatccattgtgagaatattttcactgacctctgatggcacttgttgacaaatcattcaagtgagaccatgttactagacatgatcttgaaagaggccatgatttcacaaaactcatttttattttattctcagacagtctgttaggtaaaaatatgagaaattcatgtacattttatattttctgaatttataatctgtgcactcccaattttaatgacactaaaatattaatagaattttttaaatatactctaatttttaaaacatactctttattatcttcatttatcaattacagcttcgtatctctaatttatggtctatataccaatttaaatggcatgtaaacctgcctgtttcttctcctcttctaatatatcagatctccaaaatggaagctaaatggtggacttgacaactattcaccctacctcagatcatagagtttgtaaagtttgtgtccctccccagtttttcagtctgttgaatgtcgatggggcaagaactcagacttctactttaccaagtaccacacactctggaatgctttagtttccttttcccctcaagatgtctgagtcagctaggatgctgtttaccccatctctctcttatatcacttgaatgatatattgtaagtgagaggtaaaggaaaatgtaggcacaataagcactgctatttttctctttgtctaggaaaggaagctgaatcttatatcttatctatgctatttaggactactttctggagcttggcagattttcctctgacaccagagaacaatagtagtctcaagaatggaaacctgaatgtctgagggaatgggctggtagactttttcgaaaacaaattagagaaagtaacttacaaccacccattccggatttgtaaagcaacatgaaaacctttgataaatgataaccaacagtcttctgtcctaatttgcattctcaatgcagaattattgggtctttcataaacaacatgagtggtttctggagacatttaagattgtcagcaaacttgtcccaaaatggcacatcatcataatccattttctctttgctagaaaatcagcccatagagtgcattcccaaattctaaatagctgaccctaaattcatttttcatgcttaaaaataatagaacaaataataatactatttttgggcaaaatccaccctacttgatgaggaccatttgcttgtgctcagtatttagaaatgcatacactccacatttctccccatttccaattgggactcccattctttgccaggagatcttacccatcccttttcagattaatcttttatcctttcctgaagtacaaagtcttaagagtgtctgaaatccaagacatcttggcccaattgacacaggttctatattcttccctacatagaccactggctgctgaaatacttttcttgtcttctggtttcacaggcttcagctcatgggttccaccctaacttggggaaacaaaagccttctctagaatctgaaggccaggcttacctctgattctgattcatccatacttcatcttatgtattttaacagttgggttctgtggagtgtccagagaccttgggttaggtatatccatcttcagtacctcattggatcacttttctttcatcacttgagtattctagcagtcattctcctaatctgaccactttcaggtttagtttacctggcttacctggggaagttgacaacttgttggtagttaggcacccatgaatgtctccagagacatcctgagaggcaagattcctcttaattgataaccaggacaaccaggtagtcacccagtcctctctaagcagggagcacttgtccttctctcctctgctgcagctactgatatctggcccctggaataaaaccatagttcctaaaattgagcatccctaagagtagctgcttggtgggacagctgatttctttgattccctagctgcaaaacctgaaattgaccactaggtgacagaatgtttgccagtatccccacaaaacaagttaaaacttaagtgaaaatcattctgcttttgaatcttaaaagctagaaaaaccataatgtaatattctttttaaaccctcttattttataactaaataaataatcacagaaaagaatgatctgaacaagaacagctgaggctagtatctttaacagtgcttgagatgcttaacagagaaggcatccagtgcttcattgaggctaagtctcagggtgtttctgccgcttagtatctttttgttcagattgagaacctaaggcgacagagaggtcaaggggaagtattttctagttcagaattcagaattcttaggcaaccttcatacctttatctggaaaatgccttctctccagacaataagacagttcacatctggagacatcagcctttggtacctaattctctaagctcaagatgcatcccattgccactttaccattctatttcccaagggaaccatcagcaccaacctgctaaatgcctgtatttgaagtctctccccttcctgaagtgaccttttatgaggctctttccttcctaagggacctttccctggtagtagtggtctcattcacaattatctgcttggctggaaaggagactagagtatctagtttttagtatttaaactacttttaattatttatattgatactctctgataaatgcaggtagttaagaatagattgtactcattcctttttgagtttgtgacctcaaaccattgtttttattcttacacgactacagtacttcaaatggcacatagataggcaggatattacataggtaagcaggaatttatacattgggtaccagagctaaatctggaaaacacatttggaatgagcttccacacttcagtctaaaatctcacccaaacttatggctacatatttttctaagtttcccccctagtttcactttctggaaagtgaacagttttttaaatcctaaatgttataaatccttaggagaaatattccctcaaaacctagtcaagaaagtgccacattcccaccttctaacaggtaattattagttgtaatagctttaatgcatggaaaaacttcagttactgaccagtcaagagaatttctcaagaaaaatcccagcaacgttccctctttcctccttgtcttccactatcattaagacctgggctagatcacctctaacatctcactcagggaaggcaatgtgttgccataaaaagaccacaagcttttgagttaggcctgaatttgaatttcagcttaatcatgtgggatttatggtgggggccctttcagtctcaatttccacattagtgaactggggaaatgatacatacttctaagggtttttagggggattaaatgaagtatacagttcttagcctcaggcctaggattaagtaagtactcaagaaatgtgcaattttctagttccatgtttcttttctaatcttcaaatggaattatagaaaccatgggtcagaacatattcctttactcaaaagattgcatgactgaatttgcttaagaaaaaaaaaattgtatcaagtcattaatacaattatacattaattatattacattaatacaatatatggtttgtgaattcagagacattaccagtttgcctccttctctcaatagaacttgtattttcattttcttggttaagcagttgtctcctaatattatcccatatgctacctagtttgctggtcccaagcagtttactgtacttcactagatttggtacctgctctcccctggacttctttttcaatattctagcctttcctagatgtaaatctttacctccttgttagtgaaattagatataagccatgatttggagagggaagaaatctggaatacttaatttcatttaattatctatgctgatgaatgcctgtatcattgttaataaaggagaattgaaaatactcatttctactttctgccctcaaatttctgtttctatctcaactaggcaagaatcagcagggtgcatgatgccattttaagctgcttcacatcagactgaaatcctaattacagttcataagtgaaacagactaattcaatggcaataccttttgtataggtcctgtgcttaaaggaggcaagtataaattttctaataagaaatccctgcttcttttgggtgcagtggctcacacctgtaataccagcagtttgagaagctaaggcaggtggatcacttgaggccaggagttcgagaccagcctggccaacatagtgaaaccccgtctcttctaaaaatacaaaaaaattagctgggcatggtggtgcacgcctatagtcccagctacacaggaggctgaggcaggagaatcacttgaacccgggaagcagagtctgcagtgagccaagatcgcggcattgcacttcagcctgggcgatagagcaagactctgtctcagaaaaaaaaaaaaggaaagaaagaaatctctgcttccgtactatcaaaacttctaccctagaataccccctggcaccttctaacccaacctaatacagagattttgtagggacccattaacaagctcctatataattataagcagctctcacagtagggttgaaagagaatataaggaaaattagaagtactgtatttttgctattggaaatgaaatattgtttcatgcacctttgaaaaaaataacaggattttacagccttctgatgattcattcaaagcatggggaatagttcatatgtttgttaaatgaaaatcttatgtagctatttgtgtgtccctcccacttcataactacaaaaacatatatatgaatttctaaacaaagtgatattttaaagatgaattgattcaatgtgtacttaccagtttactgtgtggttttatcttcaggtacagatagtttgtggtactacttgaaaatacctttaatattattttcatcagaatttgtaatatataatccagtttgggatgatgaataaaatttttctaatctcttgaaaaaacttgta

SEQ ID NO: 299977 - DNA, 6049 bp, Homo sapiens
gtctgtgactacccagtctgtgctacccaatggaatctggcctatttctgagtgggactgagtttgtagacatgaaggtccatgtaccctgtgaaaccctcgaatacattgaagccaactatggtaagacctggaagattcctgtaaagacgtgggactggaagcgctctcctcccaatgtgcaacccaatggaatctggcctatttctgagtgggatgaggttatccagttatattgagatagtaggttgaaatgggagaatttctcttttggaaaaaaaggtagataactgtttaaaaaatacatgtctatttgtcaaacataagtgggaaccaaagaaaaaatgtgacaagtttgaagacacagaaagagtcatctgatgtaattctctcacttagtactgaggaattttcatgtgccacatacaatgctaggttacagtggagaagccaagatgaatgagacaaatacctacttcttttattcctccttttggtaaacaactcaattttcctttgagggaaccctcccccaccctttgaagagttcaagttctgtacaggtttttaaaacgtgaagtaatgtttgaactggaagatgagctcaccaggcaaagctaaggaaggatatactagttgaaaagaataacccactcctcttctgggcatttaagctggtatgttagtgctacttttaagattgtggagtctgagttaatattcaagtgatcagactttgagtgacatcaagaaaagatgatatcaggttcatttttcaactaatcttatgtggaattgaattagagaacaaggcattattcttttagggaaggtgagagcttatttgtatcagagcttattacttgtcaggataagtaaatttctgtacatgtactgttttcatatgtgaagtgagaagaaactttatgcttgtttaatgcttaaatttccatccattgtgagaatattttcactgacctctgatggcacttgttgacaaatcattcaagtgagaccatgttactagacatgatcttgaaagaggccatgatttcacaaaactcatttttattttattctcagacagtctgttaggtaaaaatatgagaaattcatgtacattttatattttctgaatttataatctgtgcactcccaattttaatgacactaaaatattaatagaattttttaaatatactctaatttttaaaacatactctttattatcttcatttatcaattacagcttcgtatctctaatttatggtctatataccaatttaaatggcatgtaaacctgcctgtttcttctcctcttctaatatatcagatctccaaaatggaagctaaatggtggacttgacaactattcaccctacctcagatcatagagtttgtaaagtttgtgtccctccccagtttttcagtctgttgaatgtcgatggggcaagaactcagacttctactttaccaagtaccacacactctggaatgctttagtttccttttcccctcaagatgtctgagtcagctaggatgctgtttaccccatctctctcttatatcacttgaatgatatattgtaagtgagaggtaaaggaaaatgtaggcacaataagcactgctatttttctctttgtctaggaaaggaagctgaatcttatatcttatctatgctatttaggactactttctggagcttggcagattttcctctgacaccagagaacaatagtagtctcaagaatggaaacctgaatgtctgagggaatgggctggtagactttttcgaaaacaaattagagaaagtaacttacaaccacccattccggatttgtaaagcaacatgaaaacctttgataaatgataaccaacagtcttctgtcctaatttgcattctcaatgcagaattattgggtctttcataaacaacatgagtggtttctggagacatttaagattgtcagcaaacttgtcccaaaatggcacatcatcataatccattttctctttgctagaaaatcagcccatagagtgcattcccaaattctaaatagctgaccctaaattcatttttcatgcttaaaaataatagaacaaataataatactatttttgggcaaaatccaccctacttgatgaggaccatttgcttgtgctcagtatttagaaatgcatacactccacatttctccccatttccaattgggactcccattctttgccaggagatcttacccatcccttttcagattaatcttttatcctttcctgaagtacaaagtcttaagagtgtctgaaatccaagacatcttggcccaattgacacaggttctatattcttccctacatagaccactggctgctgaaatacttttcttgtcttctggtttcacaggcttcagctcatgggttccaccctaacttggggaaacaaaagccttctctagaatctgaaggccaggcttacctctgattctgattcatccatacttcatcttatgtattttaacagttgggttctgtggagtgtccagagaccttgggttaggtatatccatcttcagtacctcattggatcacttttctttcatcacttgagtattctagcagtcattctcctaatctgaccactttcaggtttagtttacctggcttacctggggaagttgacaacttgttggtagttaggcacccatgaatgtctccagagacatcctgagaggcaagattcctcttaattgataaccaggacaaccaggtagtcacccagtcctctctaagcagggagcacttgtccttctctcctctgctgcagctactgatatctggcccctggaataaaaccatagttcctaaaattgagcatccctaagagtagctgcttggtgggacagctgatttctttgattccctagctgcaaaacctgaaattgaccactaggtgacagaatgtttgccagtatccccacaaaacaagttaaaacttaagtgaaaatcattctgcttttgaatcttaaaagctagaaaaaccataatgtaatattctttttaaaccctcttattttataactaaataaataatcacagaaaagaatgatctgaacaagaacagctgaggctagtatctttaacagtgcttgagatgcttaacagagaaggcatccagtgcttcattgaggctaagtctcagggtgtttctgccgcttagtatctttttgttcagattgagaacctaaggcgacagagaggtcaaggggaagtattttctagttcagaattcagaattcttaggcaaccttcatacctttatctggaaaatgccttctctccagacaataagacagttcacatctggagacatcagcctttggtacctaattctctaagctcaagatgcatcccattgccactttaccattctatttcccaagggaaccatcagcaccaacctgctaaatgcctgtatttgaagtctctccccttcctgaagtgaccttttatgaggctctttccttcctaagggacctttccctggtagtagtggtctcattcacaaaaaagaataatagatgtaactggagtcactttgcagttttcaagattttttttttatctgcttggctggaaaggagactagagtatctagtttttagtatttaaactacttttaattatttatattgatactctctgataaatgcaggtagttaagaatagattgtactcattcctttttgagtttgtgacctcaaaccattgtttttattcttacacgactacagtacttcaaatggcacatagataggcaggatattacataggtaagcaggaatttatacattgggtaccagagctaaatctggaaaacacatttggaatgagcttccacacttcagtctaaaatctcacccaaacttatggctacatatttttctaagtttcccccctagtttcactttctggaaagtgaacagttttttaaatcctaaatgttataaatccttaggagaaatattccctcaaaacctagtcaagaaagtgccacattcccaccttctaacaggtaattattagttgtaatagctttaatgcatggaaaaacttcagttactgaccagtcaagagaatttctcaagaaaaatcccagcaacgttccctctttcctccttgtcttccactatcattaagacctgggctagatcacctctaacatctcactcagggaaggcaatgtgttgccataaaaagaccacaagcttttgagttaggcctgaatttgaatttcagcttaatcatgtgggatttatggtgggggccctttcagtctcaatttccacattagtgaactggggaaatgatacatacttctaagggtttttagggggattaaatgaagtatacagttcttagcctcaggcctaggattaagtaagtactcaagaaatgtgcaattttctagttccatgtttcttttctaatcttcaaatggaattatagaaaccatgggtcagaacatattcctttactcaaaagattgcatgactgaatttgcttaagaaaaaaaaaattgtatcaagtcattaatacaattatacattaattatattacattaatacaatatatggtttgtgaattcagagacattaccagtttgcctccttctctcaatagaacttgtattttcattttcttggttaagcagttgtctcctaatattatcccatatgctacctagtttgctggtcccaagcagtttactgtacttcactagatttggtacctgctctcccctggacttctttttcaatattctagcctttcctagatgtaaatctttacctccttgttagtgaaattagatataagccatgatttggagagggaagaaatctggaatacttaatttcatttaattatctatgctgatgaatgcctgtatcattgttaataaaggagaattgaaaatactcatttctactttctgccctcaaatttctgtttctatctcaactaggcaagaatcagcagggtgcatgatgccattttaagctgcttcacatcagactgaaatcctaattacagttcataagtgaaacagactaattcaatggcaataccttttgtataggtcctgtgcttaaaggaggcaagtataaattttctaataagaaatccctgcttcttttgggtgcagtggctcacacctgtaataccagcagtttgagaagctaaggcaggtggatcacttgaggccaggagttcgagaccagcctggccaacatagtgaaaccccgtctcttctaaaaatacaaaaaaattagctgggcatggtggtgcacgcctatagtcccagctacacaggaggctgaggcaggagaatcacttgaacccgggaagcagagtctgcagtgagccaagatcgcggcattgcacttcagcctgggcgatagagcaagactctgtctcagaaaaaaaaaaaaggaaagaaagaaatctctgcttccgtactatcaaaacttctaccctagaataccccctggcaccttctaacccaacctaatacagagattttgtagggacccattaacaagctcctatataattataagcagctctcacagtagggttgaaagagaatataaggaaaattagaagtactgtatttttgctattggaaatgaaatattgtttcatgcacctttgaaaaaaataacaggattttacagccttctgatgattcattcaaagcatggggaatagttcatatgtttgttaaatgaaaatcttatgtagctatttgtgtgtccctcccacttcataactacaaaaacatatatatgaatttctaaacaaagtgatattttaaagatgaattgattcaatgtgtacttaccagtttactgtgtggttttatcttcaggtacagatagtttgtggtactacttgaaaatacctttaatattattttcatcagaatttgtaatatataatccagtttgggatgatgaataaaatttttctaatctcttgaaaaaacttgta

SEQ ID NO: 299978 - DNA, 6304 bp, Homo sapiens
ggggtaaagcggagcggctgcagcctgctgttgagtgagaaaacaaaattatcttcctttccaaatccaaaaagatgaaaacgactgagatactttcaaaagacaaccaagtgagcagcacagactaatgagtagaatcaataagaacgtggttttggcccttttaacgctgacaagttctgcatttctgctgtttcagttgtactactacaagcactatttatcaacaaagaatggagctggtttgtcaaaatccaaaggaagccgaattggatttgatagcacacagtggcgtgcagttaaaaaatttattatgttaacatccaaccaaaatgtaccagtgtttcttattgatcctttgatactggaattgattaataagaactttgaacaagtcaaaaatacttctcatggctctacttcacaatgcaagtttttctgtgttccaagagactttactgcatttgcactgcagtatcacctatggaagaatgaggaaggctggtttcggatagctgagaatatgggatttcagtgcctaaagattgagagtaaagatccccggctagacgggatagactcactctctggaactgaaatccccctgcactatatctgcaaactggccactcatgcgatccacttggtagtctttcatgagaggagtggcaactacctctggcacggccacttgagacttaaagaacacattgacaggaaatttgttcccttccaaaagttacagtttggtcgttatccaggagcttttgacaggccagagttacagcaagttactgttgatggactggaagttctcattccaaaggatccaatgcactttgtagaagaagtaccacactctaggtttattgagtgtaggtataaagaagctcgagcattctttcagcagtaccttgatgataacactgtggaagctgtggcctttcggaagagtgcaaaggaattactgcaactagcagcgaaaacattaaacaaattgggagtaccattctggctgagcagtggaacttgtctaggatggtatcgacaatgcaacattattccttatagcaaagatgttgacctaggaatttttatacaagattacaaatctgatattattttagcatttcaggatgcaggacttccgctcaaacacaaatttgggaaggtagaagacagcttggaactatccttccagggaaaagatgatgtaaaacttgatgtttttttcttctatgaagaaactgatcacatgtggaatggaggcactcaggccaaaacaggaaaaaaattcaaatacctgtttccgaagtttacactgtgctggactgagtttgtagacatgaaggtccatgtaccctgtgaaaccctcgaatacattgaagccaactatggtaagacctggaagattcctgtaaagacgtgggactggaagcgctctcctcccaatgtgcaacccaatggaatctggcctatttctgagtgggatgaggttatccagttatattgagatagtaggttgaaatgggagaatttctcttttggaaaaaaaggtagataactgtttaaaaaatacatgtctatttgtcaaacataagtgggaaccaaagaaaaaatgtgacaagtttgaagacacagaaagagtcatctgatgtaattctctcacttagtactgaggaattttcatgtgccacatacaatgctaggttacagtggagaagccaagatgaatgagacaaatacctacttcttttattcctccttttggtaaacaactcaattttcctttgagggaaccctcccccaccctttgaagagttcaagttctgtacaggtttttaaaacgtgaagtaatgtttgaactggaagatgagctcaccaggcaaagctaaggaaggatatactagttgaaaagaataacccactcctcttctgggcatttaagctggtatgttagtgctacttttaagattgtggagtctgagttaatattcaagtgatcagactttgagtgacatcaagaaaagatgatatcaggttcatttttcaactaatcttatgtggaattgaattagagaacaaggcattattcttttagggaaggtgagagcttatttgtatcagagcttattacttgtcaggataagtaaatttctgtacatgtactgttttcatatgtgaagtgagaagaaactttatgcttgtttaatgcttaaatttccatccattgtgagaatattttcactgacctctgatggcacttgttgacaaatcattcaagtgagaccatgttactagacatgatcttgaaagaggccatgatttcacaaaactcatttttattttattctcagacagtctgttaggtaaaaatatgagaaattcatgtacattttatattttctgaatttataatctgtgcactcccaattttaatgacactaaaatattaatagaattttttaaatatactctaatttttaaaacatactctttattatcttcatttatcaattacagcttcgtatctctaatttatggtctatataccaatttaaatggcatgtaaacctgcctgtttcttctcctcttctaatatatcagatctccaaaatggaagctaaatggtggacttgacaactattcaccctacctcagatcatagagtttgtaaagtttgtgtccctccccagtttttcagtctgttgaatgtcgatggggcaagaactcagacttctactttaccaagtaccacacactctggaatgctttagtttccttttcccctcaagatgtctgagtcagctaggatgctgtttaccccatctctctcttatatcacttgaatgatatattgtaagtgagaggtaaaggaaaatgtaggcacaataagcactgctatttttctctttgtctaggaaaggaagctgaatcttatatcttatctatgctatttaggactactttctggagcttggcagattttcctctgacaccagagaacaatagtagtctcaagaatggaaacctgaatgtctgagggaatgggctggtagactttttcgaaaacaaattagagaaagtaacttacaaccacccattccggatttgtaaagcaacatgaaaacctttgataaatgataaccaacagtcttctgtcctaatttgcattctcaatgcagaattattgggtctttcataaacaacatgagtggtttctggagacatttaagattgtcagcaaacttgtcccaaaatggcacatcatcataatccattttctctttgctagaaaatcagcccatagagtgcattcccaaattctaaatagctgaccctaaattcatttttcatgcttaaaaataatagaacaaataataatactatttttgggcaaaatccaccctacttgatgaggaccatttgcttgtgctcagtatttagaaatgcatacactccacatttctccccatttccaattgggactcccattctttgccaggagatcttacccatcccttttcagattaatcttttatcctttcctgaagtacaaagtcttaagagtgtctgaaatccaagacatcttggcccaattgacacaggttctatattcttccctacatagaccactggctgctgaaatacttttcttgtcttctggtttcacaggcttcagctcatgggttccaccctaacttggggaaacaaaagccttctctagaatctgaaggccaggcttacctctgattctgattcatccatacttcatcttatgtattttaacagttgggttctgtggagtgtccagagaccttgggttaggtatatccatcttcagtacctcattggatcacttttctttcatcacttgagtattctagcagtcattctcctaatctgaccactttcaggtttagtttacctggcttacctggggaagttgacaacttgttggtagttaggcacccatgaatgtctccagagacatcctgagaggcaagattcctcttaattgataaccaggacaaccaggtagtcacccagtcctctctaagcagggagcacttgtccttctctcctctgctgcagctactgatatctggcccctggaataaaaccatagttcctaaaattgagcatccctaagagtagctgcttggtgggacagctgatttctttgattccctagctgcaaaacctgaaattgaccactaggtgacagaatgtttgccagtatccccacaaaacaagttaaaacttaagtgaaaatcattctgcttttgaatcttaaaagctagaaaaaccataatgtaatattctttttaaaccctcttattttataactaaataaataatcacagaaaagaatgatctgaacaagaacagctgaggctagtatctttaacagtgcttgagatgcttaacagagaaggcatccagtgcttcattgaggctaagtctcagggtgtttctgccgcttagtatctttttgttcagattgagaacctaaggcgacagagaggtcaaggggaagtattttctagttcagaattcagaattcttaggcaaccttcatacctttatctggaaaatgccttctctccagacaataagacagttcacatctggagacatcagcctttggtacctaattctctaagctcaagatgcatcccattgccactttaccattctatttcccaagggaaccatcagcaccaacctgctaaatgcctgtatttgaagtctctccccttcctgaagtgaccttttatgaggctctttccttcctaagggacctttccctggtagtagtggtctcattcacaaaaaagaataatagatgtaactggagtcactttgcagttttcaagattttttttttatctgcttggctggaaaggagactagagtatctagtttttagtatttaaactacttttaattatttatattgatactctctgataaatgcaggtagttaagaatagattgtactcattcctttttgagtttgtgacctcaaaccattgtttttattcttacacgactacagtacttcaaatggcacatagataggcaggatattacataggtaagcaggaatttatacattgggtaccagagctaaatctggaaaacacatttggaatgagcttccacacttcagtctaaaatctcacccaaacttatggctacatatttttctaagtttcccccctagtttcactttctggaaagtgaacagttttttaaatcctaaatgttataaatccttaggagaaatattccctcaaaacctagtcaagaaagtgccacattcccaccttctaacaggtaattattagttgtaatagctttaatgcatggaaaaacttcagttactgaccagtcaagagaatttctcaagaaaaatcccagcaacgttccctctttcctccttgtcttccactatcattaagacctgggctagatcacctctaacatctcactcagggaaggcaatgtgttgccataaaaagaccacaagcttttgagttaggcctgaatttgaatttcagcttaatcatgtgggatttatggtgggggccctttcagtctcaatttccacattagtgaactggggaaatgatacatacttctaagggtttttagggggattaaatgaagtatacagttcttagcctcaggcctaggattaagtaagtactcaagaaatgtgcaattttctagttccatgtttcttttctaatcttcaaatggaattatagaaaccatgggtcagaacatattcctttactcaaaagattgcatgactgaatttgcttaagaaaaaaaaaattgtatcaagtcattaatacaattatacattaattatattacattaatacaatatatggtttgtgaattcagagacattaccagtttgcctccttctctcaatagaacttgtattttcattttcttggttaagcagttgtctcctaatattatcccatatgctacctagtttgctggtcccaagcagtttactgtacttcactagatttggtacctgctctcccctgggttcaggtctcacctggcccagtcgcacctaacgtgttgtgcgttggtcgtagcggactcgggggtctgctgttcgaattcataagaacagggcaggttagaagtcgggtcttggtgcacacatatgttgtgtagagttcaggggagagtgcgtcatctgttgttcctaggaagattgtagtggtgagggtgtttattatcatcactgtttgtggttaggtctacctgg

SEQ ID NO: 299979 - DNA, 3564 bp, Homo sapiens
  misc_feature (928)..(928): n is a, c, g, or t
  misc_feature (1024)..(1024): n is a, c, g, or t
atcgagcttcagattgtttactatttaagatgtacttttacaaaggaacaaagaagggaaaaggtatttttgtttttgttgtttggtctgttatcatcaataacctgttcatatgccaattcagagaggtggactccaggttcaggagggagaagagcaaagccgcttcctctctgtgctttgaaacttcacaccctcacggtggcagctgtgtatggaccagtgccctccgcagacagctcacaaaaccagttgaggtgcactaaagggacatgaggtagaatggatgcttccatcacagtaccatcattcagaataactcttccaatttctgctttcagacatgctgcaggtcctcatctgaactgttgggttcgtttttttttttttttttcctgctccaagaaagtgacttcaaaaataactgatcaggatagattattttattttactttttaacactccttctccccttttcccactgaaccaaaaagaaatcccatccctaaaacctgccttctccttttatgcaaaactgaaaatggcaatacattattatagccataatggtatagatagtgattgcgtttggctatgtgttgttttctttttttttaaattatgaatatgtgtaaaatctgaggtaacttgctaacgtgaatggtcatataactttaaagatatatttataattatttaatgacatttggacccttgaaacatttcttagtgtattgatatgttgacttcggtctctaaaagtgctctttattaaataacaaatttcttcagtggtctagagccatatctgaaatattgctaagcaatttcagttcatccaggcacaatgtgattttaaaaatacttccatctccaatatttagatatagattgttttgtgatgtatgaggaatgtatgttagtcttncagatctttgaatgcctctaacacagctttgccttctaaagcggtaattagggatttaaaaaacaacctttagccctttatcagcatgaaatgctngagtgatgtggttttctaatttctttggggtaattatgactcttgtcatattaaaaagacaagcacaagtaaatcattgaactacagaaaaatgttctgtggtttcatagttaagcaaaactctaaatcgccaggcttcatagcaaagacatagtcagctaaaagccgcacatgtggatagagggttcaattatgagacacctagtacaggagagcaaaattgcaccagagattcttaaccaaccagccttaccaaacaacacaacaggggaaccccaatctgccttacccaaggccccactggcagctttccacagaatttgcatttagaggagcagaatgacatcactgtcctttgggagtaggtcctctgaaaaggcagcaggttccagcaggtagctgagctgagaggacatatggcccacggggacctacagacagcctttgacatttgtatttcttacaatggagggccaaggagggcaaggggctgtggagtttggtgtctactagtgtgtatgaatttgagctagagtccttctgtggcatgcactttgaccactcctggcagtcacatggcagatttccaagtgcaaatccttaatccaaacaaggatcatctaatgacaccaccaggccaatccctgctctcctccccgaaaagtcagggtcccttcattggaatcctccacccacccaagcagaatttagcagagatttgccttcaaaccctaacggcccccttgttctctggtccttctcaaacccacctttgtaggccacccagcattgcaggacagcgtgtggggcagctggacctgtgcttcctgcctgggagtctcccttggaattcatcctgactccttctaataaaaatggatgggaaagcaaaacactttgccttctaaaggccgtataccaagtatgcttagataaataagccacttttctattacttaagtaagaaggaagtagtaattgatactatttattgtttgtgtgtggtagcttgaagcacaccactgtccatttatttgtaagtgtaaaatatgtgtgtttgtttcagcagcacttaaaaaagccagtgtctggttacacatttcaattttaattaattgacataaaaatgctaccgccagtgccagctgcatcctatttaattaaaaaggtactatatttgtacattattttttaatgttaaaagggcttttttaagtttacagtacacataccgagtgactttagggatgcttttgtgttgaaatgttactatagtggctgcaggcagcaacccagaaacactttagaagctttttttccttgggaaaaattcaagcacttcttccctccaccctcactccaaccaccccaatgggggtaattcacatttcttagaacaaattctgcccttttttggtctagggattaaaattttgtttttctttctttctttttttttttttttcactgaacccttaatttgcactgggtcatgtgtttgatttgtgatttcaagaccaaagcaaagtcttactactactgtggaaccatgtactagttcctgggaattaaaatagcgtggttctctttgtagcacaaacattgctggaatttgcagtcttttcaatgcagccacatttttatccatttcagttgtctcacaaattttaacccatatcagagttccagaacaggtaccacagctttggttttagattagtggaataacattcagcccagaactgagaaactcaacagattaactatcgtttgctctttagacggtctcactgcctctcacttgccagagccctttcaaaatgagcagagaagtccacaccattagggaccatctgtgataaattcagaagggaggagatgtgtgtacagctttaaggattccctcaattccgaggaaagggactggcccagaatccaggttaatacatggaaacacgaagcattagcaaaagtaataattatacctatggtatttgaaagaacaataataaaagacacttcttccaaaccttgaatttgttgtttttagaaaacgaatgcatttaaaaatattttctatgtgagaattttttagatgtgtgtttacttcatgtttacaaataactgtttgctttttaatgcagtactttgaaatatatcagccaaaaccataacttacaataatttcttaggtattctgaataaaattccatttcttttggatatgctttaccattcttaggtttctgtggaacaaaaatatttgtagcattttgtgtaaatacaagctttcatttttattttttccaattgctattgcccaagaattgctttccatgcacatattgtaaaaattccgctttgtgccacaggtcatgattgtggatgagtttactcttaacttcaaagggactatttgtattgtatgttgcaactgtaaattgaattatttggcatttttctcatgattgtaatattaatttgaagtttgaatttaattttcaataaaatggcttttttggttttgttatgtgtgtacc

SEQ ID NO: 299980 - DNA, 2887 bp, Homo sapiens
ttccggtctgtacaaagatggctgccacattggcgctgtcattttggtactgagcagagcgacgggcttaattcgacccaatccaggccagagtctttctctcaggggcttcctcgtgctcagctaatcctccgatcaatccttgggaatccctgggacctcttcggtatccctactctcagccagggatcatgtcttgggccgctcgcccgcccttcctccctcagcggcatgccgcagggcagtgtgggccggtgggggtgcgaaaagaaatgcattgtggggtcgcgtcccggtggcggcggcgacggccctggctggatcccgcagcggcggcggcggcggcggtggcaggcggagaacaacaaaccccggagccggagccaggggaggctggacgggacgggatgggcgacagcgggcgggactcccgaagcccagacagctcctccccaaatccccttccccagggagtccctcccccttctcctcctgggccacccctacccccttcaacagctccatcccttggaggctctggggccccacccccacccccgatgccaccacccccactgggctctccctttccagtcatcagttcttccatggggtcccctggtctgccccctccagctcccccaggattctccgggcctgtcagcagcccccagattaactcaacagtgtcactccctgggggtgggtctggcccccctgaagatgtgaagccaccagtcttaggggtccggggcctgcactgtccaccccctccaggtggccctggggctggcaaacggctatgtgcaatctgcggggacagaagctcaggcaaacactacggggtttacagctgtgagggttgcaagggcttcttcaaacgcaccatccgcaaagaccttacatactcttgccgggacaacaaagactgcacagtggacaagcgccagcggaaccgctgtcagtactgccgctatcagaagtgcctggccactggcatgaagagggaggcggtacaggaggagcgtcagcggggaaaggacaaggatggggatggggagggggctgggggagcccccgaggagatgcctgtggacaggatcctggaggcagagcttgctgtggaacagaagagtgaccagggcgttgagggtcctgggggaaccgggggtagcggcagcagcccaaatgaccctgtgactaacatctgtcaggcagctgacaaacagctattcacgcttgttgagtgggcgaagaggatcccacacttttcctccttgcctctggatgatcaggtcatattgctgcgggcaggctggaatgaactcctcattgcctccttttcacaccgatccattgatgttcgagatggcatcctccttgccacaggtcttcacgtgcaccgcaactcagcccattcagcaggagtaggagccatctttgatcgggtgctgacagagctagtgtccaaaatgcgtgacatgaggatggacaagacagagcttggctgcctgagggcaatcattctgtttaatccagatgccaagggcctctccaaccctagtgaggtggaggtcctgcgggagaaagtgtatgcatcactggagacctactgcaaacagaagtaccctgagcagcagggacggtttgccaagctgctgctacgtcttcctgccctccggtccattggccttaagtgtctagagcatctgtttttcttcaagctcattggtgacacccccatcgacaccttcctcatggagatgcttgaggctccccatcaactggcctgagctcagacccagacgtggtgcttctcacactggaggagcacacatccaagagggactccaagccctggggcagggtggggggccatgttcccagaaccttgatggggtgagaagtacagggcagaaccaagaacataaaccctccaagggatctgcttgatatcccaagttggaagggaccccagatacctgtgaggactggttgtctctcttcggtggccttgagtctctgaatttgtcgggttctcccatgatttggggtgatttctcaccctctgtccttcccccagcacaaagcactggccttgcctccaggaccttgcttccttctcatcttgcctcattttgcttcccatctgaagagtggaaatggggaactcccccagaggtggatactggggggcaggcctcccaagctgatggacatgagagtagggccctgacaggccttcctcctctcaaacctggcagatgggggcctctctggaagagggaggggccctgtcactgtccagagtctctttttacacttcacctccttctgcagtcagactgaaatataaaaaaggtggtggtggtggtgaaggggctggtggagatgtaggaaccgatctgctatttttaatttcctgtgaggatagagacttgcagttagactcaaagaagtactgtactttcccaggttgactaagaaatgccagtggtggaggtgggtgtttgggaaaggcagggccctgaaatggcctgtccctagggctctccaagcactagccttcccagcttcccgccgccccccccatctcttcctgtctaacttggggaaggggcctgggctgtgaggacagggcccccacaggggatggtttcacgagtgtagtcccggaggccttccctttacagctctcctccagccctgggcacatagcataggctggggacacaggatcctggcctgagaattgaggggaggtggccagcccgcagaggtggggtgctggggctgcatgatttttgccctgcgtcccttctctttggggctcctttcccctctcatacataaaatcgctttcaaattaaaatcgctgttttctgga

SEQ ID NO: 299981 - DNA, 3232 bp, Homo sapiens
ttccggtctgtacaaagatggctgccacattggcgctgtcattttggtactgagcagagcgacgggcttaattcgacccaatccaggccagagtctttctctcaggggcttcctcgtgctcagctaatcctccgatcaatccttgggaatccctgggacctcttcggtatccctactctcagccagggatcatgtcttgggccgctcgcccgcccttcctccctcagcggcatgccgcagggcagtgtgggccggtgggggtgcgaaaagaaatgcattgtggggtcgcgtcccggtggcggcggcgacggccctggctggatcccgcagcggcggcggcggcggcggtggcaggcggagaacaacaaaccccggagccggagccaggggaggctggacgggacgggatgggcgacagcgggcgggactcccgaagcccagacagctcctccccaaatccccttccccagggagtccctcccccttctcctcctgggccacccctacccccttcaacagctccatcccttggaggctctggggccccacccccacccccgatgccaccacccccactgggctctccctttccagtcatcagttcttccatggggtcccctggtctgccccctccagctcccccaggattctccgggcctgtcagcagcccccagattaactcaacagtgtcactccctgggggtgggtctggcccccctgaagatgtgaagccaccagtcttaggggtccggggcctgcactgtccaccccctccaggtggccctggggctggcaaacggctatgtgcaatctgcggggacagaagctcaggcaaacactacggggtttacagctgtgagggttgcaagggcttcttcaaacgcaccatccgcaaagaccttacatactcttgccgggacaacaaagactgcacagtggacaagcgccagcggaaccgctgtcagtactgccgctatcagaagtgcctggccactggcatgaagagggaggcggtacaggaggagcgtcagcggggaaaggacaaggatggggatggggagggggctgggggagcccccgaggagatgcctgtggacaggatcctggaggcagagcttgctgtggaacagaagagtgaccagggcgttgagggtcctgggggaaccgggggtagcggcagcagcccaaatgaccctgtgactaacatctgtcaggcagctgacaaacagctattcacgcttgttgagtgggcgaagaggatcccacacttttcctccttgcctctggatgatcaggtcatattgctgcgggcaggctggaatgaactcctcattgcctccttttcacaccgatccattgatgttcgagatggcatcctccttgccacaggtcttcacgtgcaccgcaactcagcccattcagcaggagtaggagccatctttgatcgggtgctgacagagctagtgtccaaaatgcgtgacatgaggatggacaagacagagcttggctgcctgagggcaatcattctgtttaatccagatgccaagggcctctccaaccctagtgaggtggaggtcctgcgggagaaagtgtatgcatcactggagacctactgcaaacagaagtaccctgagcagcagggacggtttgccaagctgctgctacgtcttcctgccctccggtccattggccttaagtgtctagagcatctgtttttcttcaagctcattggtgacacccccatcgacaccttcctcatggagatgcttgaggctccccatcaactggcctgagctcagacccagacgtggtgcttctcacactggaggagcacacatccaagagggactccaagccctggggcagggtggggggccatgttcccagaaccttgatggggtgagaagtacagggcagaaccaagaacataaaccctccaagggatctgcttgatatcccaagttggaagggaccccagatacctgtgaggactggttgtctctcttcggtggccttgagtctctgaatttgtcgggttctcccatgatttggggtgatttctcaccctctgtccttcccccagcacaaagcactggccttgcctccaggaccttgcttccttctcatcttgcctcattttgcttcccatctgaagagtggaaatggggaactcccccagaggtggatactggggggcaggcctcccaagctgatggacatgagagtagggccctgacaggccttcctcctctcaaacctggcagatgggggcctctctggaagagggaggggccctgtcactgtccagagtctctttttacacttcacctccttctgcagtcagactgaaatataaaaaaggtggtggtggtggtgaaggggctggtggagatgtaggaaccgatctgctatttttaatttcctgtgaggatagagacttgcagttagactcaaagaagtactgtactttcccaggttgactaagaaatgccagtggtggaggtgggtgtttgggaaaggcagggccctgaaatggcctgtccctagggctctccaagcactagccttcccagcttcccgccgccccccccatctcttcctgtctaacttggggaaggggcctgggctgtgaggacagggcccccacaggggatggtttcacgagtgtagtcccggaggccttccctttacagctctcctccagccctgggcacatagcataggctggggacacaggatcctggcctgagaattgaggggaggtggccagcccgcagaggtggggtgctggggctgcatgatttttgccctgcgtcccttctctttggggctcctttcccctctcatacataaaatcgctttcaaattaaaatcgctgttttctggaaataaaaaaaaaaaaaaaaaaaaaaaaaaaaaaaaaaaaaaaaaaaaaaaaaaaacaaaaaaaaaaaaaaaaagagagaggggggcgcgcgccgcaaaagaacgtcccccgcgggggacccacaatcacgaggagcgcacccgagcgtcttggggaccaaaggggggcccccagagagggggagagcactattataagaaagaggaggggcgggggccgcgggggtaacaaccaccggcgggggcggggggaaaacaggcgcgcccggggggagcacaccggggggaaggaggagccaccaccggcggggcggggcaacaaggagggcgggaacacgccaccgac

SEQ ID NO: 299982 - DNA, 3225 bp, Homo sapiens
ttccggtctgtacaaagatggctgccacattggcgctgtcattttggtactgagcagagcgacgggcttaattcgacccaatccaggccagagtctttctctcaggggcttcctcgtgctcagctaatcctccgatcaatccttgggaatccctgggacctcttcggtatccctactctcagccagggatcatgtcttgggccgctcgcccgcccttcctccctcagcggcatgccgcagggcagtgtgggccggtgggggtgcgaaaagaaatgcattgtggggtcgcgtcccggtggcggcggcgacggccctggctggatcccgcagcggcggcggcggcggcggtggcaggcggagaacaacaaaccccggagccggagccaggggaggctggacgggacgggatgggcgacagcgggcgggactcccgaagcccagacagctcctccccaaatccccttccccagggagtccctcccccttctcctcctgggccacccctacccccttcaacagctccatcccttggaggctctggggccccacccccacccccgatgccaccacccccactgggctctccctttccagtcatcagttcttccatggggtcccctggtctgccccctccagctcccccaggattctccgggcctgtcagcagcccccagattaactcaacagtgtcactccctgggggtgggtctggcccccctgaagatgtgaagccaccagtcttaggggtccggggcctgcactgtccaccccctccaggtggccctggggctggcaaacggctatgtgcaatctgcggggacagaagctcaggcaaacactacggggtttacagctgtgagggttgcaagggcttcttcaaacgcaccatccgcaaagaccttacatactcttgccgggacaacaaagactgcacagtggacaagcgccagcggaaccgctgtcagtactgccgctatcagaagtgcctggccactggcatgaagagggaggcggtacaggaggagcgtcagcggggaaaggacaaggatggggatggggagggggctgggggagcccccgaggagatgcctgtggacaggatcctggaggcagagcttgctgtggaacagaagagtgaccagggcgttgagggtcctgggggaaccgggggtagcggcagcagcccaaatgaccctgtgactaacatctgtcaggcagctgacaaacagctattcacgcttgttgagtgggcgaagaggatcccacacttttcctccttgcctctggatgatcaggtcatattgctgcgggcaggctggaatgaactcctcattgcctccttttcacaccgatccattgatgttcgagatggcatcctccttgccacaggtcttcacgtgcaccgcaactcagcccattcagcaggagtaggagccatctttgatcgggtgctgacagagctagtgtccaaaatgcgtgacatgaggatggacaagacagagcttggctgcctgagggcaatcattctgtttaatccagatgccaagggcctctccaaccctagtgaggtggaggtcctgcgggagaaagtgtatgcatcactggagacctactgcaaacagaagtaccctgagcagcagggacggtttgccaagctgctgctacgtcttcctgccctccggtccattggccttaagtgtctagagcatctgtttttcttcaagctcattggtgacacccccatcgacaccttcctcatggagatgcttgaggctccccatcaactggcctgagctcagacccagacgtggtgcttctcacactggaggagcacacatccaagagggactccaagccctggggcagggtggggggccatgttcccagaaccttgatggggtgagaagtacagggcagaaccaagaacataaaccctccaagggatctgcttgatatcccaagttggaagggaccccagatacctgtgaggactggttgtctctcttcggtggccttgagtctctgaatttgtcgggttctcccatgatttggggtgatttctcaccctctgtccttcccccagcacaaagcactggccttgcctccaggaccttgcttccttctcatcttgcctcattttgcttcccatctgaagagtggaaatggggaactcccccagaggtggatactggggggcaggcctcccaagctgatggacatgagagtagggccctgacaggccttcctcctctcaaacctggcagatgggggcctctctggaagagggaggggccctgtcactgtccagagtctctttttacacttcacctccttctgcagtcagactgaaatataaaaaaggtggtggtggtggtgaaggggctggtggagatgtaggaaccgatctgctatttttaatttcctgtgaggatagagacttgcagttagactcaaagaagtactgtactttcccaggttgactaagaaatgccagtggtggaggtgggtgtttgggaaaggcagggccctgaaatggcctgtccctagggctctccaagcactagccttcccagcttcccgccgccccccccatctcttcctgtctaacttggggaaggggcctgggctgtgaggacagggcccccacaggggatggtttcacgagtgtagtcccggaggccttccctttacagctctcctccagccctgggcacatagcataggctggggacacaggatcctggcctgagaattgaggggaggtggccagcccgcagaggtggggtgctggggctgcatgatttttgccctgcgtcccttctctttggggctcctttcccctctcatacataaaatcgctttcaaattaaaatcgctgttttctggaaataaaaaaaaaaaaaaaaaaaaaaaaaaaaaaaaaaaaaaaaaaaaaaaaaaaaaaggggggggggcccaaaaaaaaaccccccggggggggacccaacagttagtcgggcatccaccacacttcttttttcgtccaacagggggcgccccccaatatgggaggggcagcgataataataacacagaggaggacagaggggcgccggatgcattaaaaaaacgcggcagagaagcgacgaaaaacactggtactgccgcagggggaacatcgtggaaggagagaaccccttatcatgggggggagggggcacaattgtgttggcacccaccctcaga

SEQ ID NO: 299983 - DNA, 2869 bp, Homo sapiens
ttccggtctgtacaaagatggctgccacattggcgctgtcattttggtactgagcagagcgacgggcttaattcgacccaatccaggccagagtctttctctcaggggcttcctcgtgctcagctaatcctccgatcaatccttgggaatccctgggacctcttcggtatccctactctcagccagggatcatgtcttgggccgctcgcccgcccttcctccctcagcggcatgccgcagggcagtgtgggccggtgggggtgcgaaaagaaatgcattgtggggtcgcgtcccggtggcggcggcgacggccctggctggatcccgcagcggcggcggcggcggcggtggcaggcggagaacaacaaaccccggagccggagccaggggaggctggacgggacgggatgggcgacagcgggcgggactcccgaagcccagacagctcctccccaaatccccttccccagggagtccctcccccttctcctcctgggccacccctacccccttcaacagctccatcccttggaggctctggggccccacccccacccccgatgccaccacccccactgggctctccctttccagtcatcagttcttccatggggtcccctggtctgccccctccagctcccccaggattctccgggcctgtcagcagcccccagattaactcaacagtgtcactccctgggggtgggtctggcccccctgaagatgtgaagccaccagtcttaggggtccggggcctgcactgtccaccccctccaggtggccctggggctggcaaacggctatgtgcaatctgcggggacagaagctcaggcaaacactacggggtttacagctgtgagggttgcaagggcttcttcaaacgcaccatccgcaaagaccttacatactcttgccgggacaacaaagactgcacagtggacaagcgccagcggaaccgctgtcagtactgccgctatcagaagtgcctggccactggcatgaagagggaggcggtacaggaggagcgtcagcggggaaaggacaaggatggggatggggagggggctgggggagcccccgaggagatgcctgtggacaggatcctggaggcagagcttgctgtggaacagaagagtgaccagggcgttgagggtcctgggggaaccgggggtagcggcagcagcccaaatgaccctgtgactaacatctgtcaggcagctgacaaacagctattcacgcttgttgagtgggcgaagaggatcccacacttttcctccttgcctctggatgatcaggtcatattgctgcgggcaggctggaatgaactcctcattgcctccttttcacaccgatccattgatgttcgagatggcatcctccttgccacaggtcttcacgtgcaccgcaactcagcccattcagcaggagtaggagccatctttgatcgggtgctgacagagctagtgtccaaaatgcgtgacatgaggatggacaagacagagcttggctgcctgagggcaatcattctgtttaatccagatgccaagggcctctccaaccctagtgaggtggaggtcctgcgggagaaagtgtatgcatcactggagacctactgcaaacagaagtaccctgagcagcagggacggtttgccaagctgctgctacgtcttcctgccctccggtccattggccttaagtgtctagagcatctgtttttcttcaagctcattggtgacacccccatcgacaccttcctcatggagatgcttgaggctccccatcaactggcctgagctcagacccagacgtggtgcttctcacactggaggagcacacatccaagagggactccaagccctggggcagggtggggggccatgttcccagaaccttgatggggtgagaagtacagggcagaaccaagaacataaaccctccaagggatctgcttgatatcccaagttggaagggaccccagatacctgtgaggactggttgtctctcttcggtggccttgagtctctgaatttgtcgggttctcccatgatttggggtgatttctcaccacaaagcactggccttgcctccaggaccttgcttccttctcatcttgcctcattttgcttcccatctgaagagtggaaatggggaactcccccagaggtggatactggggggcaggcctcccaagctgatggacatgagagtagggccctgacaggccttcctcctctcaaacctggcagatgggggcctctctggaagagggaggggccctgtcactgtccagagtctctttttacacttcacctccttctgcagtcagactgaaatataaaaaaggtggtggtggtggtgaaggggctggtggagatgtaggaaccgatctgctatttttaatttcctgtgaggatagagacttgcagttagactcaaagaagtactgtactttcccaggttgactaagaaatgccagtggtggaggtgggtgtttgggaaaggcagggccctgaaatggcctgtccctagggctctccaagcactagccttcccagcttcccgccgccccccccatctcttcctgtctaacttggggaaggggcctgggctgtgaggacagggcccccacaggggatggtttcacgagtgtagtcccggaggccttccctttacagctctcctccagccctgggcacatagcataggctggggacacaggatcctggcctgagaattgaggggaggtggccagcccgcagaggtggggtgctggggctgcatgatttttgccctgcgtcccttctctttggggctcctttcccctctcatacataaaatcgctttcaaattaaaatcgctgttttctgga

SEQ ID NO: 299984 - DNA, 2789 bp, Homo sapiens
ttccggtctgtacaaagatggctgccacattggcgctgtcattttggtactgagcagagcgacgggcttaattcgacccaatccaggccagagtctttctctcaggggcttcctcgtgctcagctaatcctccgatcaatccttgggaatccctgggacctcttcggtatccctactctcagccagggatcatgtcttgggccgctcgcccgcccttcctccctcagcggcatgccgcagggcagtgtgggccggtgggggtgcgaaaagaaatgcattgtggggtcgcgtcccggtggcggcggcgacggccctggctggatcccgcagcggcggcggcggcggcggtggcaggcggagaacaacaaaccccggagccggagccaggggaggctggacgggacgggatgggcgacagcgggcgggactcccgaagcccagacagctcctccccaaatccccttccccagggagtccctcccccttctcctcctgggccacccctacccccttcaacagctccatcccttggaggctctggggccccacccccacccccgatgccaccacccccactgggctctccctttccagtcatcagttcttccatggggtcccctggtctgccccctccagctcccccaggattctccgggcctgtcagcagcccccagattaactcaacagtgtcactccctgggggtgggtctggcccccctgaagatgtgaagccaccagtcttaggggtccggggcctgcactgtccaccccctccaggtggccctggggctggcaaacggctatgtgcaatctgcggggacagaagctcaggcaaacactacggggtttacagctgtgagggttgcaagggcttcttcaaacgcaccatccgcaaagaccttacatactcttgccgggacaacaaagactgcacagtggacaagcgccagcggaaccgctgtcagtactgccgctatcagaagtgcctggccactggcatgaagagggaggcggtacaggaggagcgtcagcggggaaaggacaaggatggggatggggagggggctgggggagcccccgaggagatgcctgtggacaggatcctggaggcagagcttgctgtggaacagaagagtgaccagggcgttgagggtcctgggggaaccgggggtagcggcagcagcccaaatgaccctgtgactaacatctgtcaggcagctgacaaacagctattcacgcttgttgagtgggcgaagaggatcccacacttttcctccttgcctctggatgatcaggtcatattgctgcgggcaggctggaatgaactcctcattgcctccttttcacaccgatccattgatgttcgagatggcatcctccttgccacaggtcttcacgtgcaccgcaactcagcccattcagcaggagtaggagccatctttgatcgggtgctgacagagctagtgtccaaaatgcgtgacatgaggatggacaagacagagcttggctgcctgagggcaatcattctgtttaatccagatgccaagggcctctccaaccctagtgaggtggaggtcctgcgggagaaagtgtatgcatcactggagacctactgcaaacagaagtaccctgagcagcagggacggtttgccaagctgctgctacgtcttcctgccctccggtccattggccttaagtgtctagagcatctgtttttcttcaagctcattggtgacacccccatcgacaccttcctcatggagatgcttgaggctccccatcaactggcctgagctcagacccagacgtggtgcttctcacactggaggagcacacatccaagagggactccaagccctggggcagggtggggggccatgttcccagaaccttgatggggtgagaagtacagggcagaaccaagaacataaaccctccaagggatctgcttgatatcccaagttggaagggaccccagatacctgtgaggactggttgtctctcttcggtggccttgagtctctgaatttgtcgggttctcccatgatttggggtgatttctcaccctctgtccttcccccagcacaaagcactggccttgcctccaggaccttgcttccttctcatcttgcctcattttgcttcccatctgaagagtggaaatggggaactcccccagaggtggatactggggggcaggcctcccaagctgatggacatgagagtagggccctgacaggccttcctcctctcaaacctggcagatgggggcctctctggaagagggaggggccctgtcactgtccagagtctctttttacacttcacctccttctgcagtcagactgaaatataaaaaaggtggtggtggtggtgaaggggctggtggagatgtaggaaccgatctgctatttttaatttcctgtgaggatagagacttgcagttagactcaaagaagtactgtactttcccaggttgactaagaaatgccagtggtggaggtgggtgtttgggaaaggcagggccctgaaatggcctgtccctagggctctccaagcactagccttcccagcttcccgccgccccccccatctcttcctgtctaacttggggaaggggcctgggctgtgaggacagggcccccacaggggatggtttcacgagtgtagtcccggaggccttccctttacagctctcctccagccctgggcacatagcataggctggggacacaggatcctggcctgagaattgaggggaggtggcttgggaaataaaaaatacatat

SEQ ID NO: 299985 - DNA, 2639 bp, Homo sapiens
ttccggtctgtacaaagatggctgccacattggcgctgtcattttggtactgagcagagcgacgggcttaattcgacccaatccaggccagagtctttctctcaggggcttcctcgtgctcagctaatcctccgatcaatccttgggaatccctgggacctcttcggtatccctactctcagccagggatcatgtcttgggccgctcgcccgcccttcctccctcagcggcatgccgcagggcagtgtgggccggtgggggtgcgaaaagaaatgcattgtggggtcgcgtcccggtggcggcggcgacggccctggctggatcccgcagcggcggcggcggcggcggtggcaggcggagaacaacaaaccccggagccggagccaggggaggctggacgggacgggatgggcgacagcgggcgggattaactcaacagtgtcactccctgggggtgggtctggcccccctgaagatgtgaagccaccagtcttaggggtccggggcctgcactgtccaccccctccaggtggccctggggctggcaaacggctatgtgcaatctgcggggacagaagctcaggcaaacactacggggtttacagctgtgagggttgcaagggcttcttcaaacgcaccatccgcaaagaccttacatactcttgccgggacaacaaagactgcacagtggacaagcgccagcggaaccgctgtcagtactgccgctatcagaagtgcctggccactggcatgaagagggaggcggtacaggaggagcgtcagcggggaaaggacaaggatggggatggggagggggctgggggagcccccgaggagatgcctgtggacaggatcctggaggcagagcttgctgtggaacagaagagtgaccagggcgttgagggtcctgggggaaccgggggtagcggcagcagcccaaatgaccctgtgactaacatctgtcaggcagctgacaaacagctattcacgcttgttgagtgggcgaagaggatcccacacttttcctccttgcctctggatgatcaggtcatattgctgcgggcaggctggaatgaactcctcattgcctccttttcacaccgatccattgatgttcgagatggcatcctccttgccacaggtcttcacgtgcaccgcaactcagcccattcagcaggagtaggagccatctttgatcgggtgctgacagagctagtgtccaaaatgcgtgacatgaggatggacaagacagagcttggctgcctgagggcaatcattctgtttaatccagatgccaagggcctctccaaccctagtgaggtggaggtcctgcgggagaaagtgtatgcatcactggagacctactgcaaacagaagtaccctgagcagcagggacggtttgccaagctgctgctacgtcttcctgccctccggtccattggccttaagtgtctagagcatctgtttttcttcaagctcattggtgacacccccatcgacaccttcctcatggagatgcttgaggctccccatcaactggcctgagctcagacccagacgtggtgcttctcacactggaggagcacacatccaagagggactccaagccctggggcagggtggggggccatgttcccagaaccttgatggggtgagaagtacagggcagaaccaagaacataaaccctccaagggatctgcttgatatcccaagttggaagggaccccagatacctgtgaggactggttgtctctcttcggtggccttgagtctctgaatttgtcgggttctcccatgatttggggtgatttctcaccctctgtccttcccccagcacaaagcactggccttgcctccaggaccttgcttccttctcatcttgcctcattttgcttcccatctgaagagtggaaatggggaactcccccagaggtggatactggggggcaggcctcccaagctgatggacatgagagtagggccctgacaggccttcctcctctcaaacctggcagatgggggcctctctggaagagggaggggccctgtcactgtccagagtctctttttacacttcacctccttctgcagtcagactgaaatataaaaaaggtggtggtggtggtgaaggggctggtggagatgtaggaaccgatctgctatttttaatttcctgtgaggatagagacttgcagttagactcaaagaagtactgtactttcccaggttgactaagaaatgccagtggtggaggtgggtgtttgggaaaggcagggccctgaaatggcctgtccctagggctctccaagcactagccttcccagcttcccgccgccccccccatctcttcctgtctaacttggggaaggggcctgggctgtgaggacagggcccccacaggggatggtttcacgagtgtagtcccggaggccttccctttacagctctcctccagccctgggcacatagcataggctggggacacaggatcctggcctgagaattgaggggaggtggccagcccgcagaggtggggtgctggggctgcatgatttttgccctgcgtcccttctctttggggctcctttcccctctcatacataaaatcgctttcaaattaaaatcgctgttttctgga

SEQ ID NO: 299986 - DNA, 2386 bp, Homo sapiens
ctttggggttgtgctccagggatggcctttcacatagactgcagtgtaaatgacagcctctggaatgtgcattgcagggccttgcttagtggtagggaatgatttccatcacttctgtgacattctgcttcccaataagtcttcctgtgacttccctatttcccccatcccagattaactcaacagtgtcactccctgggggtgggtctggcccccctgaagatgtgaagccaccagtcttaggggtccggggcctgcactgtccaccccctccaggtggccctggggctggcaaacggctatgtgcaatctgcggggacagaagctcaggcaaacactacggggtttacagctgtgagggttgcaagggcttcttcaaacgcaccatccgcaaagaccttacatactcttgccgggacaacaaagactgcacagtggacaagcgccagcggaaccgctgtcagtactgccgctatcagaagtgcctggccactggcatgaagagggaggcggtacaggaggagcgtcagcggggaaaggacaaggatggggatggggagggggctgggggagcccccgaggagatgcctgtggacaggatcctggaggcagagcttgctgtggaacagaagagtgaccagggcgttgagggtcctgggggaaccgggggtagcggcagcagcccaaatgaccctgtgactaacatctgtcaggcagctgacaaacagctattcacgcttgttgagtgggcgaagaggatcccacacttttcctccttgcctctggatgatcaggtcatattgctgcgggcaggctggaatgaactcctcattgcctccttttcacaccgatccattgatgttcgagatggcatcctccttgccacaggtcttcacgtgcaccgcaactcagcccattcagcaggagtaggagccatctttgatcgggtgctgacagagctagtgtccaaaatgcgtgacatgaggatggacaagacagagcttggctgcctgagggcaatcattctgtttaatccagatgccaagggcctctccaaccctagtgaggtggaggtcctgcgggagaaagtgtatgcatcactggagacctactgcaaacagaagtaccctgagcagcagggacggtttgccaagctgctgctacgtcttcctgccctccggtccattggccttaagtgtctagagcatctgtttttcttcaagctcattggtgacacccccatcgacaccttcctcatggagatgcttgaggctccccatcaactggcctgagctcagacccagacgtggtgcttctcacactggaggagcacacatccaagagggactccaagccctggggcagggtggggggccatgttcccagaaccttgatggggtgagaagtacagggcagaaccaagaacataaaccctccaagggatctgcttgatatcccaagttggaagggaccccagatacctgtgaggactggttgtctctcttcggtggccttgagtctctgaatttgtcgggttctcccatgatttggggtgatttctcaccctctgtccttcccccagcacaaagcactggccttgcctccaggaccttgcttccttctcatcttgcctcattttgcttcccatctgaagagtggaaatggggaactcccccagaggtggatactggggggcaggcctcccaagctgatggacatgagagtagggccctgacaggccttcctcctctcaaacctggcagatgggggcctctctggaagagggaggggccctgtcactgtccagagtctctttttacacttcacctccttctgcagtcagactgaaatataaaaaaggtggtggtggtggtgaaggggctggtggagatgtaggaaccgatctgctatttttaatttcctgtgaggatagagacttgcagttagactcaaagaagtactgtactttcccaggttgactaagaaatgccagtggtggaggtgggtgtttgggaaaggcagggccctgaaatggcctgtccctagggctctccaagcactagccttcccagcttcccgccgccccccccatctcttcctgtctaacttggggaaggggcctgggctgtgaggacagggcccccacaggggatggtttcacgagtgtagtcccggaggccttccctttacagctctcctccagccctgggcacatagcataggctggggacacaggatcctggcctgagaattgaggggaggtggccagcccgcagaggtggggtgctggggctgcatgatttttgccctgcgtcccttctctttggggctcctttcccctctcatacataaaatcgctttcaaattaaaatcgctgttttctgga

SEQ ID NO: 299987 - DNA, 2749 bp, Homo sapiens
ttccggtctgtacaaagatggctgccacattggcgctgtcattttggtactgagcagagcgacgggcttaattcgacccaatccaggccagagtctttctctcaggggcttcctcgtgctcagctaatcctccgatcaatccttgggaatccctgggacctcttcggtatccctactctcagccagggatcatgtcttgggccgctcgcccgcccttcctccctcagcggcatgccgcagggcagtgtgggccggtgggggtgcgaaaagaaatgcattgtggggtcgcgtcccggtggcggcggcgacggccctggctggatcccgcagcggcggcggcggcggcggtggcaggcggagaacaacaaaccccggagccggagccaggggaggctggacgggacgggatgggcgacagcgggcgggactcccgaagcccagacagctcctccccaaatccccttccccagggagtccctcccccttctcctcctgggccacccctacccccttcaacagctccatcccttggaggctctggggccccacccccacccccgatgccaccacccccactgggctctccctttccagtcatcagttcttccatggggtcccctggtctgccccctccagctcccccaggattctccgggcctgtcagcagcccccagattaactcaacagtgtcactccctgggggtgggtctggcccccctgaagatgtgaagccaccagtcttaggggtccggggcctgcactgtccaccccctccaggtggccctggggctggcaaacggctatgtgcaatctgcggggacagaagctcaggcaaacactacggggtttacagctgtgagggttgcaagggcttcttcaaacgcaccatccgcaaagaccttacatactcttgccgggacaacaaagactgcacagtggacaagcgccagcggaaccgctgtcagtactgccgctatcagaagtgcctggccactggcatgaagagggaggcggtacaggaggagcgtcagcggggaaaggacaaggatggggatggggagggggctgggggagcccccgaggagatgcctgtggacaggatcctggaggcagagcttgctgtggaacagaagagtgaccagggcgttgagggtcctgggggaaccgggggtagcggcagcagcccaaatgaccctgtgactaacatctgtcaggcagctgacaaacagctattcacgcttgttgagtgggcgaagaggatcccacacttttcctccttgcctctggatgatcaggtcatattgctgcgggcaggctggaatgaactcctcattgcctccttttcacaccgatccattgatgttcgagatggcatcctccttgccacaggtcttcacgtgcaccgcaactcagcccattcagcaggagtaggagccatctttgatcgggtgctgacagagctagtgtccaaaatgcgtgacatgaggatggacaagacagagcttggctgcctgagggcaatcattctgtttaatccagatgccaagggcctctccaaccctagtgaggtggaggtcctgcgggagaaagtgtatgcatcactggagacctactgcaaacagaagtaccctgagcagcagggacggtttgccaagctgctgctacgtcttcctgccctccggtccattggccttaagtgtctagagcatctgtttttcttcaagctcattggtgacacccccatcgacaccttcctcatggagatgcttgaggctccccatcaactggcctgagctcagacccagacgtggtgcttctcacactggaggagcacacatccaagagggactccaagccctggggcagggtggggggccatgttcccagaaccttgatggggtgagaagtacagggcagaaccaagaacataaaccctccaagggatctgcttgatatcccaagttggaagggaccccagatacctgtgaggactggttgtctctcttcggtggccttgagtctctgaatttgtcgggttctcccatgatttggggtgatttctcaccctctgtccttcccccagcacaaagcactggccttgcctccaggaccttgcttccttctcatcttgcctcattttgcttcccatctgaagagtggaaatggggaactcccccagaggtggatactggggggcaggcctcccaagctgatggacatgagagtagggccctgacaggccttcctcctctcaaacctggcagatgggggcctctctggaagagggaggggccctgtcactgtccagagtctctttttacacttcacctccttctgcagtcagactgaaatataaaaaaggtggtggtggtggtgaaggggctggtggagatgtaggaaccgatctgctatttttaatttcctgtgaggatagagacttgcagttagactcaaagaagtactgtactttcccaggttgactaagaaatgccagtggtggaggtgggttagaaaataacaagtcatcccgagtttccattgtggcccagtggttaacgaatctgactaggaaccatgaggttgtgggttcgatccctggccttgcttagtgggttaaggatccagtgttgatgtgagctgtggtgtaggtcgcagatgtggctcagatctggcattgctgtggctctggataggccggtggctacagctctgattggacccctagccttgggaaataaaaaatacatat

SEQ ID NO: 299988 - DNA, 3284 bp, Homo sapiens
ttccggtctgtacaaagatggctgccacattggcgctgtcattttggtactgagcagagcgacgggcttaattcgacccaatccaggccagagtctttctctcaggggcttcctcgtgctcagctaatcctccgatcaatccttgggaatccctgggacctcttcggtatccctactctcagccagggatcatgtcttgggccgctcgcccgcccttcctccctcagcggcatgccgcagggcagtgtgggccggtgggggtgcgaaaagaaatgcattgtggggtcgcgtcccggtggcggcggcgacggccctggctggatcccgcagcggcggcggcggcggcggtggcaggcggagaacaacaaaccccggagccggagccaggggaggctggacgggacgggatgggcgacagcgggcgggactcccgaagcccagacagctcctccccaaatccccttccccagggagtccctcccccttctcctcctgggccacccctacccccttcaacagctccatcccttggaggctctggggccccacccccacccccgatgccaccacccccactgggctctccctttccagtcatcagttcttccatggggtcccctggtctgccccctccagctcccccaggattctccgggcctgtcagcagcccccagattaactcaacagtgtcactccctgggggtgggtctggcccccctgaagatgtgaagccaccagtcttaggggtccggggcctgcactgtccaccccctccaggtggccctggggctggcaaacggctatgtgcaatctgcggggacagaagctcaggcaaacactacggggtttacagctgtgagggttgcaagggcttcttcaaacgcaccatccgcaaagaccttacatactcttgccgggacaacaaagactgcacagtggacaagcgccagcggaaccgctgtcagtactgccgctatcagaagtgcctggccactggcatgaagagggaggcggtacaggaggagcgtcagcggggaaaggacaaggatggggatggggagggggctgggggagcccccgaggagatgcctgtggacaggatcctggaggcagagcttgctgtggaacagaagagtgaccagggcgttgagggtcctgggggaaccgggggtagcggcagcagcgtgagtgttggggtcaatccactctccttcgtgatgggggttgggggaggcagtctaggtctgttctacatcccctccccctcctttcccctcataaccttcctaacactacttgggactggaggtgctgccaaacaaggtctttcaaacatctgaggtggatgtgatagctccttctgtctccactccccaaacaacccactggcagaaccataggcatgtcccaaataaataattgtttgcactaatgccagaagagaagactcacttacagggattggtttggatggggctcacaggaagactatatgtaaggagggggtgtcaaaagcctcttacaagggggctcccagcatatctcaaaatcttccataactcttacccccgtcccctgcagccaaatgaccctgtgactaacatctgtcaggcagctgacaaacagctattcacgcttgttgagtgggcgaagaggatcccacacttttcctccttgcctctggatgatcaggtcatattgctgcgggcaggctggaatgaactcctcattgcctccttttcacaccgatccattgatgttcgagatggcatcctccttgccacaggtcttcacgtgcaccgcaactcagcccattcagcaggagtaggagccatctttgatcgggtgctgacagagctagtgtccaaaatgcgtgacatgaggatggacaagacagagcttggctgcctgagggcaatcattctgtttaatccagatgccaagggcctctccaaccctagtgaggtggaggtcctgcgggagaaagtgtatgcatcactggagacctactgcaaacagaagtaccctgagcagcagggacggtttgccaagctgctgctacgtcttcctgccctccggtccattggccttaagtgtctagagcatctgtttttcttcaagctcattggtgacacccccatcgacaccttcctcatggagatgcttgaggctccccatcaactggcctgagctcagacccagacgtggtgcttctcacactggaggagcacacatccaagagggactccaagccctggggcagggtggggggccatgttcccagaaccttgatggggtgagaagtacagggcagaaccaagaacataaaccctccaagggatctgcttgatatcccaagttggaagggaccccagatacctgtgaggactggttgtctctcttcggtggccttgagtctctgaatttgtcgggttctcccatgatttggggtgatttctcaccctctgtccttcccccagcacaaagcactggccttgcctccaggaccttgcttccttctcatcttgcctcattttgcttcccatctgaagagtggaaatggggaactcccccagaggtggatactggggggcaggcctcccaagctgatggacatgagagtagggccctgacaggccttcctcctctcaaacctggcagatgggggcctctctggaagagggaggggccctgtcactgtccagagtctctttttacacttcacctccttctgcagtcagactgaaatataaaaaaggtggtggtggtggtgaaggggctggtggagatgtaggaaccgatctgctatttttaatttcctgtgaggatagagacttgcagttagactcaaagaagtactgtactttcccaggttgactaagaaatgccagtggtggaggtgggtgtttgggaaaggcagggccctgaaatggcctgtccctagggctctccaagcactagccttcccagcttcccgccgccccccccatctcttcctgtctaacttggggaaggggcctgggctgtgaggacagggcccccacaggggatggtttcacgagtgtagtcccggaggccttccctttacagctctcctccagccctgggcacatagcataggctggggacacaggatcctggcctgagaattgaggggaggtggccagcccgcagaggtggggtgctggggctgcatgatttttgccctgcgtcccttctctttggggctcctttcccctctcatacataaaatcgctttcaaattaaaatcgctgttttctgga

SEQ ID NO: 299989 - DNA, 3488 bp, Homo sapiens
ttccggtctgtacaaagatggctgccacattggcgctgtcattttggtactgagcagagcgacgggcttaattcgacccaatccaggccagagtctttctctcaggggcttcctcgtgctcagctaatcctccgatcaatccttgggaatccctgggacctcttcggtatccctactctcagccagggatcatgtcttgggccgctcgcccgcccttcctccctcagcggcatgccgcagggcagtgtgggccggtgggggtgcgaaaagaaatgcattgtggggtcgcgtcccggtggcggcggcgacggccctggctggatcccgcagcggcggcggcggcggcggtggcaggcggagaacaacaaaccccggagccggagccaggggaggctggacgggacgggatgggcgacagcgggcgggactcccgaagcccagacagctcctccccaaatccccttccccagggagtccctcccccttctcctcctgggccacccctacccccttcaacagctccatcccttggaggctctggggccccacccccacccccgatgccaccacccccactgggctctccctttccagtcatcagttcttccatggggtcccctggtctgccccctccagctcccccaggattctccgggcctgtcagcagcccccagattaactcaacagtgtcactccctgggggtgggtctggcccccctgaagatgtgaagccaccagtcttaggggtccggggcctgcactgtccaccccctccaggtggccctggggctggcaaacggctatgtgcaatctgcggggacagaagctcaggcaaacactacggggtttacagctgtgagggttgcaagggcttcttcaaacgcaccatccgcaaagaccttacatactcttgccgggacaacaaagactgcacagtggacaagcgccagcggaaccgctgtcagtactgccgctatcagaagtgcctggccactggcatgaagagggaggcggtacaggaggagcgtcagcggggaaaggacaaggatggggatggggagggggctgggggagcccccgaggagatgcctgtggacaggatcctggaggcagagcttgctgtggaacagaagagtgaccagggcgttgagggtcctgggggaaccgggggtagcggcagcagcgtgagtgttggggtcaatccactctccttcgtgatgggggttgggggaggcagtctaggtctgttctacatcccctccccctcctttcccctcataaccttcctaacactacttgggactggaggtgctgccaaacaaggtctttcaaacatctgaggtggatgtgatagctccttctgtctccactccccaaacaacccactggcagaaccataggcatgtcccaaataaataattgtttgcactaatgccagaagagaagactcacttacagggattggtttggatggggctcacaggaagactatatgtaaggagggggtgtcaaaagcctcttacaagggggctcccagcatatctcaaaatcttccataactcttacccccgtcccctgcagccaaatgaccctgtgactaacatctgtcaggcagctgacaaacagctattcacgcttgttgagtgggcgaagaggatcccacacttttcctccttgcctctggatgatcaggtcatattgctgcgggcaggtcagtgaccttggatccctttgacttcttgacatttgacccctctttgacttcccgatctttagtgaccccagtggccttaccttgcgtacccagggagccaaacttgctgacctcgccacctcttttctccttctcttccactgatgtgctttgaatcccttggcctgatttctggctcctgacccttgctgccccacccaggctggaatgaactcctcattgcctccttttcacaccgatccattgatgttcgagatggcatcctccttgccacaggtcttcacgtgcaccgcaactcagcccattcagcaggagtaggagccatctttgatcgggtgctgacagagctagtgtccaaaatgcgtgacatgaggatggacaagacagagcttggctgcctgagggcaatcattctgtttaatccagatgccaagggcctctccaaccctagtgaggtggaggtcctgcgggagaaagtgtatgcatcactggagacctactgcaaacagaagtaccctgagcagcagggacggtttgccaagctgctgctacgtcttcctgccctccggtccattggccttaagtgtctagagcatctgtttttcttcaagctcattggtgacacccccatcgacaccttcctcatggagatgcttgaggctccccatcaactggcctgagctcagacccagacgtggtgcttctcacactggaggagcacacatccaagagggactccaagccctggggcagggtggggggccatgttcccagaaccttgatggggtgagaagtacagggcagaaccaagaacataaaccctccaagggatctgcttgatatcccaagttggaagggaccccagatacctgtgaggactggttgtctctcttcggtggccttgagtctctgaatttgtcgggttctcccatgatttggggtgatttctcaccctctgtccttcccccagcacaaagcactggccttgcctccaggaccttgcttccttctcatcttgcctcattttgcttcccatctgaagagtggaaatggggaactcccccagaggtggatactggggggcaggcctcccaagctgatggacatgagagtagggccctgacaggccttcctcctctcaaacctggcagatgggggcctctctggaagagggaggggccctgtcactgtccagagtctctttttacacttcacctccttctgcagtcagactgaaatataaaaaaggtggtggtggtggtgaaggggctggtggagatgtaggaaccgatctgctatttttaatttcctgtgaggatagagacttgcagttagactcaaagaagtactgtactttcccaggttgactaagaaatgccagtggtggaggtgggtgtttgggaaaggcagggccctgaaatggcctgtccctagggctctccaagcactagccttcccagcttcccgccgccccccccatctcttcctgtctaacttggggaaggggcctgggctgtgaggacagggcccccacaggggatggtttcacgagtgtagtcccggaggccttccctttacagctctcctccagccctgggcacatagcataggctggggacacaggatcctggcctgagaattgaggggaggtggccagcccgcagaggtggggtgctggggctgcatgatttttgccctgcgtcccttctctttggggctcctttcccctctcatacataaaatcgctttcaaattaaaatcgctgttttctgga

SEQ ID NO: 299990 - DNA, 2987 bp, Homo sapiens
ctttggggttgtgctccagggatggcctttcacatagactgcagtgtaaatgacagcctctggaatgtgcattgcagggccttgcttagtggtagggaatgatttccatcacttctgtgacattctgcttcccaataagtcttcctgtgacttccctatttcccccatcccagattaactcaacagtgtcactccctgggggtgggtctggcccccctgaagatgtgaagccaccagtcttaggggtccggggcctgcactgtccaccccctccaggtggccctggggctggcaaacggctatgtgcaatctgcggggacagaagctcaggcaaacactacggggtttacagctgtgagggttgcaagggcttcttcaaacgcaccatccgcaaagaccttacatactcttgccgggacaacaaagactgcacagtggacaagcgccagcggaaccgctgtcagtactgccgctatcagaagtgcctggccactggcatgaagagggaggcggtacaggaggagcgtcagcggggaaaggacaaggatggggatggggagggggctgggggagcccccgaggagatgcctgtggacaggatcctggaggcagagcttgctgtggaacagaagagtgaccagggcgttgagggtcctgggggaaccgggggtagcggcagcagcgtgagtgttggggtcaatccactctccttcgtgatgggggttgggggaggcagtctaggtctgttctacatcccctccccctcctttcccctcataaccttcctaacactacttgggactggaggtgctgccaaacaaggtctttcaaacatctgaggtggatgtgatagctccttctgtctccactccccaaacaacccactggcagaaccataggcatgtcccaaataaataattgtttgcactaatgccagaagagaagactcacttacagggattggtttggatggggctcacaggaagactatatgtaaggagggggtgtcaaaagcctcttacaagggggctcccagcatatctcaaaatcttccataactcttacccccgtcccctgcagccaaatgaccctgtgactaacatctgtcaggcagctgacaaacagctattcacgcttgttgagtgggcgaagaggatcccacacttttcctccttgcctctggatgatcaggtcatattgctgcgggcaggtcagtgaccttggatccctttgacttcttgacatttgacccctctttgacttcccgatctttagtgaccccagtggccttaccttgcgtacccagggagccaaacttgctgacctcgccacctcttttctccttctcttccactgatgtgctttgaatcccttggcctgatttctggctcctgacccttgctgccccacccaggctggaatgaactcctcattgcctccttttcacaccgatccattgatgttcgagatggcatcctccttgccacaggtcttcacgtgcaccgcaactcagcccattcagcaggagtaggagccatctttgatcgggtgctgacagagctagtgtccaaaatgcgtgacatgaggatggacaagacagagcttggctgcctgagggcaatcattctgtttaatccagatgccaagggcctctccaaccctagtgaggtggaggtcctgcgggagaaagtgtatgcatcactggagacctactgcaaacagaagtaccctgagcagcagggacggtttgccaagctgctgctacgtcttcctgccctccggtccattggccttaagtgtctagagcatctgtttttcttcaagctcattggtgacacccccatcgacaccttcctcatggagatgcttgaggctccccatcaactggcctgagctcagacccagacgtggtgcttctcacactggaggagcacacatccaagagggactccaagccctggggcagggtggggggccatgttcccagaaccttgatggggtgagaagtacagggcagaaccaagaacataaaccctccaagggatctgcttgatatcccaagttggaagggaccccagatacctgtgaggactggttgtctctcttcggtggccttgagtctctgaatttgtcgggttctcccatgatttggggtgatttctcaccctctgtccttcccccagcacaaagcactggccttgcctccaggaccttgcttccttctcatcttgcctcattttgcttcccatctgaagagtggaaatggggaactcccccagaggtggatactggggggcaggcctcccaagctgatggacatgagagtagggccctgacaggccttcctcctctcaaacctggcagatgggggcctctctggaagagggaggggccctgtcactgtccagagtctctttttacacttcacctccttctgcagtcagactgaaatataaaaaaggtggtggtggtggtgaaggggctggtggagatgtaggaaccgatctgctatttttaatttcctgtgaggatagagacttgcagttagactcaaagaagtactgtactttcccaggttgactaagaaatgccagtggtggaggtgggtgtttgggaaaggcagggccctgaaatggcctgtccctagggctctccaagcactagccttcccagcttcccgccgccccccccatctcttcctgtctaacttggggaaggggcctgggctgtgaggacagggcccccacaggggatggtttcacgagtgtagtcccggaggccttccctttacagctctcctccagccctgggcacatagcataggctggggacacaggatcctggcctgagaattgaggggaggtggccagcccgcagaggtggggtgctggggctgcatgatttttgccctgcgtcccttctctttggggctcctttcccctctcatacataaaatcgctttcaaattaaaatcgctgttttctgga

SEQ ID NO: 299991 - DNA, 2812 bp, Homo sapiens
ttccggtctgtacaaagatggctgccacattggcgctgtcattttggtactgagcagagcgacgggcttaattcgacccaatccaggccagagtctttctctcaggggcttcctcgtgctcagctaatcctccgatcaatccttgggaatccctgggacctcttcggtatccctactctcagccagggatcatgtcttgggccgctcgcccgcccttcctccctcagcggcatgccgcagggcagtgtgggccggtgggggtgcgaaaagaaatgcattgtggggtcgcgtcccggtggcggcggcgacggccctggctggatcccgcagcggcggcggcggcggcggtggcaggcggagaacaacaaaccccggagccggagccaggggaggctggacgggacgggatgggcgacagcgggcgggactcccgaagcccagacagctcctccccaaatccccttccccagggagtccctcccccttctcctcctgggccacccctacccccttcaacagctccatcccttggaggctctggggccccacccccacccccgatgccaccacccccactgggctctccctttccagtcatcagttcttccatggggtcccctggtctgccccctccagctcccccaggattctccgggcctgtcagcagcccccagattaactcaacagtgtcactccctgggggtgggtctggcccccctgaagatgtgaagccaccagtcttaggggtccggggcctgcactgtccaccccctccaggtggccctggggctggcaaacggctatgtgcaatctgcggggacagaagctcaggcaaacactacggggtttacagctgtgagggttgcaagggcttcttcaaacgcaccatccgcaaagaccttacatactcttgccgggacaacaaagactgcacagtggacaagcgccagcggaaccgctgtcagtactgccgctatcagaagtgcctggccactggcatgaagagggaggcggtacaggaggagcgtcagcggggaaaggacaaggatggggatggggagggggctgggggagcccccgaggagatgcctgtggacaggatcctggaggcagagcttgctgtggaacagaagagtgaccagggcgttgagggtcctgggggaaccgggggtagcggcagcagcccaaatgaccctgtgactaacatctgtcaggcagctgacaaacagctattcacgcttgttgagtgggcgaagaggatcccacacttttcctccttgcctctggatgatcaggtcatattgctgcgggcaggtcttcacgtgcaccgcaactcagcccattcagcaggagtaggagccatctttgatcgggtgctgacagagctagtgtccaaaatgcgtgacatgaggatggacaagacagagcttggctgcctgagggcaatcattctgtttaatccagatgccaagggcctctccaaccctagtgaggtggaggtcctgcgggagaaagtgtatgcatcactggagacctactgcaaacagaagtaccctgagcagcagggacggtttgccaagctgctgctacgtcttcctgccctccggtccattggccttaagtgtctagagcatctgtttttcttcaagctcattggtgacacccccatcgacaccttcctcatggagatgcttgaggctccccatcaactggcctgagctcagacccagacgtggtgcttctcacactggaggagcacacatccaagagggactccaagccctggggcagggtggggggccatgttcccagaaccttgatggggtgagaagtacagggcagaaccaagaacataaaccctccaagggatctgcttgatatcccaagttggaagggaccccagatacctgtgaggactggttgtctctcttcggtggccttgagtctctgaatttgtcgggttctcccatgatttggggtgatttctcaccctctgtccttcccccagcacaaagcactggccttgcctccaggaccttgcttccttctcatcttgcctcattttgcttcccatctgaagagtggaaatggggaactcccccagaggtggatactggggggcaggcctcccaagctgatggacatgagagtagggccctgacaggccttcctcctctcaaacctggcagatgggggcctctctggaagagggaggggccctgtcactgtccagagtctctttttacacttcacctccttctgcagtcagactgaaatataaaaaaggtggtggtggtggtgaaggggctggtggagatgtaggaaccgatctgctatttttaatttcctgtgaggatagagacttgcagttagactcaaagaagtactgtactttcccaggttgactaagaaatgccagtggtggaggtgggtgtttgggaaaggcagggccctgaaatggcctgtccctagggctctccaagcactagccttcccagcttcccgccgccccccccatctcttcctgtctaacttggggaaggggcctgggctgtgaggacagggcccccacaggggatggtttcacgagtgtagtcccggaggccttccctttacagctctcctccagccctgggcacatagcataggctggggacacaggatcctggcctgagaattgaggggaggtggccagcccgcagaggtggggtgctggggctgcatgatttttgccctgcgtcccttctctttggggctcctttcccctctcatacataaaatcgctttcaaattaaaatcgctgttttctgga

SEQ ID NO: 299992 - DNA, 2597 bp, Homo sapiens
ttccggtctgtacaaagatggctgccacattggcgctgtcattttggtactgagcagagcgacgggcttaattcgacccaatccaggccagagtctttctctcaggggcttcctcgtgctcagctaatcctccgatcaatccttgggaatccctgggacctcttcggtatccctactctcagccagggatcatgtcttgggccgctcgcccgcccttcctccctcagcggcatgccgcagggcagtgtgggccggtgggggtgcgaaaagaaatgcattgtggggtcgcgtcccggtggcggcggcgacggccctggctggatcccgcagcggcggcggcggcggcggtggcaggcggagaacaacaaaccccggagccggagccaggggaggctggacgggacgggatgggcgacagcgggcgggactcccgaagcccagacagctcctccccaaatccccttccccagggagtccctcccccttctcctcctgggccacccctacccccttcaacagctccatcccttggaggctctggggccccacccccacccccgatgccaccacccccactgggctctccctttccagtcatcagttcttccatggggtcccctggtctgccccctccagctcccccaggattctccgggcctgtcagcagcccccagattaactcaacagtgtcactccctgggggtgggtctggcccccctgaagatgtgaagccaccagtcttaggggtccggggcctgcactgtccaccccctccaggtggccctggggctggcaaacggctatgtgcaatctgcggggacagaagctcaggcaaacactacggggtttacagctgtgagggttgcaagggcttcttcaaacgcaccatccgcaaagaccttacatactcttgccgggacaacaaagactgcacagtggacaagcgccagcggaaccgctgtcagtactgccgctatcagaagtgcctggccactggcatgaagagggaggcggtacaggaggagcgtcagcggggaaaggacaaggatggggatggggagggggctgggggagcccccgaggagatgcctgtggacaggatcctggaggcagagcttgctgtggaacagaagagtgaccagggcgttgagggtcctgggggaaccgggggtagcggcagcagcccaaatgaccctgtgactaacatctgtcaggcagctgacaaacagctattcacgcttgttgagtgggcgaagaggatcccacacttttcctccttgcctctggatgatcaggtcatattgctgcgggcaggctggaatgaactcctcattgcctccttttcacaccgatccattgatgttcgagatggcatcctccttgccacaggtcttcacgtgcaccgcaactcagcccattcagcaggagtaggagccatctttgatcgggtgctgacagagctagtgtccaaaatgcgtgacatgaggatggacaagacagagcttggctgcctgagggcaatcattctgtttaatccagatgccaagggcctctccaaccctagtgaggtggaggtcctgcgggagaaagtgtatgcatcactggagacctactgcaaacagaagtaccctgagcagcagggacggtttgccaagctgctgctacgtcttcctgccctccggtccattggccttaagtgtctagagcatctgtttttcttcaagctcattggtgacacccccatcgacaccttcctcatggagatgcttgaggctccccatcaactggcctgagctcagacccagacgtggtgcttctcacactggaggagcacacatccaagagggactccaagccctggggcagggtggggggccatgttcccagaaccttgatggggtgagaagtacagggcagaaccaagaacataaaccctccaagggatctgcttgatatcccaagttggaagggaccccagatacctgtgaggactggttgtctctcttcggagggggggataagcagtctcatccccttcttcaacttcataaaaagtaatagtttcttccaagcccctgggcatctgtccattccctggggtaaatcatactgggactccttattcacacaactcatctggcggtactacgctcaaataacgagatctataagtgaagttatcatagctctggcagcaccttttacctgggcctgggtaaaaatcaactttagggccgcatgttgtgccctgtcagcattgtcagcttatatagctgatgtaccaattgataaaatgaatataaagtatttcattggttcaaaaatcacacatcatattaaaccatgcagaattggagtaacttccacttttttctagaaagtaaaaccaagagcctttgcttctggataactcacttaatattaaattaaagagctcttcacgtttcttgagaattatctgaagccagttgcattctgtgatatcagttttgaaggcacatggttctctgctttagatttatcccatatgctattgtttaatactggatgtatgtaagtaagtgttttactgcactgtattgaattggtgtcttttg

SEQ ID NO: 299993 - DNA, 1654 bp, Homo sapiens
ggaggattacctttgtctctcaaggccaaggcaaccttggagcctcctcttctccgagactcctaagttacccagctatccccctcagtaagaccctcaacctggaaatctcccaactggccgaggaaaaacccacatccacggatccatcccacaaacccagtgggccctgcttcccttgccaggcctctggtaaagggcaagcaagtgcagcccaaaaggggcatcctgtggctcacatctgcatggccatcctgatttggtttgtcttcatttctcttcctcctctcttccctgccatcccagatgccaagggcctctccaaccctagtgaggtggaggtcctgcgggagaaagtgtatgcatcactggagacctactgcaaacagaagtaccctgagcagcagggacggtttgccaagctgctgctacgtcttcctgccctccggtccattggccttaagtgtctagagcatctgtttttcttcaagctcattggtgacacccccatcgacaccttcctcatggagatgcttgaggctccccatcaactggcctgagctcagacccagacgtggtgcttctcacactggaggagcacacatccaagagggactccaagccctggggcagggtggggggccatgttcccagaaccttgatggggtgagaagtacagggcagaaccaagaacataaaccctccaagggatctgcttgatatcccaagttggaagggaccccagatacctgtgaggactggttgtctctcttcggtggccttgagtctctgaatttgtcgggttctcccatgatttggggtgatttctcaccctctgtccttcccccagcacaaagcactggccttgcctccaggaccttgcttccttctcatcttgcctcattttgcttcccatctgaagagtggaaatggggaactcccccagaggtggatactggggggcaggcctcccaagctgatggacatgagagtagggccctgacaggccttcctcctctcaaacctggcagatgggggcctctctggaagagggaggggccctgtcactgtccagagtctctttttacacttcacctccttctgcagtcagactgaaatataaaaaaggtggtggtggtggtgaaggggctggtggagatgtaggaaccgatctgctatttttaatttcctgtgaggatagagacttgcagttagactcaaagaagtactgtactttcccaggttgactaagaaatgccagtggtggaggtgggtgtttgggaaaggcagggccctgaaatggcctgtccctagggctctccaagcactagccttcccagcttcccgccgccccccccatctcttcctgtctaacttggggaaggggcctgggctgtgaggacagggcccccacaggggatggtttcacgagtgtagtcccggaggccttccctttacagctctcctccagccctgggcacatagcataggctggggacacaggatcctggcctgagaattgaggggaggtggccagcccgcagaggtggggtgctggggctgcatgatttttgccctgcgtcccttctctttggggctcctttcccctctcatacataaaatcgctttcaaattaaaatcgctgttttctgga

SEQ ID NO: 299994 - DNA, 2332 bp, Homo sapiens
ttccggtctgtacaaagatggctgccacattggcgctgtcattttggtactgagcagagcgacgggcttaattcgacccaatccaggccagagtctttctctcaggggcttcctcgtgctcagctaatcctccgatcaatccttgggaatccctgggacctcttcggtatccctactctcagccagggatcatgtcttgggccgctcgcccgcccttcctccctcagcggcatgccgcagggcagtgtgggccggtgggggtgcgaaaagaaatgcattgtggggtcgcgtcccggtggcggcggcgacggccctggctggatcccgcagcggcggcggcggcggcggtggcaggcggagaacaacaaaccccggagccggagccaggggaggctggacgggacgggatgggcgacagcgggcgggactcccgaagcccagacagctcctccccaaatccccttccccagggagtccctcccccttctcctcctgggccacccctacccccttcaacagctccatcccttggaggctctggggccccacccccacccccgatgccaccacccccactgggctctccctttccagtcatcagttcttccatggggtcccctggtctgccccctccagctcccccaggattctccgggcctgtcagcagcccccagattaactcaacagtgtcactccctgggggtgggtctggcccccctgaagatgtgaagccaccagtcttaggggtccggggcctgcactgtccaccccctccaggtggccctggggctggcaaacggctatgtgcaatctgcggggacagaagctcaggcaaacactacggggtttacagctgtgagggttgcaagggcttcttcaaacgcaccatccgcaaagaccttacatactcttgccgggacaacaaagactgcacagtggacaagcgccagcggaaccgctgtcagtactgccgctatcagaagtgcctggccactggcatgaagagggaggcggtacaggaggagcgtcagcggggaaaggacaaggatggggatggggagggggctgggggagcccccgaggagatgcctgtggacaggatcctggaggcagagcttgctgtggaacagaagagtgaccagggcgttgagggtcctgggggaaccgggggtagcggcagcagcgtgagtgttggggtcaatccactctccttcgtgatgggggttgggggaggcagtctaggtctgttctacatcccctccccctcctttcccctcataaccttcctaacactacttgggactggaggtgctgccaaacaaggtctttcaaacatctgaggtggatgtgatagctccttctgtctccactccccaaacaacccactggcagaaccataggcatgtcccaaataaataattgtttgcactaatgccagaagagaagactcacttacagggattggtttggatggggctcacaggaagactatatgtaaggagggggtgtcaaaagcctcttacaagggggctcccagcatatctcaaaatcttccataactcttacccccgtcccctgcagccaaatgaccctgtgactaacatctgtcaggcagctgacaaacagctattcacgcttgttgagtgggcgaagaggatcccacacttttcctccttgcctctggatgatcaggtcatattgctgcgggcaggtcagtgaccttggatccctttgacttcttgacatttgacccctctttgacttcccgatctttagtgaccccagtggccttaccttgcgtacccagggagccaaacttgctgacctcgccacctcttttctccttctcttccactgatgtgctttgaatcccttggcctgatttctggctcctgacccttgctgccccacccaggctggaatgaactcctcattgcctccttttcacaccgatccattgatgttcgagatggcatcctccttgccacaggtcttcacgtgcaccgcaactcagcccattcagcaggagtaggagccatctttgatcgggtgctgacagagctagtgtccaaaatgcgtgacatgaggatggacaagacagagcttggctgcctgagggcaatcattctgtttaatccagatgccaagggcctctccaacctaagggaggtggaggtctcgcggaacaggtgatgcctcagggactatgtaaacaaatacttgacagaggaggtgcaagtggggaagactcctagccggacaggctaggctaagactcgttctacaagcgggaaaccatactcctggaatgaggccaagggaggacacaagg

SEQ ID NO: 299995 - DNA, 778 bp, Homo sapiens
ttccggtctgtacaaagatggctgccacattggcgctgtcattttggtactgagcagagcgacgggcttaattcgacccaatccaggccagagtctttctctcaggggcttcctcgtgctcagctaatcctccgatcaatccttgggaatccctgggacctcttcggtatccctactctcagccagggatcatgtcttgggccgctcgcccgcccttcctccctcagcggcatgccgcagggcagtgtgggccggtgggggtgcgaaaagaaatgcattgtggggtcgcgtcccggtggcggcggcgacggccctggctggatcccgcagcggcggcggcggcggcggtggcaggcggagaacaacaaaccccggagccggagccaggggaggctggacgggacgggatgggcgacagcgggcgggactcccgaagcccagacagctcctccccaaatccccttccccagggagtccctcccccttctcctcctgggccacccctacccccttcaacagctccatcccttggaggctctggggccccacccccacccccgatgccaccacccccactgggctctccctttccagtcatcagttcttccatggggtcccctggtctgccccctccagctcccccaggattctccgggcctgtcagcagcccccaggtgagaggttgtgaccaacttactgcctggccactttcattttcttgttttccttgtaaccccagatccttgtgtgaacttccccatggcccattgaccttcca

SEQ ID NO: 299996 - DNA, 400 bp, Homo sapiens
aaccttggagcctcctcttctccgagactcctaagttacccagctatccccctcagtaagaccctcaacctggaaatctcccaactggccgaggaaaaacccacatccacggatccatcccacaaacccagtgggccctgcttcccttgccaggcctctggtaaagggcaagcaagtgcagcccaaaaggggcatcctgtggctcacatctgcatggccatcctgatttggtttgtcttcatttctcttcctcctctcttccctgccatcccagatgccaagggcctctccaaccctagtgaggtggaggtcctgcgggagaaagtgtatgcatcactggagacctactgcaaacagaagtaccctgagcagcagggacggtgagatggggctggggggc

SEQ ID NO: 299997 - DNA, 969 bp, Homo sapiens
aaggccaaagaaccataactaatggctgggcttcaggagaaagtggtcattgtctctgcagactgcagagagggagacgggagggaaggtgtgttcgctcttcctgccaagggccctagagacagagaagagggatgtctttgtcataagcgatcacaggggactcctgaggactggggagggctctctgtaacttgggaggttccccagtaggtaaattgatggatttttctcccccacagtgcgaaaacaggagatcattaagattacagaacagctgattgaagccatcaacaatggggactttgaggcctacacgaagatttgtgatccaggcctcacttcctttgagcctgaggcccttggtaacctcgtggaggggatggatttccataagttttactttgagaatcgtgagtgggttcgtgctgctgatatactcctgcctgcccctttacccctttgtctctgtctcctgctcaccttctcatcccagttgcccacttttcccttatttgaccttcgtgctgcactcctactctgtatgcttgtccccttgtgccccgatggttgtagacaggcacctttgaaggccctgctcctgagctccaagtgccattcattctgcagctgctttgtggcagtgccagtcaccacaatcaagctcacttatttcttgccgggcgcggtggcttacgcctgtaatcccaacactttgggaggctgaggctggcggatcacgaggtcaggagatcgaggccatcctggctaacacggtgaaaccccatctctactaaaaatacaaaaaattagccgggcgtggtggcggtgcctgtagtcccagctactcgggtggctgaggcaggagaatgatgtgaacctgggaggcagagcttgcagtgagccaagatcaggccactgcactccagcctgggcaacagagcaagactccatctcaaaaaaaaagaa

SEQ ID NO: 299998 - DNA, 3689 bp, Homo sapiens
  misc_feature (19)..(19): n is a, c, g, or t
agcgggctgccgggctcanccccgtctcctcctcttgctccctcggccgggcggcggtgactgtgcaccgacgtcggcgcgggctgcaccgccgcgtccgcccgcccgccagcatggccaccaccgccacctgcacccgtttcaccgacgactaccagctcttcgaggagcttggcaagggtgctttctctgtggtccgcaggtgtgtgaagaaaacctccacgcaggagtacgcagcaaaaatcatcaataccaagaagttgtctgcccgggatcaccagaaactagaacgtgaggctcggatatgtcgacttctgaaacatccaaacatcgtgcgcctccatgacagtatttctgaagaagggtttcactacctcgtgtttgaccttgttaccggcggggagctgtttgaagacattgtggccagagagtactacagtgaagcagatgccagccactgtatacatcagattctggagagtgttaaccacatccaccagcatgacatcgtccacagggacctgaagcctgagaacctgctgctggcgagtaaatgcaagggtgccgccgtcaagctggctgattttggcctagccatcgaagtacagggagagcagcaggcttggtttggttttgctggcaccccaggttacttgtcccctgaggtcttgaggaaagatccctatggaaaacctgtggatatctgggcctgcggggtcatcctgtatatcctcctggtgggctatcctcccttctgggatgaggatcagcacaagctgtatcagcagatcaaggctggagcctatgatttcccatcaccagaatgggacacggtaactcctgaagccaagaacttgatcaaccagatgctgaccataaacccagcaaagcgcatcacggctgaccaggctctcaagcacccgtgggtctgtcaacgatccacggtggcatccatgatgcatcgtcaggagactgtggagtgtttgcgcaagttcaatgcccggagaaaactgaagggtgccatcctcacgaccatgcttgtctccaggaacttctcagctgccaaaagcctattgaacaagaagtcggatggcggtgtcaagccacagagcaacaacaaaaacagtctcgtaagcccagcccaagagcccgcgcccttgcagacggccatggagccacaaaccactgtggtacacaacgctacagatgggatcaagggctccacagagagctgcaacaccaccacagaagatgaggacctcaaagtgcgaaaacaggagatcattaagattacagaacagctgattgaagccatcaacaatggggactttgaggcctacacgaagatttgtgatccaggcctcacttcctttgagcctgaggcccttggtaacctcgtggaggggatggatttccataagttttactttgagaatctcctgtccaagaacagcaagcctatccataccaccatcctaaacccacacgtccacgtgattggggaggacgcagcgtgcatcgcctacatccgcctcacccagtacatcgacgggcagggtcggcctcgcaccagccagtcagaagagacccgggtctggcaccgtcgggatggcaagtggctcaatgtccactatcactgctcaggggcccctgccgcaccgctgcagtgagctcagccacaggggctttaggagattccagccggaggtccaaccttcgcagccagtggctctggagggcctgagtgacagcggcagtcctgtttgtttgaggtttaaaacaattcaattacaaaagcggcagcagccaatgcacgcccctgcatgcagccctcccgcccgcccttcgtgtctgtctctgctgtaccgaggtgttttttacatttaagaaaaaaaaaaaaagaaaaaaagattgtttaaaaaaaaaaggaatccataccatgatgcgttttaaaaccaccgacagcccttgggttggcaagaaggcaggagtatgtatgaggtccatcctggcatgagcagtggctcacccaccggccttgaagaggtgagcttggcctctctggtccccatggacttagggggaccaggcaagaactctgacagagctttgggggccgtgatgtgattgcagctcctgaggtggcctgcttaccccaggtctaggaatgaacttctttggaacttgcataggcgcctagaatggggctgatgagaacatcgtgaccatcagacctacttgggagagaacgcagagctcccagcctgctgtggaggcagctgagaagtggtggcctcaggactgagagcccggacgttgctgtactgtcttgtttagtgtagaagggaagagaattggtgctgcagaagtgtacccgccatgaagccgatgagaaacctcgtgttagtctgacatgcactcactcatccatttctataggatgcacaatgcatgtgggccctaatattgaggccttatccctgcagctaggagggggaggggttgttgctgctttgcttcgtgttttcttctaacctggcaaggagagagccaggccctggtcagggctcccgtgccgcctttggcggttctgtttctgtgctgatctggaccatctttgtcttgccttttcacggtagtggtccccatgctgaccctcatctgggcctgggccctctgccaagtgcccctgtgggatgggaggagtgaggcagtgggagaagaggtggtggtcgtttctatgcattcaggctgcctttggggctgcctcccttcttattcttccttgctgcacgtccatctcttttcctgtctttgagattgacctgactgctctggcaagaagaagaggtgtccttacagaggcctctttactgaccaactgaagtatagacttactgctggacaatctgcatgggcatcacccctccccgcatgtaacccaaaagaggtgtccagagccaaggcttctaccttcattgtccctctctgtgctcaaggagttccattccaggaggaagagatctataccctaagcagatagcaaagaagataatggaggagcaattggtcatggccttggtttccctcaaaacaacgctgcagatttatctgcacaaacatctccacttttgggggaaaggtgggtagattccagttccctggactaccttcaggaggcacgagagctgggagaagaggcaaagctacaggtttacttgggagccagctgagaagagagcagactcacaggtgctggtgcttggatttagccaggctcctccgagcacctcatgcatgtcccagcccctgggccctagccctttcctgccctgcagtctgcagtgccagcacgcaaatcccttcaccacagggtttcgttttgctggcttgaagacaaatggtcttagaattcattgagacccatagcttcatatggctgctccagccccacttcttagcattcttactcctcttctggggctaatgtcagcatctatagacaatagactattaaaaaatcaccttttaaacaagaaacggaaggcatttgatgcagaatttttgcatgacaacatagaaataatttaaaaatagtgtttgttctgaatgttggtagacccttcatagctttgttacaatgaaaccttgaactgaaaatatttaataaaataacctttaaacagtca

SEQ ID NO: 299999 - DNA, 4079 bp, Homo sapiens
gtcggcaggctactggacttctcgtgtctgtctctgctgtacgaggtgttttttacatttaagaaaaaaacaaaaagaaacaacacgattgtttacaaaaaaagggactccataccatgatgcgttttaaaaccaccgacagcccttgggttggcaagaaggcaggagtatgtatgaggtccatcctggcatgagcagtggctcacccaccggccttgaagaggtgagcttggcctctctggtccccatggacttagggggaccaggcaagaactctgacagagctttgggggccgtgatgtgattgcagctcctgaggtggcctgcttaccccaggtctaggaatgaacttctttggaacttgcataggcgcctagaatggggctgatgagaacatcgtgaccatcagacctacttgctcctcttgctccctcggccgggcggcggtgactgtgcaccgacgtcggcgcgggctgcaccgccgcgtccgcccgcccgccagcatggccaccaccgccacctgcacccgtttcaccgacgactaccagctcttcgaggagcttggcaagggtgctttctctgtggtccgcaggtgtgtgaagaaaacctccacgcaggagtacgcagcaaaaatcatcaataccaagaagttgtctgcccgggatcaccagaaactagaacgtgaggctcggatatgtcgacttctgaaacatccaaacatcgtgcgcctccatgacagtatttctgaagaagggtttcactacctcgtgtttgaccttgttaccggcggggagctgtttgaagacattgtggccagagagtactacagtgaagcagatgccagccactgtatacatcagattctggagagtgttaaccacatccaccagcatgacatcgtccacagggacctgaagcctgagaacctgctgctggcgagtaaatgcaagggtgccgccgtcaagctggctgattttggcctagccatcgaagtacagggagagcagcaggcttggtttggttttgctggcaccccaggttacttgtcccctgaggtcttgaggaaagatccctatggaaaacctgtggatatctgggcctgcggggtcatcctgtatatcctcctggtgggctatcctcccttctgggatgaggatcagcacaagctgtatcagcagatcaaggctggagcctatgatttcccatcaccagaatgggacacggtaactcctgaagccaagaacttgatcaaccagatgctgaccataaacccagcaaagcgcatcacggctgaccaggctctcaagcacccgtgggtctgtcaacgatccacggtggcatccatgatgcatcgtcaggagactgtggagtgtttgcgcaagttcaatgcccggagaaaactgaagggtgccatcctcacgaccatgcttgtctccaggaacttctcagctgccaaaagcctattgaacaagaagtcggatggcggtgtcaagccacagagcaacaacaaaaacagtctcgtaagcccagcccaagagcccgcgcccttgcagacggccatggagccacaaaccactgtggtacacaacgctacagatgggatcaagggctccacagagagctgcaacaccaccacagaagatgaggacctcaaagtgcgaaaacaggagatcattaagattacagaacagctgattgaagccatcaacaatggggactttgaggcctacacgaagatttgtgatccaggcctcacttcctttgagcctgaggcccttggtaacctcgtggaggggatggatttccataagttttactttgagaatctcctgtccaagaacagcaagcctatccataccaccatcctaaacccacacgtccacgtgattggggaggacgcagcgtgcatcgcctacatccgcctcacccagtacatcgacgggcagggtcggcctcgcaccagccagtcagaagagacccgggtctggcaccgtcgggatggcaagtggctcaatgtccactatcactgctcaggggcccctgccgcaccgctgcagtgagctcagccacaggggctttaggagattccagccggaggtccaaccttcgcagccagtggctctggagggcctgagtgacagcggcagtcctgtttgtttgaggtttaaaacaattcaattacaaaagcggcagcagccaatgcacgcccctgcatgcagccctcccgcccgcccttcgtgtctgtctctgctgtaccgaggtgttttttacatttaagaaaaaaaaaaaaagaaaaaaagattgtttaaaaaaaaaaggaatccataccatgatgcgttttaaaaccaccgacagcccttgggttggcaagaaggcaggagtatgtatgaggtccatcctggcatgagcagtggctcacccaccggccttgaagaggtgagcttggcctctctggtccccatggacttagggggaccaggcaagaactctgacagagctttgggggccgtgatgtgattgcagctcctgaggtggcctgcttaccccaggtctaggaatgaacttctttggaacttgcataggcgcctagaatggggctgatgagaacatcgtgaccatcagacctacttgggagagaacgcagagctcccagcctgctgtggaggcagctgagaagtggtggcctcaggactgagagcccggacgttgctgtactgtcttgtttagtgtagaagggaagagaattggtgctgcagaagtgtacccgccatgaagccgatgagaaacctcgtgttagtctgacatgcactcactcatccatttctataggatgcacaatgcatgtgggccctaatattgaggccttatccctgcagctaggagggggaggggttgttgctgctttgcttcgtgttttcttctaacctggcaaggagagagccaggccctggtcagggctcccgtgccgcctttggcggttctgtttctgtgctgatctggaccatctttgtcttgccttttcacggtagtggtccccatgctgaccctcatctgggcctgggccctctgccaagtgcccctgtgggatgggaggagtgaggcagtgggagaagaggtggtggtcgtttctatgcattcaggctgcctttggggctgcctcccttcttattcttccttgctgcacgtccatctcttttcctgtctttgagattgacctgactgctctggcaagaagaagaggtgtccttacagaggcctctttactgaccaactgaagtatagacttactgctggacaatctgcatgggcatcacccctccccgcatgtaacccaaaagaggtgtccagagccaaggcttctaccttcattgtccctctctgtgctcaaggagttccattccaggaggaagagatctataccctaagcagatagcaaagaagataatggaggagcaattggtcatggccttggtttccctcaaaacaacgctgcagatttatctgcacaaacatctccacttttgggggaaaggtgggtagattccagttccctggactaccttcaggaggcacgagagctgggagaagaggcaaagctacaggtttacttgggagccagctgagaagagagcagactcacaggtgctggtgcttggatttagccaggctcctccgagcacctcatgcatgtcccagcccctgggccctagccctttcctgccctgcagtctgcagtgccagcacgcaaatcccttcaccacagggtttcgttttgctggcttgaagacaaatggtcttagaattcattgagacccatagcttcatatggctgctccagccccacttcttagcattcttactcctcttctggggctaatgtcagcatctatagacaatagactattaaaaaatcaccttttaaacaagaaacggaaggcatttgatgcagaatttttgcatgacaacatagaaataatttaaaaatagtgtttgttctgaatgttggtagacccttcatagctttgttacaatgaaaccttgaactgaaaatatttaataaaataacctttaaacagtca

SEQ ID NO: 300000 - DNA, 3803 bp, Homo sapiens
  misc_feature (19)..(19): n is a, c, g, or t
agcgggctgccgggctcanccccgtctcctcctcttgctccctcggccgggcggcggtgactgtgcaccgacgtcggcgcgggctgcaccgccgcgtccgcccgcccgccagcatggccaccaccgccacctgcacccgtttcaccgacgactaccagctcttcgaggagcttggcaagggtgctttctctgtggtccgcaggtgtgtgaagaaaacctccacgcaggagtacgcagcaaaaatcatcaataccaagaagttgtctgcccgggatcaccagaaactagaacgtgaggctcggatatgtcgacttctgaaacatccaaacatcgtgcgcctccatgacagtatttctgaagaagggtttcactacctcgtgtttgaccttgttaccggcggggagctgtttgaagacattgtggccagagagtactacagtgaagcagatgccagccactgtatacatcagattctggagagtgttaaccacatccaccagcatgacatcgtccacagggacctgaagcctgagaacctgctgctggcgagtaaatgcaagggtgccgccgtcaagctggctgattttggcctagccatcgaagtacagggagagcagcaggcttggtttggttttgctggcaccccaggttacttgtcccctgaggtcttgaggaaagatccctatggaaaacctgtggatatctgggcctgcggggtcatcctgtatatcctcctggtgggctatcctcccttctgggatgaggatcagcacaagctgtatcagcagatcaaggctggagcctatgatttcccatcaccagaatgggacacggtaactcctgaagccaagaacttgatcaaccagatgctgaccataaacccagcaaagcgcatcacggctgaccaggctctcaagcacccgtgggtctgtcaacgatccacggtggcatccatgatgcatcgtcaggagactgtggagtgtttgcgcaagttcaatgcccggagaaaactgaagggtgccatcctcacgaccatgcttgtctccaggaacttctcagctgccaaaagcctattgaacaagaagtcggatggcggtgtcaagccacagagcaacaacaaaaacagtctcgtaagcccagcccaagagcccgcgcccttgcagacggccatggagccacaaaccactgtggtacacaacgctacagatgggatcaagggctccacagagagctgcaacaccaccacagaagatgaggacctcaaagctgccccgctccgcactgggaatggcagctcggtgcctgaaggacggagctcccgggacagaacagccccctctgcaggcatgcagccccagccttctctctgctcctcagccatgcgaaaacaggagatcattaagattacagaacagctgattgaagccatcaacaatggggactttgaggcctacacgaagatttgtgatccaggcctcacttcctttgagcctgaggcccttggtaacctcgtggaggggatggatttccataagttttactttgagaatctcctgtccaagaacagcaagcctatccataccaccatcctaaacccacacgtccacgtgattggggaggacgcagcgtgcatcgcctacatccgcctcacccagtacatcgacgggcagggtcggcctcgcaccagccagtcagaagagacccgggtctggcaccgtcgggatggcaagtggctcaatgtccactatcactgctcaggggcccctgccgcaccgctgcagtgagctcagccacaggggctttaggagattccagccggaggtccaaccttcgcagccagtggctctggagggcctgagtgacagcggcagtcctgtttgtttgaggtttaaaacaattcaattacaaaagcggcagcagccaatgcacgcccctgcatgcagccctcccgcccgcccttcgtgtctgtctctgctgtaccgaggtgttttttacatttaagaaaaaaaaaaaaagaaaaaaagattgtttaaaaaaaaaaggaatccataccatgatgcgttttaaaaccaccgacagcccttgggttggcaagaaggcaggagtatgtatgaggtccatcctggcatgagcagtggctcacccaccggccttgaagaggtgagcttggcctctctggtccccatggacttagggggaccaggcaagaactctgacagagctttgggggccgtgatgtgattgcagctcctgaggtggcctgcttaccccaggtctaggaatgaacttctttggaacttgcataggcgcctagaatggggctgatgagaacatcgtgaccatcagacctacttgggagagaacgcagagctcccagcctgctgtggaggcagctgagaagtggtggcctcaggactgagagcccggacgttgctgtactgtcttgtttagtgtagaagggaagagaattggtgctgcagaagtgtacccgccatgaagccgatgagaaacctcgtgttagtctgacatgcactcactcatccatttctataggatgcacaatgcatgtgggccctaatattgaggccttatccctgcagctaggagggggaggggttgttgctgctttgcttcgtgttttcttctaacctggcaaggagagagccaggccctggtcagggctcccgtgccgcctttggcggttctgtttctgtgctgatctggaccatctttgtcttgccttttcacggtagtggtccccatgctgaccctcatctgggcctgggccctctgccaagtgcccctgtgggatgggaggagtgaggcagtgggagaagaggtggtggtcgtttctatgcattcaggctgcctttggggctgcctcccttcttattcttccttgctgcacgtccatctcttttcctgtctttgagattgacctgactgctctggcaagaagaagaggtgtccttacagaggcctctttactgaccaactgaagtatagacttactgctggacaatctgcatgggcatcacccctccccgcatgtaacccaaaagaggtgtccagagccaaggcttctaccttcattgtccctctctgtgctcaaggagttccattccaggaggaagagatctataccctaagcagatagcaaagaagataatggaggagcaattggtcatggccttggtttccctcaaaacaacgctgcagatttatctgcacaaacatctccacttttgggggaaaggtgggtagattccagttccctggactaccttcaggaggcacgagagctgggagaagaggcaaagctacaggtttacttgggagccagctgagaagagagcagactcacaggtgctggtgcttggatttagccaggctcctccgagcacctcatgcatgtcccagcccctgggccctagccctttcctgccctgcagtctgcagtgccagcacgcaaatcccttcaccacagggtttcgttttgctggcttgaagacaaatggtcttagaattcattgagacccatagcttcatatggctgctccagccccacttcttagcattcttactcctcttctggggctaatgtcagcatctatagacaatagactattaaaaaatcaccttttaaacaagaaacggaaggcatttgatgcagaatttttgcatgacaacatagaaataatttaaaaatagtgtttgttctgaatgttggtagacccttcatagctttgttacaatgaaaccttgaactgaaaatatttaataaaataacctttaaacagtca

SEQ ID NO: 300001 - DNA, 3620 bp, Homo sapiens
  misc_feature (19)..(19): n is a, c, g, or t
agcgggctgccgggctcanccccgtctcctcctcttgctccctcggccgggcggcggtgactgtgcaccgacgtcggcgcgggctgcaccgccgcgtccgcccgcccgccagcatggccaccaccgccacctgcacccgtttcaccgacgactaccagctcttcgaggagcttggcaagggtgctttctctgtggtccgcaggtgtgtgaagaaaacctccacgcaggagtacgcagcaaaaatcatcaataccaagaagttgtctgcccgggatcaccagaaactagaacgtgaggctcggatatgtcgacttctgaaacatccaaacatcgtgcgcctccatgacagtatttctgaagaagggtttcactacctcgtgtttgaccttgttaccggcggggagctgtttgaagacattgtggccagagagtactacagtgaagcagatgccagccactgtatacatcagattctggagagtgttaaccacatccaccagcatgacatcgtccacagggacctgaagcctgagaacctgctgctggcgagtaaatgcaagggtgccgccgtcaagctggctgattttggcctagccatcgaagtacagggagagcagcaggcttggtttggttttgctggcaccccaggttacttgtcccctgaggtcttgaggaaagatccctatggaaaacctgtggatatctgggcctgcggggtcatcctgtatatcctcctggtgggctatcctcccttctgggatgaggatcagcacaagctgtatcagcagatcaaggctggagcctatgatttcccatcaccagaatgggacacggtaactcctgaagccaagaacttgatcaaccagatgctgaccataaacccagcaaagcgcatcacggctgaccaggctctcaagcacccgtgggtctgtcaacgatccacggtggcatccatgatgcatcgtcaggagactgtggagtgtttgcgcaagttcaatgcccggagaaaactgaagggtgccatcctcacgaccatgcttgtctccaggaacttctcagctgccaaaagcctattgaacaagaagtcggatggcggtgtcaaggagccacaaaccactgtggtacacaacgctacagatgggatcaagggctccacagagagctgcaacaccaccacagaagatgaggacctcaaagtgcgaaaacaggagatcattaagattacagaacagctgattgaagccatcaacaatggggactttgaggcctacacgaagatttgtgatccaggcctcacttcctttgagcctgaggcccttggtaacctcgtggaggggatggatttccataagttttactttgagaatctcctgtccaagaacagcaagcctatccataccaccatcctaaacccacacgtccacgtgattggggaggacgcagcgtgcatcgcctacatccgcctcacccagtacatcgacgggcagggtcggcctcgcaccagccagtcagaagagacccgggtctggcaccgtcgggatggcaagtggctcaatgtccactatcactgctcaggggcccctgccgcaccgctgcagtgagctcagccacaggggctttaggagattccagccggaggtccaaccttcgcagccagtggctctggagggcctgagtgacagcggcagtcctgtttgtttgaggtttaaaacaattcaattacaaaagcggcagcagccaatgcacgcccctgcatgcagccctcccgcccgcccttcgtgtctgtctctgctgtaccgaggtgttttttacatttaagaaaaaaaaaaaaagaaaaaaagattgtttaaaaaaaaaaggaatccataccatgatgcgttttaaaaccaccgacagcccttgggttggcaagaaggcaggagtatgtatgaggtccatcctggcatgagcagtggctcacccaccggccttgaagaggtgagcttggcctctctggtccccatggacttagggggaccaggcaagaactctgacagagctttgggggccgtgatgtgattgcagctcctgaggtggcctgcttaccccaggtctaggaatgaacttctttggaacttgcataggcgcctagaatggggctgatgagaacatcgtgaccatcagacctacttgggagagaacgcagagctcccagcctgctgtggaggcagctgagaagtggtggcctcaggactgagagcccggacgttgctgtactgtcttgtttagtgtagaagggaagagaattggtgctgcagaagtgtacccgccatgaagccgatgagaaacctcgtgttagtctgacatgcactcactcatccatttctataggatgcacaatgcatgtgggccctaatattgaggccttatccctgcagctaggagggggaggggttgttgctgctttgcttcgtgttttcttctaacctggcaaggagagagccaggccctggtcagggctcccgtgccgcctttggcggttctgtttctgtgctgatctggaccatctttgtcttgccttttcacggtagtggtccccatgctgaccctcatctgggcctgggccctctgccaagtgcccctgtgggatgggaggagtgaggcagtgggagaagaggtggtggtcgtttctatgcattcaggctgcctttggggctgcctcccttcttattcttccttgctgcacgtccatctcttttcctgtctttgagattgacctgactgctctggcaagaagaagaggtgtccttacagaggcctctttactgaccaactgaagtatagacttactgctggacaatctgcatgggcatcacccctccccgcatgtaacccaaaagaggtgtccagagccaaggcttctaccttcattgtccctctctgtgctcaaggagttccattccaggaggaagagatctataccctaagcagatagcaaagaagataatggaggagcaattggtcatggccttggtttccctcaaaacaacgctgcagatttatctgcacaaacatctccacttttgggggaaaggtgggtagattccagttccctggactaccttcaggaggcacgagagctgggagaagaggcaaagctacaggtttacttgggagccagctgagaagagagcagactcacaggtgctggtgcttggatttagccaggctcctccgagcacctcatgcatgtcccagcccctgggccctagccctttcctgccctgcagtctgcagtgccagcacgcaaatcccttcaccacagggtttcgttttgctggcttgaagacaaatggtcttagaattcattgagacccatagcttcatatggctgctccagccccacttcttagcattcttactcctcttctggggctaatgtcagcatctatagacaatagactattaaaaaatcaccttttaaacaagaaacggaaggcatttgatgcagaatttttgcatgacaacatagaaataatttaaaaatagtgtttgttctgaatgttggtagacccttcatagctttgttacaatgaaaccttgaactgaaaatatttaataaaataacctttaaacagtca

SEQ ID NO: 300002 - DNA, 3647 bp, Homo sapiens
  misc_feature (19)..(19): n is a, c, g, or t
agcgggctgccgggctcanccccgtctcctcctcttgctccctcggccgggcggcggtgactgtgcaccgacgtcggcgcgggctgcaccgccgcgtccgcccgcccgccagcatggccaccaccgccacctgcacccgtttcaccgacgactaccagctcttcgaggagcttggcaagggtgctttctctgtggtccgcaggtgtgtgaagaaaacctccacgcaggagtacgcagcaaaaatcatcaataccaagaagttgtctgcccgggatcaccagaaactagaacgtgaggctcggatatgtcgacttctgaaacatccaaacatcgtgcgcctccatgacagtatttctgaagaagggtttcactacctcgtgtttgaccttgttaccggcggggagctgtttgaagacattgtggccagagagtactacagtgaagcagatgccagccactgtatacatcagattctggagagtgttaaccacatccaccagcatgacatcgtccacagggacctgaagcctgagaacctgctgctggcgagtaaatgcaagggtgccgccgtcaagctggctgattttggcctagccatcgaagtacagggagagcagcaggcttggtttggttttgctggcaccccaggttacttgtcccctgaggtcttgaggaaagatccctatggaaaacctgtggatatctgggcctgcggggtcatcctgtatatcctcctggtgggctatcctcccttctgggatgaggatcagcacaagctgtatcagcagatcaaggctggagcctatgatttcccatcaccagaatgggacacggtaactcctgaagccaagaacttgatcaaccagatgctgaccataaacccagcaaagcgcatcacggctgaccaggctctcaagcacccgtgggtctgtcaacgatccacggtggcatccatgatgcatcgtcaggagactgtggagtgtttgcgcaagttcaatgcccggagaaaactgaagggtgccatcctcacgaccatgcttgtctccaggaacttctcagctgccaaaagcctattgaacaagaagtcggatggcggtgtcaagccacagagcaacaacaaaaacagtctcgagccacaaaccactgtggtacacaacgctacagatgggatcaagggctccacagagagctgcaacaccaccacagaagatgaggacctcaaagtgcgaaaacaggagatcattaagattacagaacagctgattgaagccatcaacaatggggactttgaggcctacacgaagatttgtgatccaggcctcacttcctttgagcctgaggcccttggtaacctcgtggaggggatggatttccataagttttactttgagaatctcctgtccaagaacagcaagcctatccataccaccatcctaaacccacacgtccacgtgattggggaggacgcagcgtgcatcgcctacatccgcctcacccagtacatcgacgggcagggtcggcctcgcaccagccagtcagaagagacccgggtctggcaccgtcgggatggcaagtggctcaatgtccactatcactgctcaggggcccctgccgcaccgctgcagtgagctcagccacaggggctttaggagattccagccggaggtccaaccttcgcagccagtggctctggagggcctgagtgacagcggcagtcctgtttgtttgaggtttaaaacaattcaattacaaaagcggcagcagccaatgcacgcccctgcatgcagccctcccgcccgcccttcgtgtctgtctctgctgtaccgaggtgttttttacatttaagaaaaaaaaaaaaagaaaaaaagattgtttaaaaaaaaaaggaatccataccatgatgcgttttaaaaccaccgacagcccttgggttggcaagaaggcaggagtatgtatgaggtccatcctggcatgagcagtggctcacccaccggccttgaagaggtgagcttggcctctctggtccccatggacttagggggaccaggcaagaactctgacagagctttgggggccgtgatgtgattgcagctcctgaggtggcctgcttaccccaggtctaggaatgaacttctttggaacttgcataggcgcctagaatggggctgatgagaacatcgtgaccatcagacctacttgggagagaacgcagagctcccagcctgctgtggaggcagctgagaagtggtggcctcaggactgagagcccggacgttgctgtactgtcttgtttagtgtagaagggaagagaattggtgctgcagaagtgtacccgccatgaagccgatgagaaacctcgtgttagtctgacatgcactcactcatccatttctataggatgcacaatgcatgtgggccctaatattgaggccttatccctgcagctaggagggggaggggttgttgctgctttgcttcgtgttttcttctaacctggcaaggagagagccaggccctggtcagggctcccgtgccgcctttggcggttctgtttctgtgctgatctggaccatctttgtcttgccttttcacggtagtggtccccatgctgaccctcatctgggcctgggccctctgccaagtgcccctgtgggatgggaggagtgaggcagtgggagaagaggtggtggtcgtttctatgcattcaggctgcctttggggctgcctcccttcttattcttccttgctgcacgtccatctcttttcctgtctttgagattgacctgactgctctggcaagaagaagaggtgtccttacagaggcctctttactgaccaactgaagtatagacttactgctggacaatctgcatgggcatcacccctccccgcatgtaacccaaaagaggtgtccagagccaaggcttctaccttcattgtccctctctgtgctcaaggagttccattccaggaggaagagatctataccctaagcagatagcaaagaagataatggaggagcaattggtcatggccttggtttccctcaaaacaacgctgcagatttatctgcacaaacatctccacttttgggggaaaggtgggtagattccagttccctggactaccttcaggaggcacgagagctgggagaagaggcaaagctacaggtttacttgggagccagctgagaagagagcagactcacaggtgctggtgcttggatttagccaggctcctccgagcacctcatgcatgtcccagcccctgggccctagccctttcctgccctgcagtctgcagtgccagcacgcaaatcccttcaccacagggtttcgttttgctggcttgaagacaaatggtcttagaattcattgagacccatagcttcatatggctgctccagccccacttcttagcattcttactcctcttctggggctaatgtcagcatctatagacaatagactattaaaaaatcaccttttaaacaagaaacggaaggcatttgatgcagaatttttgcatgacaacatagaaataatttaaaaatagtgtttgttctgaatgttggtagacccttcatagctttgttacaatgaaaccttgaactgaaaatatttaataaaataacctttaaacagtca

SEQ ID NO: 300003 - DNA, 3733 bp, Homo sapiens
  misc_feature (19)..(19): n is a, c, g, or t
agcgggctgccgggctcanccccgtctcctcctcttgctccctcggccgggcggcggtgactgtgcaccgacgtcggcgcgggctgcaccgccgcgtccgcccgcccgccagcatggccaccaccgccacctgcacccgtttcaccgacgactaccagctcttcgaggagcttggcaagggtgctttctctgtggtccgcaggtgtgtgaagaaaacctccacgcaggagtacgcagcaaaaatcatcaataccaagaagttgtctgcccgggatcaccagaaactagaacgtgaggctcggatatgtcgacttctgaaacatccaaacatcgtgcgcctccatgacagtatttctgaagaagggtttcactacctcgtgtttgaccttgttaccggcggggagctgtttgaagacattgtggccagagagtactacagtgaagcagatgccagccactgtatacatcagattctggagagtgttaaccacatccaccagcatgacatcgtccacagggacctgaagcctgagaacctgctgctggcgagtaaatgcaagggtgccgccgtcaagctggctgattttggcctagccatcgaagtacagggagagcagcaggcttggtttggttttgctggcaccccaggttacttgtcccctgaggtcttgaggaaagatccctatggaaaacctgtggatatctgggcctgcggggtcatcctgtatatcctcctggtgggctatcctcccttctgggatgaggatcagcacaagctgtatcagcagatcaaggctggagcctatgatttcccatcaccagaatgggacacggtaactcctgaagccaagaacttgatcaaccagatgctgaccataaacccagcaaagcgcatcacggctgaccaggctctcaagcacccgtgggtctgtcaacgatccacggtggcatccatgatgcatcgtcaggagactgtggagtgtttgcgcaagttcaatgcccggagaaaactgaagggtgccatcctcacgaccatgcttgtctccaggaacttctcagctgccaaaagcctattgaacaagaagtcggatggcggtgtcaagccacagagcaacaacaaaaacagtctcgagccacaaaccactgtggtacacaacgctacagatgggatcaagggctccacagagagctgcaacaccaccacagaagatgaggacctcaaagctcggtgcctgaaggacggagctcccgggacagaacagccccctctgcaggcatgcagccccagccttctctctgctcctcagccatgcgaaaacaggagatcattaagattacagaacagctgattgaagccatcaacaatggggactttgaggcctacacgaagatttgtgatccaggcctcacttcctttgagcctgaggcccttggtaacctcgtggaggggatggatttccataagttttactttgagaatctcctgtccaagaacagcaagcctatccataccaccatcctaaacccacacgtccacgtgattggggaggacgcagcgtgcatcgcctacatccgcctcacccagtacatcgacgggcagggtcggcctcgcaccagccagtcagaagagacccgggtctggcaccgtcgggatggcaagtggctcaatgtccactatcactgctcaggggcccctgccgcaccgctgcagtgagctcagccacaggggctttaggagattccagccggaggtccaaccttcgcagccagtggctctggagggcctgagtgacagcggcagtcctgtttgtttgaggtttaaaacaattcaattacaaaagcggcagcagccaatgcacgcccctgcatgcagccctcccgcccgcccttcgtgtctgtctctgctgtaccgaggtgttttttacatttaagaaaaaaaaaaaaagaaaaaaagattgtttaaaaaaaaaaggaatccataccatgatgcgttttaaaaccaccgacagcccttgggttggcaagaaggcaggagtatgtatgaggtccatcctggcatgagcagtggctcacccaccggccttgaagaggtgagcttggcctctctggtccccatggacttagggggaccaggcaagaactctgacagagctttgggggccgtgatgtgattgcagctcctgaggtggcctgcttaccccaggtctaggaatgaacttctttggaacttgcataggcgcctagaatggggctgatgagaacatcgtgaccatcagacctacttgggagagaacgcagagctcccagcctgctgtggaggcagctgagaagtggtggcctcaggactgagagcccggacgttgctgtactgtcttgtttagtgtagaagggaagagaattggtgctgcagaagtgtacccgccatgaagccgatgagaaacctcgtgttagtctgacatgcactcactcatccatttctataggatgcacaatgcatgtgggccctaatattgaggccttatccctgcagctaggagggggaggggttgttgctgctttgcttcgtgttttcttctaacctggcaaggagagagccaggccctggtcagggctcccgtgccgcctttggcggttctgtttctgtgctgatctggaccatctttgtcttgccttttcacggtagtggtccccatgctgaccctcatctgggcctgggccctctgccaagtgcccctgtgggatgggaggagtgaggcagtgggagaagaggtggtggtcgtttctatgcattcaggctgcctttggggctgcctcccttcttattcttccttgctgcacgtccatctcttttcctgtctttgagattgacctgactgctctggcaagaagaagaggtgtccttacagaggcctctttactgaccaactgaagtatagacttactgctggacaatctgcatgggcatcacccctccccgcatgtaacccaaaagaggtgtccagagccaaggcttctaccttcattgtccctctctgtgctcaaggagttccattccaggaggaagagatctataccctaagcagatagcaaagaagataatggaggagcaattggtcatggccttggtttccctcaaaacaacgctgcagatttatctgcacaaacatctccacttttgggggaaaggtgggtagattccagttccctggactaccttcaggaggcacgagagctgggagaagaggcaaagctacaggtttacttgggagccagctgagaagagagcagactcacaggtgctggtgcttggatttagccaggctcctccgagcacctcatgcatgtcccagcccctgggccctagccctttcctgccctgcagtctgcagtgccagcacgcaaatcccttcaccacagggtttcgttttgctggcttgaagacaaatggtcttagaattcattgagacccatagcttcatatggctgctccagccccacttcttagcattcttactcctcttctggggctaatgtcagcatctatagacaatagactattaaaaaatcaccttttaaacaagaaacggaaggcatttgatgcagaatttttgcatgacaacatagaaataatttaaaaatagtgtttgttctgaatgttggtagacccttcatagctttgttacaatgaaaccttgaactgaaaatatttaataaaataacctttaaacagtca

SEQ ID NO: 300004 - DNA, 3761 bp, Homo sapiens
  misc_feature (19)..(19): n is a, c, g, or t
agcgggctgccgggctcanccccgtctcctcctcttgctccctcggccgggcggcggtgactgtgcaccgacgtcggcgcgggctgcaccgccgcgtccgcccgcccgccagcatggccaccaccgccacctgcacccgtttcaccgacgactaccagctcttcgaggagcttggcaagggtgctttctctgtggtccgcaggtgtgtgaagaaaacctccacgcaggagtacgcagcaaaaatcatcaataccaagaagttgtctgcccgggatcaccagaaactagaacgtgaggctcggatatgtcgacttctgaaacatccaaacatcgtgcgcctccatgacagtatttctgaagaagggtttcactacctcgtgtttgaccttgttaccggcggggagctgtttgaagacattgtggccagagagtactacagtgaagcagatgccagccactgtatacatcagattctggagagtgttaaccacatccaccagcatgacatcgtccacagggacctgaagcctgagaacctgctgctggcgagtaaatgcaagggtgccgccgtcaagctggctgattttggcctagccatcgaagtacagggagagcagcaggcttggtttggttttgctggcaccccaggttacttgtcccctgaggtcttgaggaaagatccctatggaaaacctgtggatatctgggcctgcggggtcatcctgtatatcctcctggtgggctatcctcccttctgggatgaggatcagcacaagctgtatcagcagatcaaggctggagcctatgatttcccatcaccagaatgggacacggtaactcctgaagccaagaacttgatcaaccagatgctgaccataaacccagcaaagcgcatcacggctgaccaggctctcaagcacccgtgggtctgtcaacgatccacggtggcatccatgatgcatcgtcaggagactgtggagtgtttgcgcaagttcaatgcccggagaaaactgaagggtgccatcctcacgaccatgcttgtctccaggaacttctcagctgccaaaagcctattgaacaagaagtcggatggcggtgtcaagccacagagcaacaacaaaaacagtctcgagccacaaaccactgtggtacacaacgctacagatgggatcaagggctccacagagagctgcaacaccaccacagaagatgaggacctcaaagctgccccgctccgcactgggaatggcagctcggtgcctgaaggacggagctcccgggacagaacagccccctctgcaggcatgcagccccagccttctctctgctcctcagccatgcgaaaacaggagatcattaagattacagaacagctgattgaagccatcaacaatggggactttgaggcctacacgaagatttgtgatccaggcctcacttcctttgagcctgaggcccttggtaacctcgtggaggggatggatttccataagttttactttgagaatctcctgtccaagaacagcaagcctatccataccaccatcctaaacccacacgtccacgtgattggggaggacgcagcgtgcatcgcctacatccgcctcacccagtacatcgacgggcagggtcggcctcgcaccagccagtcagaagagacccgggtctggcaccgtcgggatggcaagtggctcaatgtccactatcactgctcaggggcccctgccgcaccgctgcagtgagctcagccacaggggctttaggagattccagccggaggtccaaccttcgcagccagtggctctggagggcctgagtgacagcggcagtcctgtttgtttgaggtttaaaacaattcaattacaaaagcggcagcagccaatgcacgcccctgcatgcagccctcccgcccgcccttcgtgtctgtctctgctgtaccgaggtgttttttacatttaagaaaaaaaaaaaaagaaaaaaagattgtttaaaaaaaaaaggaatccataccatgatgcgttttaaaaccaccgacagcccttgggttggcaagaaggcaggagtatgtatgaggtccatcctggcatgagcagtggctcacccaccggccttgaagaggtgagcttggcctctctggtccccatggacttagggggaccaggcaagaactctgacagagctttgggggccgtgatgtgattgcagctcctgaggtggcctgcttaccccaggtctaggaatgaacttctttggaacttgcataggcgcctagaatggggctgatgagaacatcgtgaccatcagacctacttgggagagaacgcagagctcccagcctgctgtggaggcagctgagaagtggtggcctcaggactgagagcccggacgttgctgtactgtcttgtttagtgtagaagggaagagaattggtgctgcagaagtgtacccgccatgaagccgatgagaaacctcgtgttagtctgacatgcactcactcatccatttctataggatgcacaatgcatgtgggccctaatattgaggccttatccctgcagctaggagggggaggggttgttgctgctttgcttcgtgttttcttctaacctggcaaggagagagccaggccctggtcagggctcccgtgccgcctttggcggttctgtttctgtgctgatctggaccatctttgtcttgccttttcacggtagtggtccccatgctgaccctcatctgggcctgggccctctgccaagtgcccctgtgggatgggaggagtgaggcagtgggagaagaggtggtggtcgtttctatgcattcaggctgcctttggggctgcctcccttcttattcttccttgctgcacgtccatctcttttcctgtctttgagattgacctgactgctctggcaagaagaagaggtgtccttacagaggcctctttactgaccaactgaagtatagacttactgctggacaatctgcatgggcatcacccctccccgcatgtaacccaaaagaggtgtccagagccaaggcttctaccttcattgtccctctctgtgctcaaggagttccattccaggaggaagagatctataccctaagcagatagcaaagaagataatggaggagcaattggtcatggccttggtttccctcaaaacaacgctgcagatttatctgcacaaacatctccacttttgggggaaaggtgggtagattccagttccctggactaccttcaggaggcacgagagctgggagaagaggcaaagctacaggtttacttgggagccagctgagaagagagcagactcacaggtgctggtgcttggatttagccaggctcctccgagcacctcatgcatgtcccagcccctgggccctagccctttcctgccctgcagtctgcagtgccagcacgcaaatcccttcaccacagggtttcgttttgctggcttgaagacaaatggtcttagaattcattgagacccatagcttcatatggctgctccagccccacttcttagcattcttactcctcttctggggctaatgtcagcatctatagacaatagactattaaaaaatcaccttttaaacaagaaacggaaggcatttgatgcagaatttttgcatgacaacatagaaataatttaaaaatagtgtttgttctgaatgttggtagacccttcatagctttgttacaatgaaaccttgaactgaaaatatttaataaaataacctttaaacagtca

SEQ ID NO: 300005 - DNA, 3752 bp, Homo sapiens
  misc_feature (19)..(19): n is a, c, g, or t
agcgggctgccgggctcanccccgtctcctcctcttgctccctcggccgggcggcggtgactgtgcaccgacgtcggcgcgggctgcaccgccgcgtccgcccgcccgccagcatggccaccaccgccacctgcacccgtttcaccgacgactaccagctcttcgaggagcttggcaagggtgctttctctgtggtccgcaggtgtgtgaagaaaacctccacgcaggagtacgcagcaaaaatcatcaataccaagaagttgtctgcccgggatcaccagaaactagaacgtgaggctcggatatgtcgacttctgaaacatccaaacatcgtgcgcctccatgacagtatttctgaagaagggtttcactacctcgtgtttgaccttgttaccggcggggagctgtttgaagacattgtggccagagagtactacagtgaagcagatgccagccactgtatacatcagattctggagagtgttaaccacatccaccagcatgacatcgtccacagggacctgaagcctgagaacctgctgctggcgagtaaatgcaagggtgccgccgtcaagctggctgattttggcctagccatcgaagtacagggagagcagcaggcttggtttggttttgctggcaccccaggttacttgtcccctgaggtcttgaggaaagatccctatggaaaacctgtggatatctgggcctgcggggtcatcctgtatatcctcctggtgggctatcctcccttctgggatgaggatcagcacaagctgtatcagcagatcaaggctggagcctatgatttcccatcaccagaatgggacacggtaactcctgaagccaagaacttgatcaaccagatgctgaccataaacccagcaaagcgcatcacggctgaccaggctctcaagcacccgtgggtctgtcaacgatccacggtggcatccatgatgcatcgtcaggagactgtggagtgtttgcgcaagttcaatgcccggagaaaactgaagggtgccatcctcacgaccatgcttgtctccaggaacttctcagttggcaggcagagctccgcccccgcctcgcctgccgcgagcgccgccggcctggccgggcaagctgccaaaagcctattgaacaagaagtcggatggcggtgtcaagccacagagcaacaacaaaaacagtctcgtaagcccagcccaagagcccgcgcccttgcagacggccatggagccacaaaccactgtggtacacaacgctacagatgggatcaagggctccacagagagctgcaacaccaccacagaagatgaggacctcaaagtgcgaaaacaggagatcattaagattacagaacagctgattgaagccatcaacaatggggactttgaggcctacacgaagatttgtgatccaggcctcacttcctttgagcctgaggcccttggtaacctcgtggaggggatggatttccataagttttactttgagaatctcctgtccaagaacagcaagcctatccataccaccatcctaaacccacacgtccacgtgattggggaggacgcagcgtgcatcgcctacatccgcctcacccagtacatcgacgggcagggtcggcctcgcaccagccagtcagaagagacccgggtctggcaccgtcgggatggcaagtggctcaatgtccactatcactgctcaggggcccctgccgcaccgctgcagtgagctcagccacaggggctttaggagattccagccggaggtccaaccttcgcagccagtggctctggagggcctgagtgacagcggcagtcctgtttgtttgaggtttaaaacaattcaattacaaaagcggcagcagccaatgcacgcccctgcatgcagccctcccgcccgcccttcgtgtctgtctctgctgtaccgaggtgttttttacatttaagaaaaaaaaaaaaagaaaaaaagattgtttaaaaaaaaaaggaatccataccatgatgcgttttaaaaccaccgacagcccttgggttggcaagaaggcaggagtatgtatgaggtccatcctggcatgagcagtggctcacccaccggccttgaagaggtgagcttggcctctctggtccccatggacttagggggaccaggcaagaactctgacagagctttgggggccgtgatgtgattgcagctcctgaggtggcctgcttaccccaggtctaggaatgaacttctttggaacttgcataggcgcctagaatggggctgatgagaacatcgtgaccatcagacctacttgggagagaacgcagagctcccagcctgctgtggaggcagctgagaagtggtggcctcaggactgagagcccggacgttgctgtactgtcttgtttagtgtagaagggaagagaattggtgctgcagaagtgtacccgccatgaagccgatgagaaacctcgtgttagtctgacatgcactcactcatccatttctataggatgcacaatgcatgtgggccctaatattgaggccttatccctgcagctaggagggggaggggttgttgctgctttgcttcgtgttttcttctaacctggcaaggagagagccaggccctggtcagggctcccgtgccgcctttggcggttctgtttctgtgctgatctggaccatctttgtcttgccttttcacggtagtggtccccatgctgaccctcatctgggcctgggccctctgccaagtgcccctgtgggatgggaggagtgaggcagtgggagaagaggtggtggtcgtttctatgcattcaggctgcctttggggctgcctcccttcttattcttccttgctgcacgtccatctcttttcctgtctttgagattgacctgactgctctggcaagaagaagaggtgtccttacagaggcctctttactgaccaactgaagtatagacttactgctggacaatctgcatgggcatcacccctccccgcatgtaacccaaaagaggtgtccagagccaaggcttctaccttcattgtccctctctgtgctcaaggagttccattccaggaggaagagatctataccctaagcagatagcaaagaagataatggaggagcaattggtcatggccttggtttccctcaaaacaacgctgcagatttatctgcacaaacatctccacttttgggggaaaggtgggtagattccagttccctggactaccttcaggaggcacgagagctgggagaagaggcaaagctacaggtttacttgggagccagctgagaagagagcagactcacaggtgctggtgcttggatttagccaggctcctccgagcacctcatgcatgtcccagcccctgggccctagccctttcctgccctgcagtctgcagtgccagcacgcaaatcccttcaccacagggtttcgttttgctggcttgaagacaaatggtcttagaattcattgagacccatagcttcatatggctgctccagccccacttcttagcattcttactcctcttctggggctaatgtcagcatctatagacaatagactattaaaaaatcaccttttaaacaagaaacggaaggcatttgatgcagaatttttgcatgacaacatagaaataatttaaaaatagtgtttgttctgaatgttggtagacccttcatagctttgttacaatgaaaccttgaactgaaaatatttaataaaataacctttaaacagtca

SEQ ID NO: 300006 - DNA, 3576 bp, Homo sapiens
  misc_feature (19)..(19): n is a, c, g, or t
agcgggctgccgggctcanccccgtctcctcctcttgctccctcggccgggcggcggtgactgtgcaccgacgtcggcgcgggctgcaccgccgcgtccgcccgcccgccagcatggccaccaccgccacctgcacccgtttcaccgacgactaccagctcttcgaggagcttggcaagggtgctttctctgtggtccgcaggtgtgtgaagaaaacctccacgcaggagtacgcagcaaaaatcatcaataccaagaagttgtctgcccgggatcaccagaaactagaacgtgaggctcggatatgtcgacttctgaaacatccaaacatcgtgcgcctccatgacagtatttctgaagaagggtttcactacctcgtgtttgaccttgttaccggcggggagctgtttgaagacattgtggccagagagtactacagtgaagcagatgccagccactgtatacatcagattctggagagtgttaaccacatccaccagcatgacatcgtccacagggacctgaagcctgagaacctgctgctggcgagtaaatgcaagggtgccgccgtcaagctggctgattttggcctagccatcgaagtacagggagagcagcaggcttggtttggttttgctggcaccccaggttacttgtcccctgaggtcttgaggaaagatccctatggaaaacctgtggatatctgggcctgcggggtcatcctgtatatcctcctggtgggctatcctcccttctgggatgaggatcagcacaagctgtatcagcagatcaaggctggagcctatgatttcccatcaccagaatgggacacggtaactcctgaagccaagaacttgatcaaccagatgctgaccataaacccagcaaagcgcatcacggctgaccaggctctcaagcacccgtgggtctgtcaacgatccacggtggcatccatgatgcatcgtcaggagactgtggagtgtttgcgcaagttcaatgcccggagaaaactgaagggtgccatcctcacgaccatgcttgtctccaggaacttctcagctgccaaaagcctattgaacaagaagtcggatggcggtgtcaagccacagagcaacaacaaaaacagtctcgtaagcccagcccaagagcccgcgcccttgcagacggccatggagccacaaaccactgtggtacacaacgctacagatgggatcaagggctccacagagagctgcaacaccaccacagaagatgaggacctcaaagtgcgaaaacaggagatcattaagattacagaacagctgattgaagccatcaacaatggggactttgaggcctacacgaagatttgtgatccaggcctcacttcctttgagcctgaggcccttggtaacctcgtggaggggatggatttccataagttttactttgagaatctcctgtccaagaacagcaagcctatccataccaccatcctaaacccacacgtccacgtgattggggaggacgcagcgtgcatcgcctacatccgcctcacccagtacatcgacgggcagggtcggcctcgcaccagccagtcagaagagacccgggtctggcaccgtcgggatggcaagtggctcaatgtccactatcactgctcaggggcccctgccgcaccgctgcagtgagctcagccacaggggctttaggagattccagccggaggtccaaccttcgcagccagtggctctggagggcctgagtgacagcggcagtcctgtttgtttgaggtttaaaacaattcaattacaaaagcggcagcagccaatgcacgcccctgcatgcagccctcccgcccgcccttcgtgtctgtctctgctgtaccgaggtgttttttacatttaagaaaaaaaaaaaaagaaaaaaagattgtttaaaaaaaaaaggaatccataccatgatgcgttttaaaaccaccgacagcccttgggttggcaagaaggcaggagtatgtatgaggtccatcctggcatgagcagtggctcacccaccggccttgaagaggtctaggaatgaacttctttggaacttgcataggcgcctagaatggggctgatgagaacatcgtgaccatcagacctacttgggagagaacgcagagctcccagcctgctgtggaggcagctgagaagtggtggcctcaggactgagagcccggacgttgctgtactgtcttgtttagtgtagaagggaagagaattggtgctgcagaagtgtacccgccatgaagccgatgagaaacctcgtgttagtctgacatgcactcactcatccatttctataggatgcacaatgcatgtgggccctaatattgaggccttatccctgcagctaggagggggaggggttgttgctgctttgcttcgtgttttcttctaacctggcaaggagagagccaggccctggtcagggctcccgtgccgcctttggcggttctgtttctgtgctgatctggaccatctttgtcttgccttttcacggtagtggtccccatgctgaccctcatctgggcctgggccctctgccaagtgcccctgtgggatgggaggagtgaggcagtgggagaagaggtggtggtcgtttctatgcattcaggctgcctttggggctgcctcccttcttattcttccttgctgcacgtccatctcttttcctgtctttgagattgacctgactgctctggcaagaagaagaggtgtccttacagaggcctctttactgaccaactgaagtatagacttactgctggacaatctgcatgggcatcacccctccccgcatgtaacccaaaagaggtgtccagagccaaggcttctaccttcattgtccctctctgtgctcaaggagttccattccaggaggaagagatctataccctaagcagatagcaaagaagataatggaggagcaattggtcatggccttggtttccctcaaaacaacgctgcagatttatctgcacaaacatctccacttttgggggaaaggtgggtagattccagttccctggactaccttcaggaggcacgagagctgggagaagaggcaaagctacaggtttacttgggagccagctgagaagagagcagactcacaggtgctggtgcttggatttagccaggctcctccgagcacctcatgcatgtcccagcccctgggccctagccctttcctgccctgcagtctgcagtgccagcacgcaaatcccttcaccacagggtttcgttttgctggcttgaagacaaatggtcttagaattcattgagacccatagcttcatatggctgctccagccccacttcttagcattcttactcctcttctggggctaatgtcagcatctatagacaatagactattaaaaaatcaccttttaaacaagaaacggaaggcatttgatgcagaatttttgcatgacaacatagaaataatttaaaaatagtgtttgttctgaatgttggtagacccttcatagctttgttacaatgaaaccttgaactgaaaatatttaataaaataacctttaaacagtca

SEQ ID NO: 300007 - DNA, 4085 bp, Homo sapiens
  misc_feature (19)..(19): n is a, c, g, or t
agcgggctgccgggctcanccccgtctcctcctcttgctccctcggccgggcggcggtgactgtgcaccgacgtcggcgcgggctgcaccgccgcgtccgcccgcccgccagcatggccaccaccgccacctgcacccgtttcaccgacgactaccagctcttcgaggagcttggcaagggtgctttctctgtggtccgcaggtgtgtgaagaaaacctccacgcaggagtacgcagcaaaaatcatcaataccaagaagttgtctgcccgggatcaccagaaactagaacgtgaggctcggatatgtcgacttctgaaacatccaaacatcgtgcgcctccatgacagtatttctgaagaagggtttcactacctcgtgtttgaccttgttaccggcggggagctgtttgaagacattgtggccagagagtactacagtgaagcagatgccagccactgtatacatcagattctggagagtgttaaccacatccaccagcatgacatcgtccacagggacctgaagcctgagaacctgctgctggcgagtaaatgcaagggtgccgccgtcaagctggctgattttggcctagccatcgaagtacagggagagcagcaggcttggtttggttttgctggcaccccaggttacttgtcccctgaggtcttgaggaaagatccctatggaaaacctgtggatatctgggcctgcggggtcatcctgtatatcctcctggtgggctatcctcccttctgggatgaggatcagcacaagctgtatcagcagatcaaggctggagcctatgatttcccatcaccagaatgggacacggtaactcctgaagccaagaacttgatcaaccagatgctgaccataaacccagcaaagcgcatcacggctgaccaggctctcaagcacccgtgggtctgtcaacgatccacggtggcatccatgatgcatcgtcaggagactgtggagtgtttgcgcaagttcaatgcccggagaaaactgaagggtgccatcctcacgaccatgcttgtctccaggaacttctcagctgccaaaagcctattgaacaagaagtcggatggcggtgtcaagccacagagcaacaacaaaaacagtctcgtaagcccagcccaagagcccgcgcccttgcagacggccatggagccacaaaccactgtggtacacaacgctacagatgggatcaagggctccacagagagctgcaacaccaccacagaagatgaggacctcaaagtgcgaaaacaggagatcattaagattacagaacagctgattgaagccatcaacaatggggactttgaggcctacacgaagatttgtgatccaggcctcacttcctttgagcctgaggcccttggtaacctcgtggaggggatggatttccataagttttactttgagaatctcctgtccaagaacagcaagcctatccataccaccatcctaaacccacacgtccacgtgattggggaggacgcagcgtgcatcgcctacatccgcctcacccagtacatcgacgggcagggtcggcctcgcaccagccagtcagaagagacccgggtctggcaccgtcgggatggcaagtggctcaatgtccactatcactgctcaggggcccctgccgcaccgctgcagtgagctcagccacaggggctttaggagattccagccggaggtccaaccttcgcagccagtggctctggagggcctgagtgacagcggcagtcctgtttgtttgaggtttaaaacaattcaattacaaaagcggcagcagccaatgcacgcccctgcatgcagccctcccgcccgcccttcgtgtctgtctctgctgtaccgaggtgttttttacatttaagaaaaaaaaaaaaagaaaaaaagattgtttaaaaaaaaaaggaatccataccatgatgcgttttaaaaccaccgacagcccttgggttggcaagaaggcaggagtatgtatgaggtccatcctggcatgagcagtggctcacccaccggccttgaagaggtgagcttggcctctctggtccccatggacttagggggaccaggcaagaactctgacagagctttgggggccgtgatgtgattgcagctcctgaggtggcctgcttaccccaggtctaggaatgaacttctttggaacttgcataggcgcctagaatggggctgatgagaacatcgtgaccatcagacctacttgggagagaacgcagagctcccagcctgctgtggaggcagctgagaagtggtggcctcaggactgagagcccggacgttgctgtactgtcttgtttagtgtagaagggaagagaattggtgctgcagaagtgtacccgccatgaagccgatgagaaacctcgtgttagtctgacatgcactcactcatccatttctataggatgcacaatgcatgtgggccctaatattgaggccttatccctgcagctaggagggggaggggttgttgctgctttgcttcgtgttttcttctaacctggcaaggagagagccaggccctggtcagggctcccgtgccgcctttggcggttctgtttctgtgctgatctggaccatctttgtcttgccttttcacggtagtggtccccatgctgaccctcatctgggcctgggccctctgccaagtgcccctgtgggatgggaggagtgaggcagtgggagaagaggtggtggtcgtttctatgcattcaggctgcctttggggctgcctcccttcttattcttccttgctgcacgtccatctcttttcctgtctttgagattgacctgactgctctggcaagaagaagaggtgtccttacagaggcctctttactgaccaactgaagtatagacttactgctggacaatctgcatgggcatcacccctccccgcatgtaacccaaaagaggtgtccagagccaaggcttctaccttcattgtccctctctgtgctcaaggagttccattccaggaggaagagatctataccctaagcagatagcaaagaagataatggaggagcaattggtcatggccttggtttccctcaaaacaacgctgcagatttatctgcacaaacatctccacttttgggggaaaggtgggtagattccagttccctggactaccttcaggaggcacgagagctgggagaagaggcaaagctacaggtttacttgggagccagctgagaagagagcagactcacaggtgctggtgcttggatttagccaggctcctccgagcacctcatgcatgtcccagcccctgggccctagccctttcctgccctgcagtctgcagtgccagcacgcaaatcccttcaccacagggtttcgttttgctggcttgaagacaaatggtcttagaattcattgagacccatagcttcatatggctgctccagccccacttcttagcattcttactcctcttctggggctaatgtcagcatctatagacaatagactattaaaaaatcaccttttaaacaagaaacggaaggcatttgatgcagaatttttgcatgacaacatagaaataatttaaaaatagtgtttgttctgaatgttggtagacccttcatagctttgttacaatgaaaccttgaactgaaaatatttaataaaataacctttaaacagtcaaaaaaaaaactgctgttggaggtttacggccagaggcgtagattttagcagcctggcttaccaggttggagagagtacctcctcctactccctttgggtacttttgagaataaaacttcctcatgcctgtaatcccagtactttgggaggccgacgcgggcgaatcacgaggtcaggagttcgagaccagcctggctaatatggtgaaaccccgtctctactaaaaaatacaaaaaatttagctgggcatagtggcgggcgcctgtaatcccagctgctcggaaggctgaggcaggagaatcgcttgaacctgggagggggaggttgcagtgagccgaggtcgcgccactgcactccagcccaggcgacagagtgagactccgtctcaaaaaaaaa

SEQ ID NO: 300008 - DNA, 3690 bp, Homo sapiens
tggtcgagccggctacctattggttggacgaccgacgactaccagctcttcgaggagcttggcaagggtgctttctctgtggtccgcaggtgtgtgaagaaaacctccacgcaggagtacgcagcaaaaatcatcaataccaagaagttgtctgcccgggatcaccagaaactagaacgtgaggctcggatatgtcgacttctgaaacatccaaacatcgtgcgcctccatgacagtatttctgaagaagggtttcactacctcgtgtttgaccttgttaccggcggggagctgtttgaagacattgtggccagagagtactacagtgaagcagatgccagccactgtatacatcagattctggagagtgttaaccacatccaccagcatgacatcgtccacagggacctgaagcctgagaacctgctgctggcgagtaaatgcaagggtgccgccgtcaagctggctgattttggcctagccatcgaagtacagggagagcagcaggcttggtttggttttgctggcaccccaggttacttgtcccctgaggtcttgaggaaagatccctatggaaaacctgtggatatctgggcctgcggggtcatcctgtatatcctcctggtgggctatcctcccttctgggatgaggatcagcacaagctgtatcagcagatcaaggctggagcctatgatttcccatcaccagaatgggacacggtaactcctgaagccaagaacttgatcaaccagatgctgaccataaacccagcaaagcgcatcacggctgaccaggctctcaagcacccgtgggtctgtcaacgatccacggtggcatccatgatgcatcgtcaggagactgtggagtgtttgcgcaagttcaatgcccggagaaaactgaagggtgccatcctcacgaccatgcttgtctccaggaacttctcagctgccaaaagcctattgaacaagaagtcggatggcggtgtcaagccacagagcaacaacaaaaacagtctcgtaagcccagcccaagagcccgcgcccttgcagacggccatggagccacaaaccactgtggtacacaacgctacagatgggatcaagggctccacagagagctgcaacaccaccacagaagatgaggacctcaaagctgccccgctccgcactgggaatggcagctcggtgcctgaaggacggagctcccgggacagaacagccccctctgcaggcatgcagccccagccttctctctgctcctcagccatgcgaaaacaggagatcattaagattacagaacagctgattgaagccatcaacaatggggactttgaggcctacacgaagatttgtgatccaggcctcacttcctttgagcctgaggcccttggtaacctcgtggaggggatggatttccataagttttactttgagaatctcctgtccaagaacagcaagcctatccataccaccatcctaaacccacacgtccacgtgattggggaggacgcagcgtgcatcgcctacatccgcctcacccagtacatcgacgggcagggtcggcctcgcaccagccagtcagaagagacccgggtctggcaccgtcgggatggcaagtggctcaatgtccactatcactgctcaggggcccctgccgcaccgctgcagtgagctcagccacaggggctttaggagattccagccggaggtccaaccttcgcagccagtggctctggagggcctgagtgacagcggcagtcctgtttgtttgaggtttaaaacaattcaattacaaaagcggcagcagccaatgcacgcccctgcatgcagccctcccgcccgcccttcgtgtctgtctctgctgtaccgaggtgttttttacatttaagaaaaaaaaaaaaagaaaaaaagattgtttaaaaaaaaaaggaatccataccatgatgcgttttaaaaccaccgacagcccttgggttggcaagaaggcaggagtatgtatgaggtccatcctggcatgagcagtggctcacccaccggccttgaagaggtgagcttggcctctctggtccccatggacttagggggaccaggcaagaactctgacagagctttgggggccgtgatgtgattgcagctcctgaggtggcctgcttaccccaggtctaggaatgaacttctttggaacttgcataggcgcctagaatggggctgatgagaacatcgtgaccatcagacctacttgggagagaacgcagagctcccagcctgctgtggaggcagctgagaagtggtggcctcaggactgagagcccggacgttgctgtactgtcttgtttagtgtagaagggaagagaattggtgctgcagaagtgtacccgccatgaagccgatgagaaacctcgtgttagtctgacatgcactcactcatccatttctataggatgcacaatgcatgtgggccctaatattgaggccttatccctgcagctaggagggggaggggttgttgctgctttgcttcgtgttttcttctaacctggcaaggagagagccaggccctggtcagggctcccgtgccgcctttggcggttctgtttctgtgctgatctggaccatctttgtcttgccttttcacggtagtggtccccatgctgaccctcatctgggcctgggccctctgccaagtgcccctgtgggatgggaggagtgaggcagtgggagaagaggtggtggtcgtttctatgcattcaggctgcctttggggctgcctcccttcttattcttccttgctgcacgtccatctcttttcctgtctttgagattgacctgactgctctggcaagaagaagaggtgtccttacagaggcctctttactgaccaactgaagtatagacttactgctggacaatctgcatgggcatcacccctccccgcatgtaacccaaaagaggtgtccagagccaaggcttctaccttcattgtccctctctgtgctcaaggagttccattccaggaggaagagatctataccctaagcagatagcaaagaagataatggaggagcaattggtcatggccttggtttccctcaaaacaacgctgcagatttatctgcacaaacatctccacttttgggggaaaggtgggtagattccagttccctggactaccttcaggaggcacgagagctgggagaagaggcaaagctacaggtttacttgggagccagctgagaagagagcagactcacaggtgctggtgcttggatttagccaggctcctccgagcacctcatgcatgtcccagcccctgggccctagccctttcctgccctgcagtctgcagtgccagcacgcaaatcccttcaccacagggtttcgttttgctggcttgaagacaaatggtcttagaattcattgagacccatagcttcatatggctgctccagccccacttcttagcattcttactcctcttctggggctaatgtcagcatctatagacaatagactattaaaaaatcaccttttaaacaagaaacggaaggcatttgatgcagaatttttgcatgacaacatagaaataatttaaaaatagtgtttgttctgaatgttggtagacccttcatagctttgttacaatgaaaccttgaactgaaaatatttaataaaataacctttaaacagtca

SEQ ID NO: 300009 - DNA, 3712 bp, Homo sapiens
  misc_feature (49)..(49): n is a, c, g, or t
gtttcgagaggatcccccccccgagccacgggccgcccctttcacccgnttcaccgacgactaccagctcttcgaggagcttggcaagggtgctttctctgtggtccgcaggtgtgtgaagaaaacctccacgcaggagtacgcagcaaaaatcatcaataccaagaagttgtctgcccgggatcaccagaaactagaacgtgaggctcggatatgtcgacttctgaaacatccaaacatcgtgcgcctccatgacagtatttctgaagaagggtttcactacctcgtgtttgaccttgttaccggcggggagctgtttgaagacattgtggccagagagtactacagtgaagcagatgccagccactgtatacatcagattctggagagtgttaaccacatccaccagcatgacatcgtccacagggacctgaagcctgagaacctgctgctggcgagtaaatgcaagggtgccgccgtcaagctggctgattttggcctagccatcgaagtacagggagagcagcaggcttggtttggttttgctggcaccccaggttacttgtcccctgaggtcttgaggaaagatccctatggaaaacctgtggatatctgggcctgcggggtcatcctgtatatcctcctggtgggctatcctcccttctgggatgaggatcagcacaagctgtatcagcagatcaaggctggagcctatgatttcccatcaccagaatgggacacggtaactcctgaagccaagaacttgatcaaccagatgctgaccataaacccagcaaagcgcatcacggctgaccaggctctcaagcacccgtgggtctgtcaacgatccacggtggcatccatgatgcatcgtcaggagactgtggagtgtttgcgcaagttcaatgcccggagaaaactgaagggtgccatcctcacgaccatgcttgtctccaggaacttctcagctgccaaaagcctattgaacaagaagtcggatggcggtgtcaagccacagagcaacaacaaaaacagtctcgtaagcccagcccaagagcccgcgcccttgcagacggccatggagccacaaaccactgtggtacacaacgctacagatgggatcaagggctccacagagagctgcaacaccaccacagaagatgaggacctcaaagctgccccgctccgcactgggaatggcagctcggtgcctgaaggacggagctcccgggacagaacagccccctctgcaggcatgcagccccagccttctctctgctcctcagccatgcgaaaacaggagatcattaagattacagaacagctgattgaagccatcaacaatggggactttgaggcctacacgaagatttgtgatccaggcctcacttcctttgagcctgaggcccttggtaacctcgtggaggggatggatttccataagttttactttgagaatctcctgtccaagaacagcaagcctatccataccaccatcctaaacccacacgtccacgtgattggggaggacgcagcgtgcatcgcctacatccgcctcacccagtacatcgacgggcagggtcggcctcgcaccagccagtcagaagagacccgggtctggcaccgtcgggatggcaagtggctcaatgtccactatcactgctcaggggcccctgccgcaccgctgcagtgagctcagccacaggggctttaggagattccagccggaggtccaaccttcgcagccagtggctctggagggcctgagtgacagcggcagtcctgtttgtttgaggtttaaaacaattcaattacaaaagcggcagcagccaatgcacgcccctgcatgcagccctcccgcccgcccttcgtgtctgtctctgctgtaccgaggtgttttttacatttaagaaaaaaaaaaaaagaaaaaaagattgtttaaaaaaaaaaggaatccataccatgatgcgttttaaaaccaccgacagcccttgggttggcaagaaggcaggagtatgtatgaggtccatcctggcatgagcagtggctcacccaccggccttgaagaggtgagcttggcctctctggtccccatggacttagggggaccaggcaagaactctgacagagctttgggggccgtgatgtgattgcagctcctgaggtggcctgcttaccccaggtctaggaatgaacttctttggaacttgcataggcgcctagaatggggctgatgagaacatcgtgaccatcagacctacttgggagagaacgcagagctcccagcctgctgtggaggcagctgagaagtggtggcctcaggactgagagcccggacgttgctgtactgtcttgtttagtgtagaagggaagagaattggtgctgcagaagtgtacccgccatgaagccgatgagaaacctcgtgttagtctgacatgcactcactcatccatttctataggatgcacaatgcatgtgggccctaatattgaggccttatccctgcagctaggagggggaggggttgttgctgctttgcttcgtgttttcttctaacctggcaaggagagagccaggccctggtcagggctcccgtgccgcctttggcggttctgtttctgtgctgatctggaccatctttgtcttgccttttcacggtagtggtccccatgctgaccctcatctgggcctgggccctctgccaagtgcccctgtgggatgggaggagtgaggcagtgggagaagaggtggtggtcgtttctatgcattcaggctgcctttggggctgcctcccttcttattcttccttgctgcacgtccatctcttttcctgtctttgagattgacctgactgctctggcaagaagaagaggtgtccttacagaggcctctttactgaccaactgaagtatagacttactgctggacaatctgcatgggcatcacccctccccgcatgtaacccaaaagaggtgtccagagccaaggcttctaccttcattgtccctctctgtgctcaaggagttccattccaggaggaagagatctataccctaagcagatagcaaagaagataatggaggagcaattggtcatggccttggtttccctcaaaacaacgctgcagatttatctgcacaaacatctccacttttgggggaaaggtgggtagattccagttccctggactaccttcaggaggcacgagagctgggagaagaggcaaagctacaggtttacttgggagccagctgagaagagagcagactcacaggtgctggtgcttggatttagccaggctcctccgagcacctcatgcatgtcccagcccctgggccctagccctttcctgccctgcagtctgcagtgccagcacgcaaatcccttcaccacagggtttcgttttgctggcttgaagacaaatggtcttagaattcattgagacccatagcttcatatggctgctccagccccacttcttagcattcttactcctcttctggggctaatgtcagcatctatagacaatagactattaaaaaatcaccttttaaacaagaaacggaaggcatttgatgcagaatttttgcatgacaacatagaaataatttaaaaatagtgtttgttctgaatgttggtagacccttcatagctttgttacaatgaaaccttgaactgaaaatatttaataaaataacctttaaacagtca

SEQ ID NO: 300010 - DNA, 4169 bp, Homo sapiens
gtcggcaggctactggacttctcgtgtctgtctctgctgtacgaggtgttttttacatttaagaaaaaaacaaaaagaaacaacacgattgtttacaaaaaaagggactccataccatgatgcgttttaaaaccaccgacagcccttgggttggcaagaaggcaggagtatgtatgaggtccatcctggcatgagcagtggctcacccaccggccttgaagaggtgagcttggcctctctggtccccatggacttagggggaccaggcaagaactctgacagagctttgggggccgtgatgtgattgcagctcctgaggtggcctgcttaccccaggtctaggaatgaacttctttggaacttgcataggcgcctagaatggggctgatgagaacatcgtgaccatcagacctacttgctcctcttgctccctcggccgggcggcggtgactgtgcaccgacgtcggcgcgggctgcaccgccgcgtccgcccgcccgccagcatggccaccaccgccacctgcacccgtttcaccgacgactaccagctcttcgaggagcttggcaagtgtgtgaagaaaacctccacgcaggagtacgcagcaaaaatcatcaataccaagaagttgtctgcccgggatcaccagaaactagaacgtgaggctcggatatgtcgacttctgaaacatccaaacatcgtgcgcctccatgacagtatttctgaagaagggtttcactacctcgtgtttgaccttgttaccggcggggagctgtttgaagacattgtggccagagagtactacagtgaagcagatgccagccactgtatacatcagattctggagagtgttaaccacatccaccagcatgacatcgtccacagggacctgaagcctgagaacctgctgctggcgagtaaatgcaagggtgccgccgtcaagctggctgattttggcctagccatcgaagtacagggagagcagcaggcttggtttggttttgctggcaccccaggttacttgtcccctgaggtcttgaggaaagatccctatggaaaacctgtggatatctgggcctgcggggtcatcctgtatatcctcctggtgggctatcctcccttctgggatgaggatcagcacaagctgtatcagcagatcaaggctggagcctatgatttcccatcaccagaatgggacacggtaactcctgaagccaagaacttgatcaaccagatgctgaccataaacccagcaaagcgcatcacggctgaccaggctctcaagcacccgtgggtctgtcaacgatccacggtggcatccatgatgcatcgtcaggagactgtggagtgtttgcgcaagttcaatgcccggagaaaactgaagggtgccatcctcacgaccatgcttgtctccaggaacttctcagctgccaaaagcctattgaacaagaagtcggatggcggtgtcaagccacagagcaacaacaaaaacagtctcgtaagcccagcccaagagcccgcgcccttgcagacggccatggagccacaaaccactgtggtacacaacgctacagatgggatcaagggctccacagagagctgcaacaccaccacagaagatgaggacctcaaagctgccccgctccgcactgggaatggcagctcggtgcctgaaggacggagctcccgggacagaacagccccctctgcaggcatgcagccccagccttctctctgctcctcagccatgcgaaaacaggagatcattaagattacagaacagctgattgaagccatcaacaatggggactttgaggcctacacgaagatttgtgatccaggcctcacttcctttgagcctgaggcccttggtaacctcgtggaggggatggatttccataagttttactttgagaatctcctgtccaagaacagcaagcctatccataccaccatcctaaacccacacgtccacgtgattggggaggacgcagcgtgcatcgcctacatccgcctcacccagtacatcgacgggcagggtcggcctcgcaccagccagtcagaagagacccgggtctggcaccgtcgggatggcaagtggctcaatgtccactatcactgctcaggggcccctgccgcaccgctgcagtgagctcagccacaggggctttaggagattccagccggaggtccaaccttcgcagccagtggctctggagggcctgagtgacagcggcagtcctgtttgtttgaggtttaaaacaattcaattacaaaagcggcagcagccaatgcacgcccctgcatgcagccctcccgcccgcccttcgtgtctgtctctgctgtaccgaggtgttttttacatttaagaaaaaaaaaaaaagaaaaaaagattgtttaaaaaaaaaaggaatccataccatgatgcgttttaaaaccaccgacagcccttgggttggcaagaaggcaggagtatgtatgaggtccatcctggcatgagcagtggctcacccaccggccttgaagaggtgagcttggcctctctggtccccatggacttagggggaccaggcaagaactctgacagagctttgggggccgtgatgtgattgcagctcctgaggtggcctgcttaccccaggtctaggaatgaacttctttggaacttgcataggcgcctagaatggggctgatgagaacatcgtgaccatcagacctacttgggagagaacgcagagctcccagcctgctgtggaggcagctgagaagtggtggcctcaggactgagagcccggacgttgctgtactgtcttgtttagtgtagaagggaagagaattggtgctgcagaagtgtacccgccatgaagccgatgagaaacctcgtgttagtctgacatgcactcactcatccatttctataggatgcacaatgcatgtgggccctaatattgaggccttatccctgcagctaggagggggaggggttgttgctgctttgcttcgtgttttcttctaacctggcaaggagagagccaggccctggtcagggctcccgtgccgcctttggcggttctgtttctgtgctgatctggaccatctttgtcttgccttttcacggtagtggtccccatgctgaccctcatctgggcctgggccctctgccaagtgcccctgtgggatgggaggagtgaggcagtgggagaagaggtggtggtcgtttctatgcattcaggctgcctttggggctgcctcccttcttattcttccttgctgcacgtccatctcttttcctgtctttgagattgacctgactgctctggcaagaagaagaggtgtccttacagaggcctctttactgaccaactgaagtatagacttactgctggacaatctgcatgggcatcacccctccccgcatgtaacccaaaagaggtgtccagagccaaggcttctaccttcattgtccctctctgtgctcaaggagttccattccaggaggaagagatctataccctaagcagatagcaaagaagataatggaggagcaattggtcatggccttggtttccctcaaaacaacgctgcagatttatctgcacaaacatctccacttttgggggaaaggtgggtagattccagttccctggactaccttcaggaggcacgagagctgggagaagaggcaaagctacaggtttacttgggagccagctgagaagagagcagactcacaggtgctggtgcttggatttagccaggctcctccgagcacctcatgcatgtcccagcccctgggccctagccctttcctgccctgcagtctgcagtgccagcacgcaaatcccttcaccacagggtttcgttttgctggcttgaagacaaatggtcttagaattcattgagacccatagcttcatatggctgctccagccccacttcttagcattcttactcctcttctggggctaatgtcagcatctatagacaatagactattaaaaaatcaccttttaaacaagaaacggaaggcatttgatgcagaatttttgcatgacaacatagaaataatttaaaaatagtgtttgttctgaatgttggtagacccttcatagctttgttacaatgaaaccttgaactgaaaatatttaataaaataacctttaaacagtca

SEQ ID NO: 300011 - DNA, 3878 bp, Homo sapiens
  misc_feature (19)..(19): n is a, c, g, or t
agcgggctgccgggctcanccccgtctcctcctcttgctccctcggccgggcggcggtgactgtgcaccgacgtcggcgcgggctgcaccgccgcgtccgcccgcccgccagcatggccaccaccgccacctgcacccgtttcaccgacgactaccagctcttcgaggagcttggcaagggtgctttctctgtggtccgcaggtgtgtgaagaaaacctccacgcaggagtacgcagcaaaaatcatcaataccaagaagttgtctgcccgggatcaccagaaactagaacgtgaggctcggatatgtcgacttctgaaacatccaaacatcgtgcgcctccatgacagtatttctgaagaagggtttcactacctcgtgtttgaccttgttaccggcggggagctgtttgaagacattgtggccagagagtactacagtgaagcagatgccagccactgtatacatcagattctggagagtgttaaccacatccaccagcatgacatcgtccacagggacctgaagcctgagaacctgctgctggcgagtaaatgcaagggtgccgccgtcaagctggctgattttggcctagccatcgaagtacagggagagcagcaggcttggtttggttttgctggcaccccaggttacttgtcccctgaggtcttgaggaaagatccctatggaaaacctgtggatatctgggcctgcggggtcatcctgtatatcctcctggtgggctatcctcccttctgggatgaggatcagcacaagctgtatcagcagatcaaggctggagcctatgatttcccatcaccagaatgggacacggtaactcctgaagccaagaacttgatcaaccagatgctgaccataaacccagcaaagcgcatcacggctgaccaggctctcaagcacccgtgggtctgtcaacgatccacggtggcatccatgatgcatcgtcaggagactgtggagtgtttgcgcaagttcaatgcccggagaaaactgaagggtgccatcctcacgaccatgcttgtctccaggaacttctcagctgccaaaagcctattgaacaagaagtcggatggcggtgtcaagccacagagcaacaacaaaaacagtctcgtaagcccagcccaagagcccgcgcccttgcagacggccatggagccacaaaccactgtggtacacaacgctacagatgggatcaagggctccacagagagctgcaacaccaccacagaagatgaggacctcaaagctgccccgctccgcactgggaatggcagctcggtgcctgaaggacggagctcccgggacagaacagccccctctgcaggcatgcagccccagccttctctctgctcctcagccatgcgaaaacaggagatcattaagattacagaacagctgattgaagccatcaacaatggggactttgaggcctacacgaagatttgtgatccaggcctcacttcctttgagcctgaggcccttggtaacctcgtggaggggatggatttccataagttttactttgagaatctcctgtccaagaacagcaagcctatccataccaccatcctaaacccacacgtccacgtgattggggaggacgcagcgtgcatcgcctacatccgcctcacccagtacatcgacgggcagggtcggcctcgcaccagccagtcagaagagacccgggtctggcaccgtcgggatggcaagtgcatcgacgggcagggtcggcctcgcaccagccagtcagaagagacccgggtctggcaccgtcgggatggcaagtggctcaatgtccactatcactgctcaggggcccctgccgcaccgctgcagtgagctcagccacaggggctttaggagattccagccggaggtccaaccttcgcagccagtggctctggagggcctgagtgacagcggcagtcctgtttgtttgaggtttaaaacaattcaattacaaaagcggcagcagccaatgcacgcccctgcatgcagccctcccgcccgcccttcgtgtctgtctctgctgtaccgaggtgttttttacatttaagaaaaaaaaaaaaagaaaaaaagattgtttaaaaaaaaaaggaatccataccatgatgcgttttaaaaccaccgacagcccttgggttggcaagaaggcaggagtatgtatgaggtccatcctggcatgagcagtggctcacccaccggccttgaagaggtgagcttggcctctctggtccccatggacttagggggaccaggcaagaactctgacagagctttgggggccgtgatgtgattgcagctcctgaggtggcctgcttaccccaggtctaggaatgaacttctttggaacttgcataggcgcctagaatggggctgatgagaacatcgtgaccatcagacctacttgggagagaacgcagagctcccagcctgctgtggaggcagctgagaagtggtggcctcaggactgagagcccggacgttgctgtactgtcttgtttagtgtagaagggaagagaattggtgctgcagaagtgtacccgccatgaagccgatgagaaacctcgtgttagtctgacatgcactcactcatccatttctataggatgcacaatgcatgtgggccctaatattgaggccttatccctgcagctaggagggggaggggttgttgctgctttgcttcgtgttttcttctaacctggcaaggagagagccaggccctggtcagggctcccgtgccgcctttggcggttctgtttctgtgctgatctggaccatctttgtcttgccttttcacggtagtggtccccatgctgaccctcatctgggcctgggccctctgccaagtgcccctgtgggatgggaggagtgaggcagtgggagaagaggtggtggtcgtttctatgcattcaggctgcctttggggctgcctcccttcttattcttccttgctgcacgtccatctcttttcctgtctttgagattgacctgactgctctggcaagaagaagaggtgtccttacagaggcctctttactgaccaactgaagtatagacttactgctggacaatctgcatgggcatcacccctccccgcatgtaacccaaaagaggtgtccagagccaaggcttctaccttcattgtccctctctgtgctcaaggagttccattccaggaggaagagatctataccctaagcagatagcaaagaagataatggaggagcaattggtcatggccttggtttccctcaaaacaacgctgcagatttatctgcacaaacatctccacttttgggggaaaggtgggtagattccagttccctggactaccttcaggaggcacgagagctgggagaagaggcaaagctacaggtttacttgggagccagctgagaagagagcagactcacaggtgctggtgcttggatttagccaggctcctccgagcacctcatgcatgtcccagcccctgggccctagccctttcctgccctgcagtctgcagtgccagcacgcaaatcccttcaccacagggtttcgttttgctggcttgaagacaaatggtcttagaattcattgagacccatagcttcatatggctgctccagccccacttcttagcattcttactcctcttctggggctaatgtcagcatctatagacaatagactattaaaaaatcaccttttaaacaagaaacggaaggcatttgatgcagaatttttgcatgacaacatagaaataatttaaaaatagtgtttgttctgaatgttggtagacccttcatagctttgttacaatgaaaccttgaactgaaaatatttaataaaataacctttaaacagtca

SEQ ID NO: 300012 - DNA, 3623 bp, Homo sapiens
ctccattggattgggtctctcctccacgttggttgtggtttaatgtcttaaaagtggctcttacctcctggacactcctctccaggattctcagggttgggtctctgtgtcattggtctcattactcttcaacttcagtagtagctctgtccttcctgggcagcgatattttagtgtttatgttggtctcaaagctgtgacttttgggtgttaccggcggggagctgtttgaagacattgtggccagagagtactacagtgaagcagatgccagccactgtatacatcagattctggagagtgttaaccacatccaccagcatgacatcgtccacagggacctgaagcctgagaacctgctgctggcgagtaaatgcaagggtgccgccgtcaagctggctgattttggcctagccatcgaagtacagggagagcagcaggcttggtttggttttgctggcaccccaggttacttgtcccctgaggtcttgaggaaagatccctatggaaaacctgtggatatctgggcctgcggggtcatcctgtatatcctcctggtgggctatcctcccttctgggatgaggatcagcacaagctgtatcagcagatcaaggctggagcctatgatttcccatcaccagaatgggacacggtaactcctgaagccaagaacttgatcaaccagatgctgaccataaacccagcaaagcgcatcacggctgaccaggctctcaagcacccgtgggtctgtcaacgatccacggtggcatccatgatgcatcgtcaggagactgtggagtgtttgcgcaagttcaatgcccggagaaaactgaagggtgccatcctcacgaccatgcttgtctccaggaacttctcagctgccaaaagcctattgaacaagaagtcggatggcggtgtcaagccacagagcaacaacaaaaacagtctcgtaagcccagcccaagagcccgcgcccttgcagacggccatggagccacaaaccactgtggtacacaacgctacagatgggatcaagggctccacagagagctgcaacaccaccacagaagatgaggacctcaaagctgccccgctccgcactgggaatggcagctcggtgcctgaaggacggagctcccgggacagaacagccccctctgcaggcatgcagccccagccttctctctgctcctcagccatgcgaaaacaggagatcattaagattacagaacagctgattgaagccatcaacaatggggactttgaggcctacacgaagatttgtgatccaggcctcacttcctttgagcctgaggcccttggtaacctcgtggaggggatggatttccataagttttactttgagaatctcctgtccaagaacagcaagcctatccataccaccatcctaaacccacacgtccacgtgattggggaggacgcagcgtgcatcgcctacatccgcctcacccagtacatcgacgggcagggtcggcctcgcaccagccagtcagaagagacccgggtctggcaccgtcgggatggcaagtggctcaatgtccactatcactgctcaggggcccctgccgcaccgctgcagtgagctcagccacaggggctttaggagattccagccggaggtccaaccttcgcagccagtggctctggagggcctgagtgacagcggcagtcctgtttgtttgaggtttaaaacaattcaattacaaaagcggcagcagccaatgcacgcccctgcatgcagccctcccgcccgcccttcgtgtctgtctctgctgtaccgaggtgttttttacatttaagaaaaaaaaaaaaagaaaaaaagattgtttaaaaaaaaaaggaatccataccatgatgcgttttaaaaccaccgacagcccttgggttggcaagaaggcaggagtatgtatgaggtccatcctggcatgagcagtggctcacccaccggccttgaagaggtgagcttggcctctctggtccccatggacttagggggaccaggcaagaactctgacagagctttgggggccgtgatgtgattgcagctcctgaggtggcctgcttaccccaggtctaggaatgaacttctttggaacttgcataggcgcctagaatggggctgatgagaacatcgtgaccatcagacctacttgggagagaacgcagagctcccagcctgctgtggaggcagctgagaagtggtggcctcaggactgagagcccggacgttgctgtactgtcttgtttagtgtagaagggaagagaattggtgctgcagaagtgtacccgccatgaagccgatgagaaacctcgtgttagtctgacatgcactcactcatccatttctataggatgcacaatgcatgtgggccctaatattgaggccttatccctgcagctaggagggggaggggttgttgctgctttgcttcgtgttttcttctaacctggcaaggagagagccaggccctggtcagggctcccgtgccgcctttggcggttctgtttctgtgctgatctggaccatctttgtcttgccttttcacggtagtggtccccatgctgaccctcatctgggcctgggccctctgccaagtgcccctgtgggatgggaggagtgaggcagtgggagaagaggtggtggtcgtttctatgcattcaggctgcctttggggctgcctcccttcttattcttccttgctgcacgtccatctcttttcctgtctttgagattgacctgactgctctggcaagaagaagaggtgtccttacagaggcctctttactgaccaactgaagtatagacttactgctggacaatctgcatgggcatcacccctccccgcatgtaacccaaaagaggtgtccagagccaaggcttctaccttcattgtccctctctgtgctcaaggagttccattccaggaggaagagatctataccctaagcagatagcaaagaagataatggaggagcaattggtcatggccttggtttccctcaaaacaacgctgcagatttatctgcacaaacatctccacttttgggggaaaggtgggtagattccagttccctggactaccttcaggaggcacgagagctgggagaagaggcaaagctacaggtttacttgggagccagctgagaagagagcagactcacaggtgctggtgcttggatttagccaggctcctccgagcacctcatgcatgtcccagcccctgggccctagccctttcctgccctgcagtctgcagtgccagcacgcaaatcccttcaccacagggtttcgttttgctggcttgaagacaaatggtcttagaattcattgagacccatagcttcatatggctgctccagccccacttcttagcattcttactcctcttctggggctaatgtcagcatctatagacaatagactattaaaaaatcaccttttaaacaagaaacggaaggcatttgatgcagaatttttgcatgacaacatagaaataatttaaaaatagtgtttgttctgaatgttggtagacccttcatagctttgttacaatgaaaccttgaactgaaaatatttaataaaataacctttaaacagtca

SEQ ID NO: 300013 - DNA, 4072 bp, Homo sapiens
gtcggcaggctactggacttctcgtgtctgtctctgctgtacgaggtgttttttacatttaagaaaaaaacaaaaagaaacaacacgattgtttacaaaaaaagggactccataccatgatgcgttttaaaaccaccgacagcccttgggttggcaagaaggcaggagtatgtatgaggtccatcctggcatgagcagtggctcacccaccggccttgaagaggtgagcttggcctctctggtccccatggacttagggggaccaggcaagaactctgacagagctttgggggccgtgatgtgattgcagctcctgaggtggcctgcttaccccaggtctaggaatgaacttctttggaacttgcataggcgcctagaatggggctgatgagaacatcgtgaccatcagacctacttgctcctcttgctccctcggccgggcggcggtgactgtgcaccgacgtcggcgcgggctgcaccgccgcgtccgcccgcccgccagcatggccaccaccgccacctgcacccgtttcaccgacgactaccagctcttcgaggagcttggcaagggtgctttctctgtggtccgcaggtgtgtgaagaaaacctccacgcaggagtacgcagcaaaaatcatcaataccaagaagttgtctgcccgggatcaccagaaactagaacgtgaggctcggatatgtcgacttctgaaacatccaaacatcgccactgtatacatcagattctggagagtgttaaccacatccaccagcatgacatcgtccacagggacctgaagcctgagaacctgctgctggcgagtaaatgcaagggtgccgccgtcaagctggctgattttggcctagccatcgaagtacagggagagcagcaggcttggtttggttttgctggcaccccaggttacttgtcccctgaggtcttgaggaaagatccctatggaaaacctgtggatatctgggcctgcggggtcatcctgtatatcctcctggtgggctatcctcccttctgggatgaggatcagcacaagctgtatcagcagatcaaggctggagcctatgatttcccatcaccagaatgggacacggtaactcctgaagccaagaacttgatcaaccagatgctgaccataaacccagcaaagcgcatcacggctgaccaggctctcaagcacccgtgggtctgtcaacgatccacggtggcatccatgatgcatcgtcaggagactgtggagtgtttgcgcaagttcaatgcccggagaaaactgaagggtgccatcctcacgaccatgcttgtctccaggaacttctcagctgccaaaagcctattgaacaagaagtcggatggcggtgtcaagccacagagcaacaacaaaaacagtctcgtaagcccagcccaagagcccgcgcccttgcagacggccatggagccacaaaccactgtggtacacaacgctacagatgggatcaagggctccacagagagctgcaacaccaccacagaagatgaggacctcaaagctgccccgctccgcactgggaatggcagctcggtgcctgaaggacggagctcccgggacagaacagccccctctgcaggcatgcagccccagccttctctctgctcctcagccatgcgaaaacaggagatcattaagattacagaacagctgattgaagccatcaacaatggggactttgaggcctacacgaagatttgtgatccaggcctcacttcctttgagcctgaggcccttggtaacctcgtggaggggatggatttccataagttttactttgagaatctcctgtccaagaacagcaagcctatccataccaccatcctaaacccacacgtccacgtgattggggaggacgcagcgtgcatcgcctacatccgcctcacccagtacatcgacgggcagggtcggcctcgcaccagccagtcagaagagacccgggtctggcaccgtcgggatggcaagtggctcaatgtccactatcactgctcaggggcccctgccgcaccgctgcagtgagctcagccacaggggctttaggagattccagccggaggtccaaccttcgcagccagtggctctggagggcctgagtgacagcggcagtcctgtttgtttgaggtttaaaacaattcaattacaaaagcggcagcagccaatgcacgcccctgcatgcagccctcccgcccgcccttcgtgtctgtctctgctgtaccgaggtgttttttacatttaagaaaaaaaaaaaaagaaaaaaagattgtttaaaaaaaaaaggaatccataccatgatgcgttttaaaaccaccgacagcccttgggttggcaagaaggcaggagtatgtatgaggtccatcctggcatgagcagtggctcacccaccggccttgaagaggtgagcttggcctctctggtccccatggacttagggggaccaggcaagaactctgacagagctttgggggccgtgatgtgattgcagctcctgaggtggcctgcttaccccaggtctaggaatgaacttctttggaacttgcataggcgcctagaatggggctgatgagaacatcgtgaccatcagacctacttgggagagaacgcagagctcccagcctgctgtggaggcagctgagaagtggtggcctcaggactgagagcccggacgttgctgtactgtcttgtttagtgtagaagggaagagaattggtgctgcagaagtgtacccgccatgaagccgatgagaaacctcgtgttagtctgacatgcactcactcatccatttctataggatgcacaatgcatgtgggccctaatattgaggccttatccctgcagctaggagggggaggggttgttgctgctttgcttcgtgttttcttctaacctggcaaggagagagccaggccctggtcagggctcccgtgccgcctttggcggttctgtttctgtgctgatctggaccatctttgtcttgccttttcacggtagtggtccccatgctgaccctcatctgggcctgggccctctgccaagtgcccctgtgggatgggaggagtgaggcagtgggagaagaggtggtggtcgtttctatgcattcaggctgcctttggggctgcctcccttcttattcttccttgctgcacgtccatctcttttcctgtctttgagattgacctgactgctctggcaagaagaagaggtgtccttacagaggcctctttactgaccaactgaagtatagacttactgctggacaatctgcatgggcatcacccctccccgcatgtaacccaaaagaggtgtccagagccaaggcttctaccttcattgtccctctctgtgctcaaggagttccattccaggaggaagagatctataccctaagcagatagcaaagaagataatggaggagcaattggtcatggccttggtttccctcaaaacaacgctgcagatttatctgcacaaacatctccacttttgggggaaaggtgggtagattccagttccctggactaccttcaggaggcacgagagctgggagaagaggcaaagctacaggtttacttgggagccagctgagaagagagcagactcacaggtgctggtgcttggatttagccaggctcctccgagcacctcatgcatgtcccagcccctgggccctagccctttcctgccctgcagtctgcagtgccagcacgcaaatcccttcaccacagggtttcgttttgctggcttgaagacaaatggtcttagaattcattgagacccatagcttcatatggctgctccagccccacttcttagcattcttactcctcttctggggctaatgtcagcatctatagacaatagactattaaaaaatcaccttttaaacaagaaacggaaggcatttgatgcagaatttttgcatgacaacatagaaataatttaaaaatagtgtttgttctgaatgttggtagacccttcatagctttgttacaatgaaaccttgaactgaaaatatttaataaaataacctttaaacagtca

SEQ ID NO: 300014 - DNA, 3130 bp, Homo sapiens
tccagagaacttccatggcacctagggatggagccctcactctttcaccccggcactctgcttccaggcctgggtggaagctgtcaaaggcagagtccccagtgccccacgcggctccagtactgagcatggtttctcctctaagtgtcgtgcatccatgccctcctccacgcagaggagatcctgaggtgccaccctgagggctctgacgccactcaagatccccttcttgctgagaggctataggaagtgcctcttttgggggtttcgggagacccttggcccccttgtcagacacagcactctcttgtggatctggctgccggacttcaggttggggagagggtacaatgcaggagacttgatattcctctttgttttcacagctgccaaaagcctattgaacaagaagtcggatggcggtgtcaagccacagagcaacaacaaaaacagtctcgtaagcccagcccaagagcccgcgcccttgcagacggccatggagccacaaaccactgtggtacacaacgctacagatgggatcaagggctccacagagagctgcaacaccaccacagaagatgaggacctcaaagctgccccgctccgcactgggaatggcagctcggtgcctgaaggacggagctcccgggacagaacagccccctctgcaggcatgcagccccagccttctctctgctcctcagccatgcgaaaacaggagatcattaagattacagaacagctgattgaagccatcaacaatggggactttgaggcctacacgaagatttgtgatccaggcctcacttcctttgagcctgaggcccttggtaacctcgtggaggggatggatttccataagttttactttgagaatctcctgtccaagaacagcaagcctatccataccaccatcctaaacccacacgtccacgtgattggggaggacgcagcgtgcatcgcctacatccgcctcacccagtacatcgacgggcagggtcggcctcgcaccagccagtcagaagagacccgggtctggcaccgtcgggatggcaagtggctcaatgtccactatcactgctcaggggcccctgccgcaccgctgcagtgagctcagccacaggggctttaggagattccagccggaggtccaaccttcgcagccagtggctctggagggcctgagtgacagcggcagtcctgtttgtttgaggtttaaaacaattcaattacaaaagcggcagcagccaatgcacgcccctgcatgcagccctcccgcccgcccttcgtgtctgtctctgctgtaccgaggtgttttttacatttaagaaaaaaaaaaaaagaaaaaaagattgtttaaaaaaaaaaggaatccataccatgatgcgttttaaaaccaccgacagcccttgggttggcaagaaggcaggagtatgtatgaggtccatcctggcatgagcagtggctcacccaccggccttgaagaggtgagcttggcctctctggtccccatggacttagggggaccaggcaagaactctgacagagctttgggggccgtgatgtgattgcagctcctgaggtggcctgcttaccccaggtctaggaatgaacttctttggaacttgcataggcgcctagaatggggctgatgagaacatcgtgaccatcagacctacttgggagagaacgcagagctcccagcctgctgtggaggcagctgagaagtggtggcctcaggactgagagcccggacgttgctgtactgtcttgtttagtgtagaagggaagagaattggtgctgcagaagtgtacccgccatgaagccgatgagaaacctcgtgttagtctgacatgcactcactcatccatttctataggatgcacaatgcatgtgggccctaatattgaggccttatccctgcagctaggagggggaggggttgttgctgctttgcttcgtgttttcttctaacctggcaaggagagagccaggccctggtcagggctcccgtgccgcctttggcggttctgtttctgtgctgatctggaccatctttgtcttgccttttcacggtagtggtccccatgctgaccctcatctgggcctgggccctctgccaagtgcccctgtgggatgggaggagtgaggcagtgggagaagaggtggtggtcgtttctatgcattcaggctgcctttggggctgcctcccttcttattcttccttgctgcacgtccatctcttttcctgtctttgagattgacctgactgctctggcaagaagaagaggtgtccttacagaggcctctttactgaccaactgaagtatagacttactgctggacaatctgcatgggcatcacccctccccgcatgtaacccaaaagaggtgtccagagccaaggcttctaccttcattgtccctctctgtgctcaaggagttccattccaggaggaagagatctataccctaagcagatagcaaagaagataatggaggagcaattggtcatggccttggtttccctcaaaacaacgctgcagatttatctgcacaaacatctccacttttgggggaaaggtgggtagattccagttccctggactaccttcaggaggcacgagagctgggagaagaggcaaagctacaggtttacttgggagccagctgagaagagagcagactcacaggtgctggtgcttggatttagccaggctcctccgagcacctcatgcatgtcccagcccctgggccctagccctttcctgccctgcagtctgcagtgccagcacgcaaatcccttcaccacagggtttcgttttgctggcttgaagacaaatggtcttagaattcattgagacccatagcttcatatggctgctccagccccacttcttagcattcttactcctcttctggggctaatgtcagcatctatagacaatagactattaaaaaatcaccttttaaacaagaaacggaaggcatttgatgcagaatttttgcatgacaacatagaaataatttaaaaatagtgtttgttctgaatgttggtagacccttcatagctttgttacaatgaaaccttgaactgaaaatatttaataaaataacctttaaacagtca

SEQ ID NO: 300015 - DNA, 2693 bp, Homo sapiens
  misc_feature (32)..(32): n is a, c, g, or t
  misc_feature (61)..(61): n is a, c, g, or t
ccgcgagcgccgccgcctgggccgggcaagtngccaaaagctttttgaacaagaattcggntggcgttgtcaagaaaaggaagtcgagttccagcgtgcacctaatgccacagagcaacaacaaaaacagtctcgtaagcccagcccaagagcccgcgcccttgcagacggccatggagccacaaaccactgtggtacacaacgctacagatgggatcaagggctccacagagagctgcaacaccaccacagaagatgaggacctcaaagtgcgaaaacaggagatcattaagattacagaacagctgattgaagccatcaacaatggggactttgaggcctacacgaagatttgtgatccaggcctcacttcctttgagcctgaggcccttggtaacctcgtggaggggatggatttccataagttttactttgagaatctcctgtccaagaacagcaagcctatccataccaccatcctaaacccacacgtccacgtgattggggaggacgcagcgtgcatcgcctacatccgcctcacccagtacatcgacgggcagggtcggcctcgcaccagccagtcagaagagacccgggtctggcaccgtcgggatggcaagtggctcaatgtccactatcactgctcaggggcccctgccgcaccgctgcagtgagctcagccacaggggctttaggagattccagccggaggtccaaccttcgcagccagtggctctggagggcctgagtgacagcggcagtcctgtttgtttgaggtttaaaacaattcaattacaaaagcggcagcagccaatgcacgcccctgcatgcagccctcccgcccgcccttcgtgtctgtctctgctgtaccgaggtgttttttacatttaagaaaaaaaaaaaaagaaaaaaagattgtttaaaaaaaaaaggaatccataccatgatgcgttttaaaaccaccgacagcccttgggttggcaagaaggcaggagtatgtatgaggtccatcctggcatgagcagtggctcacccaccggccttgaagaggtgagcttggcctctctggtccccatggacttagggggaccaggcaagaactctgacagagctttgggggccgtgatgtgattgcagctcctgaggtggcctgcttaccccaggtctaggaatgaacttctttggaacttgcataggcgcctagaatggggctgatgagaacatcgtgaccatcagacctacttgggagagaacgcagagctcccagcctgctgtggaggcagctgagaagtggtggcctcaggactgagagcccggacgttgctgtactgtcttgtttagtgtagaagggaagagaattggtgctgcagaagtgtacccgccatgaagccgatgagaaacctcgtgttagtctgacatgcactcactcatccatttctataggatgcacaatgcatgtgggccctaatattgaggccttatccctgcagctaggagggggaggggttgttgctgctttgcttcgtgttttcttctaacctggcaaggagagagccaggccctggtcagggctcccgtgccgcctttggcggttctgtttctgtgctgatctggaccatctttgtcttgccttttcacggtagtggtccccatgctgaccctcatctgggcctgggccctctgccaagtgcccctgtgggatgggaggagtgaggcagtgggagaagaggtggtggtcgtttctatgcattcaggctgcctttggggctgcctcccttcttattcttccttgctgcacgtccatctcttttcctgtctttgagattgacctgactgctctggcaagaagaagaggtgtccttacagaggcctctttactgaccaactgaagtatagacttactgctggacaatctgcatgggcatcacccctccccgcatgtaacccaaaagaggtgtccagagccaaggcttctaccttcattgtccctctctgtgctcaaggagttccattccaggaggaagagatctataccctaagcagatagcaaagaagataatggaggagcaattggtcatggccttggtttccctcaaaacaacgctgcagatttatctgcacaaacatctccacttttgggggaaaggtgggtagattccagttccctggactaccttcaggaggcacgagagctgggagaagaggcaaagctacaggtttacttgggagccagctgagaagagagcagactcacaggtgctggtgcttggatttagccaggctcctccgagcacctcatgcatgtcccagcccctgggccctagccctttcctgccctgcagtctgcagtgccagcacgcaaatcccttcaccacagggtttcgttttgctggcttgaagacaaatggtcttagaattcattgagacccatagcttcatatggctgctccagccccacttcttagcattcttactcctcttctggggctaatgtcagcatctatagacaatagactattaaaaaatcaccttttaaacaagaaacggaaggcatttgatgcagaatttttgcatgacaacatagaaataatttaaaaatagtgtttgttctgaatgttggtagacccttcatagctttgttacaatgaaaccttgaactgaaaatatttaataaaataacctttaaacagtca

SEQ ID NO: 300016 - DNA, 2665 bp, Homo sapiens
aaggccaaagaaccataactaatggctgggcttcaggagaaagtggtcattgtctctgcagactgcagagagggagacgggagggaaggtgtgttcgctcttcctgccaagggccctagagacagagaagagggatgtctttgtcataagcgatcacaggggactcctgaggactggggagggctctctgtaacttgggaggttccccagtaggtaaattgatggatttttctcccccacagtgcgaaaacaggagatcattaagattacagaacagctgattgaagccatcaacaatggggactttgaggcctacacgaagatttgtgatccaggcctcacttcctttgagcctgaggcccttggtaacctcgtggaggggatggatttccataagttttactttgagaatctcctgtccaagaacagcaagcctatccataccaccatcctaaacccacacgtccacgtgattggggaggacgcagcgtgcatcgcctacatccgcctcacccagtacatcgacgggcagggtcggcctcgcaccagccagtcagaagagacccgggtctggcaccgtcgggatggcaagtggctcaatgtccactatcactgctcaggggcccctgccgcaccgctgcagtgagctcagccacaggggctttaggagattccagccggaggtccaaccttcgcagccagtggctctggagggcctgagtgacagcggcagtcctgtttgtttgaggtttaaaacaattcaattacaaaagcggcagcagccaatgcacgcccctgcatgcagccctcccgcccgcccttcgtgtctgtctctgctgtaccgaggtgttttttacatttaagaaaaaaaaaaaaagaaaaaaagattgtttaaaaaaaaaaggaatccataccatgatgcgttttaaaaccaccgacagcccttgggttggcaagaaggcaggagtatgtatgaggtccatcctggcatgagcagtggctcacccaccggccttgaagaggtgagcttggcctctctggtccccatggacttagggggaccaggcaagaactctgacagagctttgggggccgtgatgtgattgcagctcctgaggtggcctgcttaccccaggtctaggaatgaacttctttggaacttgcataggcgcctagaatggggctgatgagaacatcgtgaccatcagacctacttgggagagaacgcagagctcccagcctgctgtggaggcagctgagaagtggtggcctcaggactgagagcccggacgttgctgtactgtcttgtttagtgtagaagggaagagaattggtgctgcagaagtgtacccgccatgaagccgatgagaaacctcgtgttagtctgacatgcactcactcatccatttctataggatgcacaatgcatgtgggccctaatattgaggccttatccctgcagctaggagggggaggggttgttgctgctttgcttcgtgttttcttctaacctggcaaggagagagccaggccctggtcagggctcccgtgccgcctttggcggttctgtttctgtgctgatctggaccatctttgtcttgccttttcacggtagtggtccccatgctgaccctcatctgggcctgggccctctgccaagtgcccctgtgggatgggaggagtgaggcagtgggagaagaggtggtggtcgtttctatgcattcaggctgcctttggggctgcctcccttcttattcttccttgctgcacgtccatctcttttcctgtctttgagattgacctgactgctctggcaagaagaagaggtgtccttacagaggcctctttactgaccaactgaagtatagacttactgctggacaatctgcatgggcatcacccctccccgcatgtaacccaaaagaggtgtccagagccaaggcttctaccttcattgtccctctctgtgctcaaggagttccattccaggaggaagagatctataccctaagcagatagcaaagaagataatggaggagcaattggtcatggccttggtttccctcaaaacaacgctgcagatttatctgcacaaacatctccacttttgggggaaaggtgggtagattccagttccctggactaccttcaggaggcacgagagctgggagaagaggcaaagctacaggtttacttgggagccagctgagaagagagcagactcacaggtgctggtgcttggatttagccaggctcctccgagcacctcatgcatgtcccagcccctgggccctagccctttcctgccctgcagtctgcagtgccagcacgcaaatcccttcaccacagggtttcgttttgctggcttgaagacaaatggtcttagaattcattgagacccatagcttcatatggctgctccagccccacttcttagcattcttactcctcttctggggctaatgtcagcatctatagacaatagactattaaaaaatcaccttttaaacaagaaacggaaggcatttgatgcagaatttttgcatgacaacatagaaataatttaaaaatagtgtttgttctgaatgttggtagacccttcatagctttgttacaatgaaaccttgaactgaaaatatttaataaaataacctttaaacagtca

SEQ ID NO: 300017 - DNA, 2705 bp, Homo sapiens
  misc_feature (148)..(148): n is a, c, g, or t
atacgaagatgagaagagattaggggaagccacagaaccaccaggtaggttttgaggggaaacctactatttagccccccgtcctgccacgccgtggagcatcagcgcacacactctgcaaccgcatcacccgttcgaacgggtgatncggttggggaggaggcctctggagggcaccacctctgcctgcctgtcagtctgagccctgtctggttttcctgaggaacacgtcctggcaatgagagctggtgtgaaatgtgcagctttcccaagcctcgagagtgcgaaaacaggagatcattaagattacagaacagctgattgaagccatcaacaatggggactttgaggcctacacgaagatttgtgatccaggcctcacttcctttgagcctgaggcccttggtaacctcgtggaggggatggatttccataagttttactttgagaatctcctgtccaagaacagcaagcctatccataccaccatcctaaacccacacgtccacgtgattggggaggacgcagcgtgcatcgcctacatccgcctcacccagtacatcgacgggcagggtcggcctcgcaccagccagtcagaagagacccgggtctggcaccgtcgggatggcaagtggctcaatgtccactatcactgctcaggggcccctgccgcaccgctgcagtgagctcagccacaggggctttaggagattccagccggaggtccaaccttcgcagccagtggctctggagggcctgagtgacagcggcagtcctgtttgtttgaggtttaaaacaattcaattacaaaagcggcagcagccaatgcacgcccctgcatgcagccctcccgcccgcccttcgtgtctgtctctgctgtaccgaggtgttttttacatttaagaaaaaaaaaaaaagaaaaaaagattgtttaaaaaaaaaaggaatccataccatgatgcgttttaaaaccaccgacagcccttgggttggcaagaaggcaggagtatgtatgaggtccatcctggcatgagcagtggctcacccaccggccttgaagaggtgagcttggcctctctggtccccatggacttagggggaccaggcaagaactctgacagagctttgggggccgtgatgtgattgcagctcctgaggtggcctgcttaccccaggtctaggaatgaacttctttggaacttgcataggcgcctagaatggggctgatgagaacatcgtgaccatcagacctacttgggagagaacgcagagctcccagcctgctgtggaggcagctgagaagtggtggcctcaggactgagagcccggacgttgctgtactgtcttgtttagtgtagaagggaagagaattggtgctgcagaagtgtacccgccatgaagccgatgagaaacctcgtgttagtctgacatgcactcactcatccatttctataggatgcacaatgcatgtgggccctaatattgaggccttatccctgcagctaggagggggaggggttgttgctgctttgcttcgtgttttcttctaacctggcaaggagagagccaggccctggtcagggctcccgtgccgcctttggcggttctgtttctgtgctgatctggaccatctttgtcttgccttttcacggtagtggtccccatgctgaccctcatctgggcctgggccctctgccaagtgcccctgtgggatgggaggagtgaggcagtgggagaagaggtggtggtcgtttctatgcattcaggctgcctttggggctgcctcccttcttattcttccttgctgcacgtccatctcttttcctgtctttgagattgacctgactgctctggcaagaagaagaggtgtccttacagaggcctctttactgaccaactgaagtatagacttactgctggacaatctgcatgggcatcacccctccccgcatgtaacccaaaagaggtgtccagagccaaggcttctaccttcattgtccctctctgtgctcaaggagttccattccaggaggaagagatctataccctaagcagatagcaaagaagataatggaggagcaattggtcatggccttggtttccctcaaaacaacgctgcagatttatctgcacaaacatctccacttttgggggaaaggtgggtagattccagttccctggactaccttcaggaggcacgagagctgggagaagaggcaaagctacaggtttacttgggagccagctgagaagagagcagactcacaggtgctggtgcttggatttagccaggctcctccgagcacctcatgcatgtcccagcccctgggccctagccctttcctgccctgcagtctgcagtgccagcacgcaaatcccttcaccacagggtttcgttttgctggcttgaagacaaatggtcttagaattcattgagacccatagcttcatatggctgctccagccccacttcttagcattcttactcctcttctggggctaatgtcagcatctatagacaatagactattaaaaaatcaccttttaaacaagaaacggaaggcatttgatgcagaatttttgcatgacaacatagaaataatttaaaaatagtgtttgttctgaatgttggtagacccttcatagctttgttacaatgaaaccttgaactgaaaatatttaataaaataacctttaaacagtca

SEQ ID NO: 300018 - DNA, 3460 bp, Homo sapiens
agcctcacctctttccaagacggattggaaggaaaccctttgagattaggttgagatgatctcagcacataagaactaagctctgtgtctgcaggtttcacaatagaggaaattaaaaccaggataagaatgtgcaaaccagggcactgttggtgatttgcgagatcggaagttgtggctagaatcttcctgactatggaggaaggcagacgtcttgtatagggggtggggtgtacattctggacagttcatggaaaataaggggataagaagctgaatcatcaccccctcccatctttctctctgctctatgagaccctccccttccttatttttatctcttcccactttatgctgggccttccctatcctgccctgagttatagttagtcactaacttctccgctggctcccacccttatcacatctcagctacatatataaactctctgttatctaagtaattctattagccagaagcaattccagagtttatattagtactaggaaggtgtcatgtagcccctgtctaacatttgaattgaactaaaatgtgaatctcaataaaagcaacacagttttcacagcatatgctgataatggcaatccaacttcttttgccttttccccagagaatcctgggaatatcctgagcttggtgctttgatgattctatttcagctttggtgccttaaaaaaaattacaaatcaattttgaatggtttaagttcatgattttgttctgcagccctagctaggggtgagccaagccttatgaaatctaaactcagcctaacagaatagaaaatctataggctttagttaagagtcacatggtcctgagttcaggtgtgtgatttgagcaaattattccttgagcctatttcctcatcttataatgaagaaaatattatccaccaagaaatacagctcgggcatgtaaaaccccagcacaatgcctgattaaaagcgcagcaggtactgtcactgttacccatctttctgttccttttggataaaggagactaatgtaatgtggcatcctggcctctggagggcgttcaggggttcgggggtgggggggggcggtacttggagattctgggagtggttgcttgggagatggtaagacttggaagtgcaggctgggaggaaaatgcaggtgcccaggcctgatgtcctcttacctaccccaccctgccctgcagtcctgtccaagaacagcaagcctatccataccaccatcctaaacccacacgtccacgtgattggggaggacgcagcgtgcatcgcctacatccgcctcacccagtacatcgacgggcagggtcggcctcgcaccagccagtcagaagagacccgggtctggcaccgtcgggatggcaagtggctcaatgtccactatcactgctcaggggcccctgccgcaccgctgcagtgagctcagccacaggggctttaggagattccagccggaggtccaaccttcgcagccagtggctctggagggcctgagtgacagcggcagtcctgtttgtttgaggtttaaaacaattcaattacaaaagcggcagcagccaatgcacgcccctgcatgcagccctcccgcccgcccttcgtgtctgtctctgctgtaccgaggtgttttttacatttaagaaaaaaaaaaaaagaaaaaaagattgtttaaaaaaaaaaggaatccataccatgatgcgttttaaaaccaccgacagcccttgggttggcaagaaggcaggagtatgtatgaggtccatcctggcatgagcagtggctcacccaccggccttgaagaggtgagcttggcctctctggtccccatggacttagggggaccaggcaagaactctgacagagctttgggggccgtgatgtgattgcagctcctgaggtggcctgcttaccccaggtctaggaatgaacttctttggaacttgcataggcgcctagaatggggctgatgagaacatcgtgaccatcagacctacttgggagagaacgcagagctcccagcctgctgtggaggcagctgagaagtggtggcctcaggactgagagcccggacgttgctgtactgtcttgtttagtgtagaagggaagagaattggtgctgcagaagtgtacccgccatgaagccgatgagaaacctcgtgttagtctgacatgcactcactcatccatttctataggatgcacaatgcatgtgggccctaatattgaggccttatccctgcagctaggagggggaggggttgttgctgctttgcttcgtgttttcttctaacctggcaaggagagagccaggccctggtcagggctcccgtgccgcctttggcggttctgtttctgtgctgatctggaccatctttgtcttgccttttcacggtagtggtccccatgctgaccctcatctgggcctgggccctctgccaagtgcccctgtgggatgggaggagtgaggcagtgggagaagaggtggtggtcgtttctatgcattcaggctgcctttggggctgcctcccttcttattcttccttgctgcacgtccatctcttttcctgtctttgagattgacctgactgctctggcaagaagaagaggtgtccttacagaggcctctttactgaccaactgaagtatagacttactgctggacaatctgcatgggcatcacccctccccgcatgtaacccaaaagaggtgtccagagccaaggcttctaccttcattgtccctctctgtgctcaaggagttccattccaggaggaagagatctataccctaagcagatagcaaagaagataatggaggagcaattggtcatggccttggtttccctcaaaacaacgctgcagatttatctgcacaaacatctccacttttgggggaaaggtgggtagattccagttccctggactaccttcaggaggcacgagagctgggagaagaggcaaagctacaggtttacttgggagccagctgagaagagagcagactcacaggtgctggtgcttggatttagccaggctcctccgagcacctcatgcatgtcccagcccctgggccctagccctttcctgccctgcagtctgcagtgccagcacgcaaatcccttcaccacagggtttcgttttgctggcttgaagacaaatggtcttagaattcattgagacccatagcttcatatggctgctccagccccacttcttagcattcttactcctcttctggggctaatgtcagcatctatagacaatagactattaaaaaatcaccttttaaacaagaaacggaaggcatttgatgcagaatttttgcatgacaacatagaaataatttaaaaatagtgtttgttctgaatgttggtagacccttcatagctttgttacaatgaaaccttgaactgaaaatatttaataaaataacctttaaacagtca

SEQ ID NO: 300019 - DNA, 3535 bp, Homo sapiens
agcctcacctctttccaagacggattggaaggaaaccctttgagattaggttgagatgatctcagcacataagaactaagctctgtgtctgcaggtttcacaatagaggaaattaaaaccaggataagaatgtgcaaaccagggcactgttggtgatttgcgagatcggaagttgtggctagaatcttcctgactatggaggaaggcagacgtcttgtatagggggtggggtgtacattctggacagttcatggaaaataaggggataagaagctgaatcatcaccccctcccatctttctctctgctctatgagaccctccccttccttatttttatctcttcccactttatgctgggccttccctatcctgccctgagttatagttagtcactaacttctccgctggctcccacccttatcacatctcagctacatatataaactctctgttatctaagtaattctattagccagaagcaattccagagtttatattagtactaggaaggtgtcatgtagcccctgtctaacatttgaattgaactaaaatgtgaatctcaataaaagcaacacagttttcacagcatatgctgataatggcaatccaacttcttttgccttttccccagagaatcctgggaatatcctgagcttggtgctttgatgattctatttcagctttggtgccttaaaaaaaattacaaatcaattttgaatggtttaagttcatgattttgttctgcagccctagctaggggtgagccaagccttatgaaatctaaactcagcctaacagaatagaaaatctataggctttagttaagagtcacatggtcctgagttcaggtgtgtgatttgagcaaattattccttgagcctatttcctcatcttataatgaagaaaatattatccaccaagaaatacagctcgggcatgtaaaaccccagcacaatgcctgattaaaagcgcagcaggtactgtcactgttacccatctttctgttccttttggataaaggagactaatgtaatgtggcatcctggcctctggagggcgttcaggggttcgggggtgggggggggcggtacttggagattctgggagtggttgcttgggagatggtaagacttggaagtgcaggctgggaggaaaatgcaggtgcccaggcctgatgtcctcttacctaccccaccctgccctgcagtcctgtccaagaacagcaagcctatccataccaccatcctaaacccacacgtccacgtgattggggaggacgcagcgtgcatcgcctacatccgcctcacccagtacatcgacgggcagggtcggcctcgcaccagccagtcagaagagacccgggtctggcaccgtcgggatggcaagtgcatcgacgggcagggtcggcctcgcaccagccagtcagaagagacccgggtctggcaccgtcgggatggcaagtggctcaatgtccactatcactgctcaggggcccctgccgcaccgctgcagtgagctcagccacaggggctttaggagattccagccggaggtccaaccttcgcagccagtggctctggagggcctgagtgacagcggcagtcctgtttgtttgaggtttaaaacaattcaattacaaaagcggcagcagccaatgcacgcccctgcatgcagccctcccgcccgcccttcgtgtctgtctctgctgtaccgaggtgttttttacatttaagaaaaaaaaaaaaagaaaaaaagattgtttaaaaaaaaaaggaatccataccatgatgcgttttaaaaccaccgacagcccttgggttggcaagaaggcaggagtatgtatgaggtccatcctggcatgagcagtggctcacccaccggccttgaagaggtgagcttggcctctctggtccccatggacttagggggaccaggcaagaactctgacagagctttgggggccgtgatgtgattgcagctcctgaggtggcctgcttaccccaggtctaggaatgaacttctttggaacttgcataggcgcctagaatggggctgatgagaacatcgtgaccatcagacctacttgggagagaacgcagagctcccagcctgctgtggaggcagctgagaagtggtggcctcaggactgagagcccggacgttgctgtactgtcttgtttagtgtagaagggaagagaattggtgctgcagaagtgtacccgccatgaagccgatgagaaacctcgtgttagtctgacatgcactcactcatccatttctataggatgcacaatgcatgtgggccctaatattgaggccttatccctgcagctaggagggggaggggttgttgctgctttgcttcgtgttttcttctaacctggcaaggagagagccaggccctggtcagggctcccgtgccgcctttggcggttctgtttctgtgctgatctggaccatctttgtcttgccttttcacggtagtggtccccatgctgaccctcatctgggcctgggccctctgccaagtgcccctgtgggatgggaggagtgaggcagtgggagaagaggtggtggtcgtttctatgcattcaggctgcctttggggctgcctcccttcttattcttccttgctgcacgtccatctcttttcctgtctttgagattgacctgactgctctggcaagaagaagaggtgtccttacagaggcctctttactgaccaactgaagtatagacttactgctggacaatctgcatgggcatcacccctccccgcatgtaacccaaaagaggtgtccagagccaaggcttctaccttcattgtccctctctgtgctcaaggagttccattccaggaggaagagatctataccctaagcagatagcaaagaagataatggaggagcaattggtcatggccttggtttccctcaaaacaacgctgcagatttatctgcacaaacatctccacttttgggggaaaggtgggtagattccagttccctggactaccttcaggaggcacgagagctgggagaagaggcaaagctacaggtttacttgggagccagctgagaagagagcagactcacaggtgctggtgcttggatttagccaggctcctccgagcacctcatgcatgtcccagcccctgggccctagccctttcctgccctgcagtctgcagtgccagcacgcaaatcccttcaccacagggtttcgttttgctggcttgaagacaaatggtcttagaattcattgagacccatagcttcatatggctgctccagccccacttcttagcattcttactcctcttctggggctaatgtcagcatctatagacaatagactattaaaaaatcaccttttaaacaagaaacggaaggcatttgatgcagaatttttgcatgacaacatagaaataatttaaaaatagtgtttgttctgaatgttggtagacccttcatagctttgttacaatgaaaccttgaactgaaaatatttaataaaataacctttaaacagtca

SEQ ID NO: 300020 - DNA, 2401 bp, Homo sapiens
gccgtcccagaggactggcaaagctggcagaatggttgcaataagttatgcttggaaatcagacagactagggtctggctccgtgactccaaattggatgacctcagacaggttacttcccctccctaaactgtttccttagctgtcaaagaaaggcagagagtggtgcctacctcatttaatcattgtgaggattaagtaagatactataagtaaagcacttagttagtgcttagcaaatgggaggcagttttgtatttaagcattagcttcacccactttccccaccttctcaggccgacttggccatgtgtttagcgtgctaaagtcgctggaactcatctgtgtgctcattgtcctctgttctgttaccacattctgtcctgtttgacaggggctttaggagattccagccggaggtccaaccttcgcagccagtggctctggagggcctgagtgacagcggcagtcctgtttgtttgaggtttaaaacaattcaattacaaaagcggcagcagccaatgcacgcccctgcatgcagccctcccgcccgcccttcgtgtctgtctctgctgtaccgaggtgttttttacatttaagaaaaaaaaaaaaagaaaaaaagattgtttaaaaaaaaaaggaatccataccatgatgcgttttaaaaccaccgacagcccttgggttggcaagaaggcaggagtatgtatgaggtccatcctggcatgagcagtggctcacccaccggccttgaagaggtgagcttggcctctctggtccccatggacttagggggaccaggcaagaactctgacagagctttgggggccgtgatgtgattgcagctcctgaggtggcctgcttaccccaggtctaggaatgaacttctttggaacttgcataggcgcctagaatggggctgatgagaacatcgtgaccatcagacctacttgggagagaacgcagagctcccagcctgctgtggaggcagctgagaagtggtggcctcaggactgagagcccggacgttgctgtactgtcttgtttagtgtagaagggaagagaattggtgctgcagaagtgtacccgccatgaagccgatgagaaacctcgtgttagtctgacatgcactcactcatccatttctataggatgcacaatgcatgtgggccctaatattgaggccttatccctgcagctaggagggggaggggttgttgctgctttgcttcgtgttttcttctaacctggcaaggagagagccaggccctggtcagggctcccgtgccgcctttggcggttctgtttctgtgctgatctggaccatctttgtcttgccttttcacggtagtggtccccatgctgaccctcatctgggcctgggccctctgccaagtgcccctgtgggatgggaggagtgaggcagtgggagaagaggtggtggtcgtttctatgcattcaggctgcctttggggctgcctcccttcttattcttccttgctgcacgtccatctcttttcctgtctttgagattgacctgactgctctggcaagaagaagaggtgtccttacagaggcctctttactgaccaactgaagtatagacttactgctggacaatctgcatgggcatcacccctccccgcatgtaacccaaaagaggtgtccagagccaaggcttctaccttcattgtccctctctgtgctcaaggagttccattccaggaggaagagatctataccctaagcagatagcaaagaagataatggaggagcaattggtcatggccttggtttccctcaaaacaacgctgcagatttatctgcacaaacatctccacttttgggggaaaggtgggtagattccagttccctggactaccttcaggaggcacgagagctgggagaagaggcaaagctacaggtttacttgggagccagctgagaagagagcagactcacaggtgctggtgcttggatttagccaggctcctccgagcacctcatgcatgtcccagcccctgggccctagccctttcctgccctgcagtctgcagtgccagcacgcaaatcccttcaccacagggtttcgttttgctggcttgaagacaaatggtcttagaattcattgagacccatagcttcatatggctgctccagccccacttcttagcattcttactcctcttctggggctaatgtcagcatctatagacaatagactattaaaaaatcaccttttaaacaagaaacggaaggcatttgatgcagaatttttgcatgacaacatagaaataatttaaaaatagtgtttgttctgaatgttggtagacccttcatagctttgttacaatgaaaccttgaactgaaaatatttaataaaataacctttaaacagtca

SEQ ID NO: 300021 - DNA, 1924 bp, Homo sapiens
  misc_feature (19)..(19): n is a, c, g, or t
agcgggctgccgggctcanccccgtctcctcctcttgctccctcggccgggcggcggtgactgtgcaccgacgtcggcgcgggctgcaccgccgcgtccgcccgcccgccagcatggccaccaccgccacctgcacccgtttcaccgacgactaccagctcttcgaggagcttggcaagggtgctttctctgtggtccgcaggtgtgtgaagaaaacctccacgcaggagtacgcagcaaaaatcatcaataccaagaagttgtctgcccgggatcaccagaaactagaacgtgaggctcggatatgtcgacttctgaaacatccaaacatcgtgcgcctccatgacagtatttctgaagaagggtttcactacctcgtgtttgaccttgttaccggcggggagctgtttgaagacattgtggccagagagtactacagtgaagcagatgccagccactgtatacatcagattctggagagtgttaaccacatccaccagcatgacatcgtccacagggacctgaagcctgagaacctgctgctggcgagtaaatgcaagggtgccgccgtcaagctggctgattttggcctagccatcgaagtacagggagagcagcaggcttggtttggttttgctggcaccccaggttacttgtcccctgaggtcttgaggaaagatccctatggaaaacctgtggatatctgggcctgcggggtcatcctgtatatcctcctggtgggctatcctcccttctgggatgaggatcagcacaagctgtatcagcagatcaaggctggagcctatgatttcccatcaccagaatgggacacggtaactcctgaagccaagaacttgatcaaccagatgctgaccataaacccagcaaagcgcatcacggctgaccaggctctcaagcacccgtgggtctgtcaacgatccacggtggcatccatgatgcatcgtcaggagactgtggagtgtttgcgcaagttcaatgcccggagaaaactgaagggtgccatcctcacgaccatgcttgtctccaggaacttctcagctgccaaaagcctattgaacaagaagtcggatggcggtgtcaaggagccacaaaccactgtggtacacaacgctacagatgggatcaagggctccacagagagctgcaacaccaccacagaagatgaggacctcaaagtgcgaaaacaggagatcattaagattacagaacagctgattgaagccatcaacaatggggactttgaggcctacacgaagatttgtgatccaggcctcacttcctttgagcctgaggcccttggtaacctcgtggaggggatggatttccataagttttactttgagaatcgtgagtgggttcgtgctgctgatatactcctgcctgcccctttacccctttgtctctgtctcctgctcaccttctcatcccagttgcccacttttcccttatttgaccttcgtgctgcactcctactctgtatgcttgtccccttgtgccccgatggttgtagacaggcacctttgaaggccctgctcctgagctccaagtgccattcattctgcagctgctttgtggcagtgccagtcaccacaatcaagctcacttatttcttgccgggcgcggtggcttacgcctgtaatcccaacactttgggaggctgaggctggcggatcacgaggtcaggagatcgaggccatcctggctaacacggtgaaaccccatctctactaaaaatacaaaaaattagccgggcgtggtggcggtgcctgtagtcccagctactcgggtggctgaggcaggagaatgatgtgaacctgggaggcagagcttgcagtgagccaagatcaggccactgcactccagcctgggcaacagagcaagactccatctcaaaaaaaaagaa

SEQ ID NO: 300022 - DNA, 1946 bp, Homo sapiens
  misc_feature (19)..(19): n is a, c, g, or t
agcgggctgccgggctcanccccgtctcctcctcttgctccctcggccgggcggcggtgactgtgcaccgacgtcggcgcgggctgcaccgccgcgtccgcccgcccgccagcatggccaccaccgccacctgcacccgtttcaccgacgactaccagctcttcgaggagcttggcaagggtgctttctctgtggtccgcaggtgtgtgaagaaaacctccacgcaggagtacgcagcaaaaatcatcaataccaagaagttgtctgcccgggatcaccagaaactagaacgtgaggctcggatatgtcgacttctgaaacatccaaacatcgtgcgcctccatgacagtatttctgaagaagggtttcactacctcgtgtttgaccttgttaccggcggggagctgtttgaagacattgtggccagagagtactacagtgaagcagatgccagccactgtatacatcagattctggagagtgttaaccacatccaccagcatgacatcgtccacagggacctgaagcctgagaacctgctgctggcgagtaaatgcaagggtgccgccgtcaagctggctgattttggcctagccatcgaagtacagggagagcagcaggcttggtttggttttgctggcaccccaggttacttgtcccctgaggtcttgaggaaagatccctatggaaaacctgtggatatctgggcctgcggggtcatcctgtatatcctcctggtgggctatcctcccttctgggatgaggatcagcacaagctgtatcagcagatcaaggctggagcctatgatttcccatcaccagaatgggacacggtaactcctgaagccaagaacttgatcaaccagatgctgaccataaacccagcaaagcgcatcacggctgaccaggctctcaagcacccgtgggtctgtcaacgatccacggtggcatccatgatgcatcgtcaggagactgtggagtgtttgcgcaagttcaatgcccggagaaaactgaagggtgccatcctcacgaccatgcttgtctccaggaacttctcagctgccaaaagcctattgaacaagaagtcggatggcggtgtcaagccacagagcaacaacaaaaacagtctcgtaagcccagcccaagagcccgcgcccttgcagacggccatggagccacaaaccactgtggtacacaacgctacagatgggatcaagggctccacagagagctgcaacaccaccacagaagatgaggacctcaaagctgccccgctccgcactgggaatggcagctcggtgcctgaaggacggagctcccgggacagaacagccccctctgcaggcatgcagccccagccttctctctgctcctcagccatgcgaaaacaggagatcattaagattacagaacagctgattgaagccatcaacaatggggactttgaggcctacacgaagatttgtgatccaggcctcacttcctttgagcctgaggcccttggtaacctcgtggaggggatggatttccataagttttactttgagaatctcctgtccaagaacagcaagcctatccataccaccatcctaaacccacacgtccacgtgattggggaggacgcagcgtgcatcgcctacatccgcctcacccagtacatcgacgggcagggtcggcctcgcaccagccagtcagaagagacccgggtctggcaccgtcgggatggcaagtggctcaatgtccactatcactgctcaggggcccctgccgcaccgctgcagtgagctcagccacagtgtgagggcttgagtcctcttttaccccacagagggtcacctattctccaccatccaaggcgtctcttggtctggtcactgcctctttcttcttgcactcaaatgattacttcactcctgtcacaaatatcagcagcaggggatcctcta

SEQ ID NO: 300023 - DNA, 1625 bp, Homo sapiens
gccgtcccagaggactggcaaagctggcagaatggttgcaataagttatgcttggaaatcagacagactagggtctggctccgtgactccaaattggatgacctcagacaggttacttcccctccctaaactgtttccttagctgtcaaagaaaggcagagagtggtgcctacctcatttaatcattgtgaggattaagtaagatactataagtaaagcacttagttagtgcttagcaaatgggaggcagttttgtatttaagcattagcttcacccactttccccaccttctcaggccgacttggccatgtgtttagcgtgctaaagtcgctggaactcatctgtgtgctcattgtcctctgttctgttaccacattctgtcctgtttgacaggggctttaggagattccagccggaggtccaaccttcgcagccagtggctctggagggcctgagtgacagcggcagtcctggcaaggagagagccaggccctggtcagggctcccgtgccgcctttggcggttctgtttctgtgctgatctggaccatctttgtcttgccttttcacggtagtggtccccatgctgaccctcatctgggcctgggccctctgccaagtgcccctgtgggatgggaggagtgaggcagtgggagaagaggtggtggtcgtttctatgcattcaggctgcctttggggctgcctcccttcttattcttccttgctgcacgtccatctcttttcctgtctttgagattgacctgactgctctggcaagaagaagaggtgtccttacagaggcctctttactgaccaactgaagtatagacttactgctggacaatctgcatgggcatcacccctccccgcatgtaacccaaaagaggtgtccagagccaaggcttctaccttcattgtccctctctgtgctcaaggagttccattccaggaggaagagatctataccctaagcagatagcaaagaagataatggaggagcaattggtcatggccttggtttccctcaaaacaacgctgcagatttatctgcacaaacatctccacttttgggggaaaggtgggtagattccagttccctggactaccttcaggaggcacgagagctgggagaagaggcaaagctacaggtttacttgggagccagctgagaagagagcagactcacaggtgctggtgcttggatttagccaggctcctccgagcacctcatgcatgtcccagcccctgggccctagccctttcctgccctgcagtctgcagtgccagcacgcaaatcccttcaccacagggtttcgttttgctggcttgaagacaaatggtcttagaattcattgagacccatagcttcatatggctgctccagccccacttcttagcattcttactcctcttctggggctaatgtcagcatctatagacaatagactattaaaaaatcaccttttaaacaagaaacggaaggcatttgatgcagaatttttgcatgacaacatagaaataatttaaaaatagtgtttgttctgaatgttggtagacccttcatagctttgttacaatgaaaccttgaactgaaaatatttaataaaataacctttaaacagtca

SEQ ID NO: 300024 - DNA, 1559 bp, Homo sapiens
  misc_feature (19)..(19): n is a, c, g, or t
agcgggctgccgggctcanccccgtctcctcctcttgctccctcggccgggcggcggtgactgtgcaccgacgtcggcgcgggctgcaccgccgcgtccgcccgcccgccagcatggccaccaccgccacctgcacccgtttcaccgacgactaccagctcttcgaggagcttggcaagggtgctttctctgtggtccgcaggtgtgtgaagaaaacctccacgcaggagtacgcagcaaaaatcatcaataccaagaagttgtctgcccgggatcaccagaaactagaacgtgaggctcggatatgtcgacttctgaaacatccaaacatcgtgcgcctccatgacagtatttctgaagaagggtttcactacctcgtgtttgaccttgttaccggcggggagctgtttgaagacattgtggccagagagtactacagtgaagcagatgccagccactgtatacatcagattctggagagtgttaaccacatccaccagcatgacatcgtccacagggacctgaagcctgagaacctgctgctggcgagtaaatgcaagggtgccgccgtcaagctggctgattttggcctagccatcgaagtacagggagagcagcaggcttggtttggttttgctggcaccccaggttacttgtcccctgaggtcttgaggaaagatccctatggaaaacctgtggatatctgggcctgcggggtcatcctgtatatcctcctggtgggctatcctcccttctgggatgaggatcagcacaagctgtatcagcagatcaaggctggagcctatgatttcccatcaccagaatgggacacggtaactcctgaagccaagaacttgatcaaccagatgctgaccataaacccagcaaagcgcatcacggctgaccaggctctcaagcacccgtgggtctgtcaacgatccacggtggcatccatgatgcatcgtcaggagactgtggagtgtttgcgcaagttcaatgcccggagaaaactgaagggtgccatcctcacgaccatgcttgtctccaggaacttctcagctgccaaaagcctattgaacaagaagtcggatggcggtgtcaaggtaagtgtctccagcctctgaacagactggcctctttctccccgcagtcactatgggaattcttggcacctggttccccctttcccagggaatcttcctatccttgctagtctgctttaaaccagatgcctttgtgctcagaacagaaggttctgctggcctgagagggaagtagggaggtatttttcctggccctagctggatgggaatgactcaggggaagtgatccaaatcatagtttataccagagctgaatccggaacctgacttctacacggatgcttcatctccagggcttgactctgggttttttaggtcatttggttatctttctttttttcctttttagagcacaaatccttttaatcaaatgaaagccaaatttgcctgagtgattcaggcagggtatagggcttggaacctgaaaccactctccttttggtctttttccttctc

SEQ ID NO: 300025 - DNA, 1364 bp, Homo sapiens
  misc_feature (19)..(19): n is a, c, g, or t
agcgggctgccgggctcanccccgtctcctcctcttgctccctcggccgggcggcggtgactgtgcaccgacgtcggcgcgggctgcaccgccgcgtccgcccgcccgccagcatggccaccaccgccacctgcacccgtttcaccgacgactaccagctcttcgaggagcttggcaagggtgctttctctgtggtccgcaggtgtgtgaagaaaacctccacgcaggagtacgcagcaaaaatcatcaataccaagaagttgtctgcccgggatcaccagaaactagaacgtgaggctcggatatgtcgacttctgaaacatccaaacatcgtgcgcctccatgacagtatttctgaagaagggtttcactacctcgtgtttgaccttgttaccggcggggagctgtttgaagacattgtggccagagagtactacagtgaagcagatgccagccactgtatacatcagattctggagagtgttaaccacatccaccagcatgacatcgtccacagggacctgaagcctgagaacctgctgctggcgagtaaatgcaagggtgccgccgtcaagctggctgattttggcctagccatcgaagtacagggagagcagcaggcttggtttggttttgctggcaccccaggttacttgtcccctgaggtcttgaggaaagatccctatggaaaacctgtggatatctgggcctgcggggtcatcctgtatatcctcctggtgggctatcctcccttctgggatgaggatcagcacaagctgtatcagcagatcaaggctggagcctatgatttcccatcaccagaatgggacacggtaactcctgaagccaagaacttgatcaaccagatgctgaccataaacccagcaaagcgcatcacggctgaccaggctctcaagcacccgtgggtctgtcaacgatccacggtggcatccatgatgcatcgtcaggagactgtggagtgtttgcgcaagttcaatgcccggagaaaactgaagggtgccatcctcacgaccatgcttgtctccaggaacttctcagtggcaaaagctatgaacaagaagtcggatggcgggtcaagccacagagcaacacaaaacagctcgtaagccagccaagaagccggcctgagagggcagggggcacaacccttgggtgaccaacgccaatggatcagggcccaggaaggcggcccaagaagaggcccaagggcccgcagggaaggccggcgggaaggccggaaaaaccctgggggagcactcttcgcccggaaagagataaaaacgggccaggggggcaaagaggccccgacgctcggggagaaatacaccacccggggcaggcgc

SEQ ID NO: 300026 - DNA, 416 bp, Homo sapiens
acggagctcccgggacagaacagccccctctgcaggcatgcagccccagccttctctctgctcctcagccagtaagtgtgagggaggcacattctggcttccgtctccctggctcgtcctgaagcccctcagggacccccaccacagctgtcagtcccacccacctgcccgtggtagtaagctctgggagcatggcctctgctgggggtggggggtagactggaggtgctgttgagaccaggcaggggcccctgagtctggggcccaaagaaatatgagaagtgtgggtggaaaaacatggcctgggatgaggggagtagaaagcccccaggatgtgcagtgggccttgcctcagcgctgagccaggaagaagggcagagtcggaagtcaggtctgtgggggtgggagtgggatga

SEQ ID NO: 300027 - DNA, 744 bp, Homo sapiens
ataggatcttgctctgttaccaaggttggagtgcactggcacgatcgtggctcactgcagcctcaacctcctgggactcagagatggagtttcaccatgttgcccaggctggttttgaactccagggctcaggcccacctccacctcccaaagtgctgggattataggtatgggccactgtgcccagccctatgaagaatatcttcaaagtatataaaatactgctttttcaaaataggtacaacctcttcatcttcacaacaacgaataatgtagctgggacaagtatcagaatgattctcactgtacagatgaagaaactcagtctgcgtgcatggtatttgcccaaggtcatacaggtcattaagagaaagtgggaatacaatctaggtctctactagtgtgtcattttgtctttatcaaaaataaaaataaatccagatggaattagggtaaaaaaaattcttgtgtccattaatagcagaaatagctttgttattcatttaaatctttataatcacagttatattaatctaaaaacttgtctgctaaccattgtattaatttggtaagagaaattccaaccagaaaagcattctagtcaatatttaaagaaagaacaatattagatacattctagtaaagcaattattttaataaattaagaaagcaaataaaaacctttgtatttaaggtctgtatcacataatttataataatgaattaaaatgacagtaaatatgt

SEQ ID NO: 300028 - DNA, 493 bp, Homo sapiens
ataggatcttgctctgttaccaaggttggagtgcactggcacgatcgtggctcactgcagcctcaacctcctgggactcagagatggagtttcaccatgttgcccaggctggttttgaactccagggctcaggcccacctccacctcccaaagtgctgggattataggtatgggccactgtgcccagccctatgaagaatatcttcaaagtatataaaatactgctttttcaaaataggtacaacctcttcatcttcacaacaacgaataatgtagctgggacaagtatcagaatgattctcactgtacagatgaagaaactcagtctgcgtgcatggtatttgcccaaggtcatacaggtcattaagagaaagtgggaatacaatctaggtctctactagtgtgtcattttgtctttatcaaaaataaaaataaatccagtgccagatgcggccgacccccagctcaccataccaaccagaagaatgacaca

SEQ ID NO: 300029 - DNA, 492 bp, Homo sapiens
ataggatcttgctctgttaccaaggttggagtgcactggcacgatcgtggctcactgcagcctcaacctcctgggactcagagatggagtttcaccatgttgcccaggctggttttgaactccagggctcaggcccacctccacctcccaaagtgctgggattataggtatgggccactgtgcccagccctatgaagaatatcttcaaagtatataaaatactgctttttcaaaataggtacaacctcttcatcttcacaacaacgaataatgtagctgggacaagtatcagaatgattctcactgtacagatgaagaaactcagtctgcgtgcatggtatttgcccaaggtcatacaggtcattaagagaaagtgggaatacaatctaggtctctactagtgtgtcattttgtctttatcaaaaataaaaataaatccagcggcacgcatttctccatgatagcacaaaaagctaacactattctcacaca

SEQ ID NO: 300030 - DNA, 484 bp, Homo sapiens
agatggagtttcaccatgttgcccaggctggttttgaactccagggctcaggcccacctccacctcccaaagtgctgggattataggtatgggccactgtgcccagccctatgaagaatatcttcaaagtatataaaatactgctttttcaaaataggtgagtatgtatataaatttacaagattcgaaaatacttatcatacttgccttttcttgctagaaagtcttaccagtaggaatttaagagacaatctatcctttcccactcagtccaagataaaaagttttagttttaacaaactttcctcccatttcaatcttgggaaatagaagccaaaatttaaattcctgaagaataaatagttctgaaatcaaataactggctcaaaacttaaggtgccctttaaattagaaatacatgttaattctagttttgctatatcatatgctttacataatcagttctaaaatgttaataatgcta

SEQ ID NO: 300031 - DNA, 2759 bp, Homo sapiens
agcggagctctcagagggaattgagcacccggcagcggtctcaggccaagccccctgccagcatggccagcgagttcaagaagaagctcttctggagggcagtggtggccgagttcctggccacgaccctctttgtcttcatcagcatcggttctgccctgggcttcaaatacccggtggggaacaaccagacggcggtccaggacaacgtgaaggtgtcgctggccttcgggctgagcatcgccacgctggcgcagagtgtgggccacatcagcggcgcccacctcaacccggctgtcacactggggctgctgctcagctgccagatcagcatcttccgtgccctcatgtacatcatcgcccagtgcgtgggggccatcgtcgccaccgccatcctctcaggcatcacctcctccctgactgggaactcgcttggccgcaatgacctggctgatggtgtgaactcgggccagggcctgggcatcgagatcatcgggaccctccagctggtgctatgcgtgctggctactaccgaccggaggcgccgtgaccttggtggctcagccccccttgccatcggcctctctgtagcccttggacacctcctggctattgactacactggctgtgggattaaccctgctcggtcctttggctccgcggtgatcacacacaacttcagcaaccactggattttctgggtggggccattcatcgggggagccctggctgtactcatctacgacttcatcctggccccacgcagcagtgacctcacagaccgcgtgaaggtgtggaccagcggccaggtggaggagtatgacctggatgccgacgacatcaactccagggtggagatgaagcccaaatagaaggggtctggcccgggcatccacgtagggggcaggggcaggggcgggcggagggaggggaggggtgaaatccatactgtagacactctgacaagctggccaaagtcacttccccaagatctgccagacctgcatggtcaagcctcttatgggggtgtttctatctctttctttctctttctgtttcctggcctcagagcttcctggggaccaagatttaccaattcacccactcccttgaagttgtggaggaggtgaaagaaagggacccacctgctagtcgcccctcagagcatgatgggaggtgtgccagaaagtcccccctcgccccaaagttgctcaccgactcacctgcgcaagtgcctgggattctaccgtaattgctttgtgcctttgggcacggccctccttcttttcctaacatgcaccttgctcccaatggtgcttggagggggaagagatcccaggaggtgcagtggagggggcaagctttgctccttcagttctgcttgctcccaagcccctgacccgctcggacttactgcctgaccttggaatcgtccctatatcagggcctgagtgacctccttctgcaaagtggcagggaccggcagagctctacaggcctgcagcccctaagtgcaaacacagcatgggtccagaagacgtggtctagaccagggctgctctttccacttgccctgtgttctttccccaggggcatgactgtcgccacacgcctctgtgtacatgtgtgcagagcagacaggctacaaagcagagatcgacagacagccaggtagttggaactttctgttccctatggagaggcttccctacacagggcctgctattgcagaatgaagccatttagagggtgaaggagaaatacccatgttacttctctgagttttagttggtctttccatctatcactgcattatcttgctcattcttcagttctctactccctcttgtcagtgtagacacaggtcaccattatgctggtgtatgtttatcaaagagcacttgagctgtctgaagcccaaagcctgaggacagaaagaccctgatgcaggtcagcccatggaggcagatgcccttgctgggcctgggggttttccaagccctcagctggtcctgaccaggatggagcaagctcttcccttgctcatgagctcctgatcagaggcatttgagcagctgaataacctgcacaggcttgctgtatgacccctggccacagccttccctctgcattgacctggaggggagaggtcagccttgacctaatgaggtagctatagttgcagcccaaggacagttcagagatcaggatcagctttgaaggctggattctatctacataagtcctttcaattccaccagggccagagcagctccaccactgtgcacttagccatgatggcaacagaaaccaagagacacaattacgcaggtatttagaagcagagggacaaccagaaggcccttaactatcaccagtgcatcacatctgcacactctcttctccattccctagcaggaacttctagctcatttaacagataaagaaactgaggcccacggtttcagctagacaatgatttggccaggcctagtaaccaaggccctgtctctggctactccctggaccacgaggctgattcctctcatttccagcttctcagtttctgcctgggcaatggccaggggccaggagtggggagagttgtgatggaggggagaggggtcacacccaccccctgcctggttctaggctgctgcacaccaaggccctgcatctgtctgctctgcatatatgtctctttggagttggaatttcattatatgttaagaaaataaaggaaaatgacttgtaaggtc

SEQ ID NO: 300032 - DNA, 1692 bp, Homo sapiens
agcggagctctcagagggaattgagcacccggcagcggtctcaggccaagccccctgccagcatggccagcgagttcaagaagaagctcttctggagggcagtggtggccgagttcctggccacgaccctctttgtcttcatcagcatcggttctgccctgggcttcaaatacccggtggggaacaaccagacggcggtccaggacaacgtgaaggtgtcgctggccttcgggctgagcatcgccacgctggcgcagagtgtgggccacatcagcggcgcccacctcaacccggctgtcacactggggctgctgctcagctgccagatcagcatcttccgtgccctcatgtacatcatcgcccagtgcgtgggggccatcgtcgccaccgccatcctctcaggcatcacctcctccctgactgggaactcgcttggccgcaatgacctggctgatggtgtgaactcgggccagggcctgggcatcgagatcatcgggaccctccagctggtgctatgcgtgctggctactaccgaccggaggcgccgtgaccttggtggctcagccccccttgccatcggcctctctgtagcccttggacacctcctggctattgactacactggctgtgggattaaccctgctcggtcctttggctccgcggtgatcacacacaacttcagcaaccactggattttctgggtggggccattcatcgggggagccctggctgtactcatctacgacttcatcctggccccacgcagcagtgacctcacagaccgcgtgaaggtgtggaccagcggccaggtggaggagtatgacctggatgccgacgacatcaactccagggtggagatgaagcccaaatagaaggggtctggcccgggcatccacgtagggggcaggggcaggggcgggcggagggaggggaggggtgaaatccatactgtagacactctgacaagctggccaaagtcacttccccaagatctgccagacctgcatggtcaagcctcttatgggggtgtttctatctctttctttctctttctgtttcctggcctcagagcttcctggggaccaagatttaccaattcacccactcccttgaagttgtggaggaggtgaaagaaagggacccacctgctagtcgcccctcagagcatgatgggaggtgtgccagaaagtcccccctcgccccaaagttgctcaccgactcacctgcgcaagtgcctgggattctaccgtaattgctttgtgcctttgggcacggccctccttcttttcctaacatgcaccttgctcccaatggtgcttggagggggaagagatcccaggaggtgcagtggagggggcaagctttgctccttcagttctgcttgctcccaagcccctgacccgctcggacttactgcctgaccttggaatcgtccctatatcagggcctgagtgacctccttctgcaaagtggcagggaccggcagagctctacaggcctgcagcccctaagtgcaaacacagcatgggtccagaagacgtggtctagaccagggctgctctttccacttgccctgtgttctttccccaggggcatgactgtcgccacacgcctctgtgtagcatatatgtctctttggagttggaatttcattatatgttaagaaaataaaggaaaatgacttgtaaggtc

SEQ ID NO: 300033 - DNA, 2184 bp, Homo sapiens
ggtcgactactactactaaattcgcggccgcgtcgaattgactacactggctgtgggattaaccctgctcggtcctttggctccgcggtgatcacacacaacttcagcaaccactggattttctgggtggggccattcatcgggggagccctggctgtactcatctacgacttcatcctggccccacgcagcagtgacctcacagaccgcgtgaaggtgtggaccagcggccaggtggaggagtatgacctggatgccgacgacatcaactccagggtggagatgaagcccaaatagaaggggtctggcccgggcatccacgtagggggcaggggcaggggcgggcggagggaggggaggggtgaaatccatactgtagacactctgacaagctggccaaagtcacttccccaagatctgccagacctgcatggtcaagcctcttatgggggtgtttctatctctttctttctctttctgtttcctggcctcagagcttcctggggaccaagatttaccaattcacccactcccttgaagttgtggaggaggtgaaagaaagggacccacctgctagtcgcccctcagagcatgatgggaggtgtgccagaaagtcccccctcgccccaaagttgctcaccgactcacctgcgcaagtgcctgggattctaccgtaattgctttgtgcctttgggcacggccctccttcttttcctaacatgcaccttgctcccaatggtgcttggagggggaagagatcccaggaggtgcagtggagggggcaagctttgctccttcagttctgcttgctcccaagcccctgacccgctcggacttactgcctgaccttggaatcgtccctatatcagggcctgagtgacctccttctgcaaagtggcagggaccggcagagctctacaggcctgcagcccctaagtgcaaacacagcatgggtccagaagacgtggtctagaccagggctgctctttccacttgccctgtgttctttccccaggggcatgactgtcgccacacgcctctgtgtacatgtgtgcagagcagacaggctacaaagcagagatcgacagacagccaggtagttggaactttctgttccctatggagaggcttccctacacagggcctgctattgcagaatgaagccatttagagggtgaaggagaaatacccatgttacttctctgagttttagttggtctttccatctatcactgcattatcttgctcattcttcagttctctactccctcttgtcagtgtagacacaggtcaccattatgctggtgtatgtttatcaaagagcacttgagctgtctgaagcccaaagcctgaggacagaaagaccctgatgcaggtcagcccatggaggcagatgcccttgctgggcctgggggttttccaagccctcagctggtcctgaccaggatggagcaagctcttcccttgctcatgagctcctgatcagaggcatttgagcagctgaataacctgcacaggcttgctgtatgacccctggccacagccttccctctgcattgacctggaggggagaggtcagccttgacctaatgaggtagctatagttgcagcccaaggacagttcagagatcaggatcagctttgaaggctggattctatctacataagtcctttcaattccaccagggccagagcagctccaccactgtgcacttagccatgatggcaacagaaaccaagagacacaattacgcaggtatttagaagcagagggacaaccagaaggcccttaactatcaccagtgcatcacatctgcacactctcttctccattccctagcaggaacttctagctcatttaacagataaagaaactgaggcccacggtttcagctagacaatgatttggccaggcctagtaaccaaggccctgtctctggctactccctggaccacgaggctgattcctctcatttccagcttctcagtttctgcctgggcaatggccaggggccaggagtggggagagttgtgatggaggggagaggggtcacacccaccccctgcctggttctaggctgctgcacaccaaggccctgcatctgtctgctctgcatatatgtctctttggagttggaatttcattatatgttaagaaaataaaggaaaatgacttgtaaggtc

SEQ ID NO: 300034 - DNA, 1702 bp, Homo sapiens
cccagcaacgcccatttcacctggacgtgccgagggcatgacaaccctctcgtgcagaactttccagtcgactctcaaagggacccacctgctagtcgcccctcagagcatgatgggaggtgtgccagaaagtcccccctcgccccaaagttgctcaccgactcacctgcgcaagtgcctgggattctaccgtaattgctttgtgcctttgggcacggccctccttcttttcctaacatgcaccttgctcccaatggtgcttggagggggaagagatcccaggaggtgcagtggagggggcaagctttgctccttcagttctgcttgctcccaagcccctgacccgctcggacttactgcctgaccttggaatcgtccctatatcagggcctgagtgacctccttctgcaaagtggcagggaccggcagagctctacaggcctgcagcccctaagtgcaaacacagcatgggtccagaagacgtggtctagaccagggctgctctttccacttgccctgtgttctttccccaggggcatgactgtcgccacacgcctctgtgtacatgtgtgcagagcagacaggctacaaagcagagatcgacagacagccaggtagttggaactttctgttccctatggagaggcttccctacacagggcctgctattgcagaatgaagccatttagagggtgaaggagaaatacccatgttacttctctgagttttagttggtctttccatctatcactgcattatcttgctcattcttcagttctctactccctcttgtcagtgtagacacaggtcaccattatgctggtgtatgtttatcaaagagcacttgagctgtctgaagcccaaagcctgaggacagaaagaccctgatgcaggtcagcccatggaggcagatgcccttgctgggcctgggggttttccaagccctcagctggtcctgaccaggatggagcaagctcttcccttgctcatgagctcctgatcagaggcatttgagcagctgaataacctgcacaggcttgctgtatgacccctggccacagccttccctctgcattgacctggaggggagaggtcagccttgacctaatgaggtagctatagttgcagcccaaggacagttcagagatcaggatcagctttgaaggctggattctatctacataagtcctttcaattccaccagggccagagcagctccaccactgtgcacttagccatgatggcaacagaaaccaagagacacaattacgcaggtatttagaagcagagggacaaccagaaggcccttaactatcaccagtgcatcacatctgcacactctcttctccattccctagcaggaacttctagctcatttaacagataaagaaactgaggcccacggtttcagctagacaatgatttggccaggcctagtaaccaaggccctgtctctggctactccctggaccacgaggctgattcctctcatttccagcttctcagtttctgcctgggcaatggccaggggccaggagtggggagagttgtgatggaggggagaggggtcacacccaccccctgcctggttctaggctgctgcacaccaaggccctgcatctgtctgctctgcatatatgtctctttggagttggaatttcattatatgttaagaaaataaaggaaaatgacttgtaaggtc

SEQ ID NO: 300035 - DNA, 1930 bp, Homo sapiens
agcggagctctcagagggaattgagcacccggcagcggtctcaggccaagccccctgccagcatggccagcgagttcaagaagaagctcttctggagggcagtggtggccgagttcctggccacgaccctctttgtcttcatcagcatcggttctgccctgggcttcaaatacccggtggggaacaaccagacggcggtccaggacaacgtgaaggtgtcgctggccttcgggctgagcatcgccacgctggcgcagagtgtgggccacatcagcggcgcccacctcaacccggctgtcacactggggctgctgctcagctgccagatcagcatcttccgtgccctcatgtacatcatcgcccagtgcgtgggggccatcgtcgccaccgccatcctctcaggcatcacctcctccctgactgggaactcgcttggccgcaatgacctggctgatggtgtgaactcgggccagggcctgggcatcgagatcatcgggaccctccagctggtgctatgcgtgctggctactaccgaccggaggcgccgtgaccttggtggctcagccccccttgccatcggcctctctgtagcccttggaatcgtccctatatcagggcctgagtgacctccttctgcaaagtggcagggaccggcagagctctacaggcctgcagcccctaagtgcaaacacagcatgggtccagaagacgtggtctagaccagggctgctctttccacttgccctgtgttctttccccaggggcatgactgtcgccacacgcctctgtgtacatgtgtgcagagcagacaggctacaaagcagagatcgacagacagccaggtagttggaactttctgttccctatggagaggcttccctacacagggcctgctattgcagaatgaagccatttagagggtgaaggagaaatacccatgttacttctctgagttttagttggtctttccatctatcactgcattatcttgctcattcttcagttctctactccctcttgtcagtgtagacacaggtcaccattatgctggtgtatgtttatcaaagagcacttgagctgtctgaagcccaaagcctgaggacagaaagaccctgatgcaggtcagcccatggaggcagatgcccttgctgggcctgggggttttccaagccctcagctggtcctgaccaggatggagcaagctcttcccttgctcatgagctcctgatcagaggcatttgagcagctgaataacctgcacaggcttgctgtatgacccctggccacagccttccctctgcattgacctggaggggagaggtcagccttgacctaatgaggtagctatagttgcagcccaaggacagttcagagatcaggatcagctttgaaggctggattctatctacataagtcctttcaattccaccagggccagagcagctccaccactgtgcacttagccatgatggcaacagaaaccaagagacacaattacgcaggtatttagaagcagagggacaaccagaaggcccttaactatcaccagtgcatcacatctgcacactctcttctccattccctagcaggaacttctagctcatttaacagataaagaaactgaggcccacggtttcagctagacaatgatttggccaggcctagtaaccaaggccctgtctctggctactccctggaccacgaggctgattcctctcatttccagcttctcagtttctgcctgggcaatggccaggggccaggagtggggagagttgtgatggaggggagaggggtcacacccaccccctgcctggttctaggctgctgcacaccaaggccctgcatctgtctgctctgcatatatgtctctttggagttggaatttcattatatgttaagaaaataaaggaaaatgacttgtaaggtc

SEQ ID NO: 300036 - DNA, 2872 bp, Homo sapiens
agcggagctctcagagggaattgagcacccggcagcggtctcaggccaagccccctgccagcatggccagcgagttcaagaagaagctcttctggagggcagtggtggccgagttcctggccacgaccctctttgtcttcatcagcatcggttctgccctgggcttcaaatacccggtggggaacaaccagacggcggtccaggacaacgtgaaggtgtcgctggccttcgggctgagcatcgccacgctggcgcagagtgtgggccacatcagcggcgcccacctcaacccggctgtcacactggggctgctgctcagctgccagatcagcatcttccgtgccctcatgtacatcatcgcccagtgcgtgggggccatcgtcgccaccgccatcctctcaggcatcacctcctccctgactgggaactcgcttggccgcaatgacctggctgatggtgtgaactcgggccagggcctgggcatcgagatcatcgggaccctccagctggtgctatgcgtgctggctactaccgaccggaggcgccgtgaccttggtggctcagccccccttgccatcggcctctctgtagcccttggacacctcctggctattgactacactggctgtgggattaaccctgctcggtcctttggctccgcggtgatcacacacaacttcagcaaccactggattttctgggtggggccattcatcgggggagccctggctgtactcatctacgacttcatcctggccccacgcagcagtgacctcacagaccgcgtgaaggtgtggaccagcggccaggtggaggagtatgacctggatgccgacgacatcaactccagggtggagatgaagcccaaatagaaggggtctggcccgggcatccacgtagggggcaggggcaggggcgggcggagggaggggaggggtgaaatccatactgtagacactctgacaagctggccaaagtcacttccccaagatctgccagacctgcatggtcaagcctcttatgggggtgtttctatctctttctttctctttctgtttcctggcctcagagcttcctggggaccaagatttaccaattcacccactcccttgaagttgtggaggaggtgaaagaaagggacccacctgctagtcgcccctcagagcatgatgggaggtgtgccagaaagtcccccctcgccccaaagttgctcaccgactcacctgcgcaagtgcctgggattctaccgtaattgctttgtgcctttgggcacggccctccttcttttcctaacatgcaccttgctcccaatggtgcttggagggggaagagatcccaggaggtgcagtggagggggcaagctttgctccttcagttctgcttgctcccaagcccctgacccgctcggacttactgcctgaccttggaatcgtccctatatcagggcctgagtgacctccttctgcaaagtggcagggaccggcagagctctacaggcctgcagcccctaagtgcaaacacagcatgggtccagaagacgtggtctagaccagggctgctctttccacttgccctgtgttctttccccaggggcatgactgtcgccacacgcctctgtgtacatgtgtgcagagcagacaggctacaaagcagagatcgacagacagccaggtagttggaactttctgttccctatggagaggcttccctacacagggcctgctattgcagaatgaagccatttagagggtgaaggagaaatacccatgttacttctctgagttttagttggtctttccatctatcactgcattatcttgctcattcttcagttctctactccctcttgtcagtgtagacacaggtcaccattatgctggtgtatgtttatcaaagagcacttgagctgtctgaagcccaaagcctgaggacagaaagaccctgatgcaggtcagcccatggaggcagatgcccttgctgggcctgggggttttccaagccctcagctggtcctgaccaggatggagcaagctcttcccttgctcatgagctcctgatcagaggcatttgagcagctgaataacctgcacaggcttgctgtatgacccctggccacagccttccctctgcattgacctggaggggagaggtcagccttgacctaatgaggtagctatagttgcagcccaaggacagttcagagatcaggatcagctttgaaggctggattctatctacataagtcctttcaattccaccagggccagagcagctccaccactgtgcacttagccatgatggcaacagaaaccaagagacacaattacgcaggtatttagaagcagagggacaaccagaaggcccttaactatcaccagtgcatcacatctgcacactctcttctccattccctagcaggaacttctagctcatttaacagataaagaaactgaggcccacggtttcagctagacaatgatttggccaggcctagtaaccaaggccctgtctctggctactccctggaccacgaggctgattcctctcatttccagcttctcagtttctgcctgggcaatggccaggggccaggagtggggagagttgtgatggaggggagaggggtcacacccaccccctgcctggttctaggctgctgcacaccaaggccctgcatctgtctgctctgcatatatgtctctttggagttggaatttcattatatgttaagaaaataaaggaaaatgacttgtaaggtcaaaaaaaaaaaaaaaaaaaaaaaaaaaaaaaaacaaaaacaaaacacaaaaaaaagacaggggggcggcgcgcgcgccaaagatattatcctccccgcgcgggggcgccccac

SEQ ID NO: 300037 - DNA, 2751 bp, Homo sapiens
agcggagctctcagagggaattgagcacccggcagcggtctcaggccaagccccctgccagcatggccagcgagttcaagaagaagctcttctggagggcagtggtggccgagttcctggccacgaccctctttgtcttcatcagcatcggttctgccctgggcttcaaatacccggtggggaacaaccagacggcggtccaggacaacgtgaaggtgtcgctggccttcgggctgagcatcgccacgctggcgcagagtgtgggccacatcagcggcgcccacctcaacccggctgtcacactggggctgctgctcagctgccagatcagcatcttccgtgccctcatgtacatcatcgcccagtgcgtgggggccatcgtcgccaccgccatcctctcaggcatcacctcctccctgactgggaactcgcttggccgcaatgacctggctgatggtgtgaactcgggccagggcctgggcatcgagatcatcgggaccctccagctggtgctatgcgtgctggctactaccgaccggaggcgccgtgaccttggtggctcagccccccttgccatcggcctctctgtagcccttggacacctcctggctattgactacactggctgtgggattaaccctgctcggtcctttggctccgcggtgatcacacacaacttcagcaaccactggattttctgggtggggccattcatcgggggagccctggctgtactcatctacgacttcatcctggccccacgcagcagtgacctcacagaccgcgtgaaggtgtggaccagcggccaggtggaggagtatgacctggatgccgacgacatcaactccagggtggagatgaagcccaaatagaaggggtctggcccgggcatccacgtagggggcaggggcaggggcgggcggagggaggggaggggtgaaatccatactgtagacactctgacaagctggccaaagtcacttccccaagatctgccagacctgcatggtcaagcctcttatgggggtgtttctatctctttctttctctttctgtttcctggcctcagagcttcctggggaccaagatttaccaattcacccactcccttgaagttgtggaggaggtgaaagaaagggacccacctgctagtcgcccctcagagcatgatgggaggtgtgccagaaagtcccccctcgccccaaagttgctcaccgactcacctgcgcaagtgcctgggattctaccgtaattgctttgtgcctttgggcacggccctccttcttttcctaacatgcaccttgctcccaatggtgcttggagggggaagagatcccaggaggtgcagtggagggggcaagctttgctccttcagttctgcttgctcccaagcccctgacccgctcggacttactgcctgaccttggaatcgtccctatatcagggcctgagtgacctccttctgcaaagtggcagggaccggcagagctctacaggcctgcagcccctaagtgcaaacacagcatgggtccagaagacgtggtctagaccagggctgctctttccacttgccctgtgttctttccccaggggcatgactgtcgccacacgcctctgtgtacatgtgtgcagagcagacaggctacaaagcagagatcgacagacagccaggtagttggaactttctgttccctatggagaggcttccctacacagggcctgctattgcagaatgaagccatttagagggtgaaggagaaatacccatgttacttctctgagttttagttggtctttccatctatcactgcattatcttgctcattcttcagttctctactccctcttgtcagtgtagacacaggtcaccattatgctggtgtatgtttatcaaagagcacttgagctgtctgaagcccaaagcctgaggacagaaagaccctgatgcaggtcagcccatggaggcagatgcccttgctgggcctgggggttttccaagccctcagctggtcctgaccaggatggagcaagctcttcccttgctcatgagctcctgatcagaggcatttgagcagctgaataacctgcacaggcttgctgtatgacccctggccacagccttccctctgcattgacctggaggggagaggtcagccttgacctaatgaggtagctatagttgcagcccaaggacagttcagagatcaggatcagctttgaaggctggattctatctacataagtcctttcaattccaccagggccagagcagctccaccactgtgcacttagccatgatggcaacagaaaccaagagacacaattacgcaggtatttagaagcagagggacaaccagaaggcccttaactatcaccagtgcatcacatctgcacactctcttctccattccctagcaggaacttctagctcatttaacagataaagaaactgaggcccacggtttcagctagacaatgatttggccaggcctagtaaccaaggccctgtctctggctactccctggaccacgaggctgattcctctcatttccagcttctcagtttctgcctgggcaatggccaggggccaggagtggggagagttgtgatggaggggagagggaggccggacacctaattattagcatcatccctctactattttttaaccaaatcaccaccacctatttagctgttcccaaccttttcctccgacccctaacaaccccactcctaatactacctccctg

SEQ ID NO: 300038 - DNA, 1226 bp, Homo sapiens
  misc_feature (4)..(4): n is a, c, g, or t
  misc_feature (74)..(74): n is a, c, g, or t
aganggatccgccaaccgggctgtccacgcagggcgcagagcagctccgaccactgtgcacttagccattgatnggcaacagaaaccacatgtgtgcagagcagacaggctacaaagcagagatcgacagacagccaggtagttggaactttctgttccctatggagaggcttccctacacagggcctgctattgcagaatgaagccatttagagggtgaaggagaaatacccatgttacttctctgagttttagttggtctttccatctatcactgcattatcttgctcattcttcagttctctactccctcttgtcagtgtagacacaggtcaccattatgctggtgtatgtttatcaaagagcacttgagctgtctgaagcccaaagcctgaggacagaaagaccctgatgcaggtcagcccatggaggcagatgcccttgctgggcctgggggttttccaagccctcagctggtcctgaccaggatggagcaagctcttcccttgctcatgagctcctgatcagaggcatttgagcagctgaataacctgcacaggcttgctgtatgacccctggccacagccttccctctgcattgacctggaggggagaggtcagccttgacctaatgaggtagctatagttgcagcccaaggacagttcagagatcaggatcagctttgaaggctggattctatctacataagtcctttcaattccaccagggccagagcagctccaccactgtgcacttagccatgatggcaacagaaaccaagagacacaattacgcaggtatttagaagcagagggacaaccagaaggcccttaactatcaccagtgcatcacatctgcacactctcttctccattccctagcaggaacttctagctcatttaacagataaagaaactgaggcccacggtttcagctagacaatgatttggccaggcctagtaaccaaggccctgtctctggctactccctggaccacgaggctgattcctctcatttccagcttctcagtttctgcctgggcaatggccaggggccaggagtggggagagttgtgatggaggggagaggggtcacacccaccccctgcctggttctaggctgctgcacaccaaggccctgcatctgtctgctctgcatatatgtctctttggagttggaatttcattatatgttaagaaaataaaggaaaatgacttgtaaggtc

SEQ ID NO: 300039 - DNA, 2396 bp, Homo sapiens
agcggagctctcagagggaattgagcacccggcagcggtctcaggccaagccccctgccagcatggccagcgagttcaagaagaagctcttctggagggcagtggtggccgagttcctggccacgaccctctttgtcttcatcagcatcggttctgccctgggcttcaaatacccggtggggaacaaccagacggcggtccaggacaacgtgaaggtgtcgctggccttcgggctgagcatcgccacgctggcgcagagtgtgggccacatcagcggcgcccacctcaacccggctgtcacactggggctgctgctcagctgccagatcagcatcttccgtgccctcatgtacatcatcgcccagtgcgtgggggccatcgtcgccaccgccatcctctcaggcatcacctcctccctgactgggaactcgcttggccgcaatgacctggctgatggtgtgaactcgggccagggcctgggcatcgagatcatcgggaccctccagctggtgctatgcgtgctggctactaccgaccggaggcgccgtgaccttggtggctcagccccccttgccatcggcctctctgtagcccttggacacctcctggctattgactacactggctgtgggattaaccctgctcggtcctttggctccgcggtgatcacacacaacttcagcaaccactggattttctgggtggggccattcatcgggggagccctggctgtactcatctacgacttcatcctggccccacgcagcagtgacctcacagaccgcgtgaaggtgtggaccagcggccaggtggaggagtatgacctggatgccgacgacatcaactccagggtggagatgaagcccaaatagaaggggtctggcccgggcatccacgtagggggcaggggcaggggcgggcggagggaggggaggggtgaaatccatactgtagacactctgacaagctggccaaagtcacttccccaagatctgccagacctgcatggtcaagcctcttatgggggtgtttctatctctttctttctctttctgtttcctggcctcagagcttcctggggaccaagatttaccaattcacccactcccttgaagttgtggaggaggtgaaagaaagggacccacctgctagtcgcccctcagagcatgatgggaggtgtgccagaaagtcccccctcgccccaaagttgctcaccgactcacctgcgcaagtgcctgggattctaccgtaattgctttgtgcctttgggcacggccctccttcttttcctaacatgcaccttgctcccaatggtgcttggagggggaagagatcccaggaggtgcagtggagggggcaagctttgctccttcagttctgcttgctcccaagcccctgacccgctcggacttactgcctgaccttggaatcgtccctatatcagggcctgagtgacctccttctgcaaagtggcagggaccggcagagctctacaggcctgcagcccctaagtgcaaacacagcatgggtccagaagacgtggtctagaccagggctgctctttccacttgccctgtgttctttccccaggggcatgactgtcgccacacgcctctgtgtacatgtgtgcagagcagacaggctacaaagcagagatcgacagacagccaggtagttggaactttctgttccctatggagaggcttccctacacagggcctgctattgcagaatgaagccatttagagggtgaaggagaaatacccatgttacttctctgagttttagttggtctttccatctatcactgcattatcttgctcattcttcagttctctactccctcttgtcagtgtagacacaggtcaccattatgctggtgtatgtttatcaaagagcacttgagctgtctgaagcccaaagcctgaggacagaaagaccctgatgcaggtcagcccatggaggcagatgcccttgctgggcctgggggttttccaagccctcagctggtcctgaccaggatggagcaagctcttcccttgctcatgagctcctgatcagaggcatttgagcagctgaataacctgcacaggcttgctgtatgacccctggccacagccttccctctgcattgacctggaggggagaggtcagccttgacctaatgaggtagctatagttgcagcccaaggacagttcagagatcaggatcagctttgaaggctggattctatctacataagtcctttcaattccaccagggccagagcagctccaccactgtgcacttagccatgatggcaacagaaaccaagagacacaattacgcaggtatttagtggaccgtgcagagctctacagtgcctgcagccccttaagtgcaaacgtgtgcatgg

SEQ ID NO: 300040 - DNA, 812 bp, Homo sapiens
ggtcgactactactactaaattcgcggccgcgtcgactgggggttttccaagccctcagctggtcctgaccaggatggagcaagctcttcccttgctcatgagctcctgatcagaggcatttgagcagctgaataacctgcacaggcttgctgtatgacccctggccacagccttccctctgcattgacctggaggggagaggtcagccttgacctaatgaggtagctatagttgcagcccaaggacagttcagagatcaggatcagctttgaaggctggattctatctacataagtcctttcaattccaccagggccagagcagctccaccactgtgcacttagccatgatggcaacagaaaccaagagacacaattacgcaggtatttagaagcagagggacaaccagaaggcccttaactatcaccagtgcatcacatctgcacactctcttctccattccctagcaggaacttctagctcatttaacagataaagaaactgaggcccacggtttcagctagacaatgatttggccaggcctagtaaccaaggccctgtctctggctactccctggaccacgaggctgattcctctcatttccagcttctcagtttctgcctgggcaatggccaggggccaggagtggggagagttgtgatggaggggagaggggtcacacccaccccctgcctggttctaggctgctgcacaccaaggccctgcatctgtctgctctgcatatatgtctctttggagttggaatttcattatatgttaagaaaataaaggaaaatgacttgtaaggtc

SEQ ID NO: 300041 - DNA, 830 bp, Homo sapiens
ctcttcatgagcagtgtcccccacctgtaggtcatgttggcacagccacgcttccacagttccagaatcaccgtggaccagatgaggttgaatgaggcaaagatcacgtacttgtcatagtcttcccacacaaacaagtagtaaggtaacccaatgacagccatggtgccatttactccctggccacagccttccctctgcattgacctggaggggagaggtcagccttgacctaatgaggtagctatagttgcagcccaaggacagttcagagatcaggatcagctttgaaggctggattctatctacataagtcctttcaattccaccagggccagagcagctccaccactgtgcacttagccatgatggcaacagaaaccaagagacacaattacgcaggtatttagaagcagagggacaaccagaaggcccttaactatcaccagtgcatcacatctgcacactctcttctccattccctagcaggaacttctagctcatttaacagataaagaaactgaggcccacggtttcagctagacaatgatttggccaggcctagtaaccaaggccctgtctctggctactccctggaccacgaggctgattcctctcatttccagcttctcagtttctgcctgggcaatggccaggggccaggagtggggagagttgtgatggaggggagaggggtcacacccaccccctgcctggttctaggctgctgcacaccaaggccctgcatctgtctgctctgcatatatgtctctttggagttggaatttcattatatgttaagaaaataaaggaaaatgacttgtaaggtc

SEQ ID NO: 300042 - DNA, 1901 bp, Homo sapiens
  misc_feature (1884)..(1884): n is a, c, g, or t
  misc_feature (1890)..(1890): n is a, c, g, or t
agcggagctctcagagggaattgagcacccggcagcggtctcaggccaagccccctgccagcatggccagcgagttcaagaagaagctcttctggagggcagtggtggccgagttcctggccacgaccctctttgtcttcatcagcatcggttctgccctgggcttcaaatacccggtggggaacaaccagacggcggtccaggacaacgtgaaggtgtcgctggccttcgggctgagcatcgccacgctggcgcagagtgtgggccacatcagcggcgcccacctcaacccggctgtcacactggggctgctgctcagctgccagatcagcatcttccgtgccctcatgtacatcatcgcccagtgcgtgggggccatcgtcgccaccgccatcctctcaggcatcacctcctccctgactgggaactcgcttggccgcaatgacctggctgatggtgtgaactcgggccagggcctgggcatcgagatcatcgggaccctccagctggtgctatgcgtgctggctactaccgaccggaggcgccgtgaccttggtggctcagccccccttgccatcggcctctctgtagcccttggacacctcctggctattgactacactggctgtgggattaaccctgctcggtcctttggctccgcggtgatcacacacaacttcagcaaccactggattttctgggtggggccattcatcgggggagccctggctgtactcatctacgacttcatcctggccccacgcagcagtgacctcacagaccgcgtgaaggtgtggaccagcggccaggtggaggagtatgacctggatgccgacgacatcaactccagggtggagatgaagcccaaatagaaggggtctggcccgggcatccacgtagggggcaggggcaggggcgggcggagggaggggaggggtgaaatccatactgtagacactctgacaagctggccaaagtcacttccccaagatctgccagacctgcatggtcaagcctcttatgggggtgtttctatctctttctttctctttctgtttcctggcctcagagcttcctggggaccaagatttaccaattcacccactcccttgaagttgtggaggaggtgaaagaaagggacccacctgctagtcgcccctcagagcatgatgggaggtgtgccagaaagtcccccctcgccccaaagttgctcaccgactcacctgcgcaagtgcctgggattctaccgtaattgctttgtgcctttgggcacggccctccttcttttcctaacatgcaccttgctcccaatggtgcttggagggggaagagatcccaggaggtgcagtggagggggcaagctttgctccttcagttctgcttgctcccaagcccctgacccgctcggacttactgcctgaccttggaatcgtccctatatcagggcctgagtgacctccttctgcaaagtggcagggaccggcagagctctacaggcctgcagcccctaagtgcaaacacagcatgggtccagaagacgtggtctagaccagggctgctctttccacttgccctgtgttctttccccaggggcatgactgtcgccacacgcctctgtgtacatgtgtgcagagcagacaggctacaaagcagagatcgacagacagccaggtagttggaactttctgttccctatggagaggcttccctacacagggcctgctattgcagaatgaagccatttagagggtgaaggagaaatacccatgttacttctctgagttttagttggtctttccatctatcactgcattatcttgctcattcttcagttctctactccctcttgtcagtgtagacacaggtcaccattatgctgggacngaagtnctgtaccggct

SEQ ID NO: 300043 - DNA, 385 bp, Homo sapiens
tttgtgctccaggaaaaagcactgtgtattgtaagaaattagatgaattttcaaactcacatagcgtttgaaaaacgagatagaaatctcgttttaggctgggcgcggtggctcacgcctgtaattccagcagtttgggaggccgaggcgagtggatcctgggtggtcaggagttcaagatcagcctgaccaacatggtgaaaccccatctctactaaaaatacaaaaattagccgaacatggcgcacgcttgtgatcccagctactcaggaggctgagtcaggagaaccgctggaacccgggcggtggaggttgcagtgagccaagattgtgccactgcactccagcctgggggacagagcaagactgcatctcaaaaaaagaa

SEQ ID NO: 300044 - DNA, 1765 bp, Homo sapiens
agcaccgtgcgcctcccgcctacggagaactacatgccccagcctgccccgcgaagggaagaagtcaggaggccccgcttcgcgctaacgcttgcgatggttgaattcccctcctcacgccagcctaggagaagaagttcgtagtcccagaggtgaggcaggaggcggcagtttctggcgggtgagggcggagctgaagtgacagcggaggcggaagcaacggtcggtggggcggagaagggggctggccccaggaggaggaggaaacccttccgagaaaacagcaacaagctgagctgctgtgacagaggggaacaagatggcggcgccgaaggggagcctctgggtgaggacccaactggggctcccgccgctgctgctgctgaccatggccttggccggaggttcggggaccgcttcggctgaagcatttgactcggtcttgggtgatacggcgtcttgccaccgggcctgtcagttgacctaccccttgcacacctaccctaaggaagaggagttgtacgcatgtcagagaggttgcaggctgttttcaatttgtcagtttgtggatgatggaattgacttaaatcgaactaaattggaatgtgaatctgcatgtacagaagcatattcccaatctgatgagcaatatgcttgccatcttggttgccagaatcagctgccattcgctgaactgagacaagaacaacttatgtccctgatgccaaaaatgcacctactctttcctctaactctggtgaggtcattctggagtgacatgatggactccgcacagagcttcataacctcttcatggactttttatcttcaagccgatgacggaaaaatagttatattccagtctaagccagaaatccagtacgcaccacatttggagcaggagcctacaaatttgagagaatcatctctaagcaaaatgtcctatctgcaaatgagaaattcacaagcgcacaggaattttcttgaagatggagaaagtgatggctttttaagatgcctctctcttaactctgggtggattttaactacaactcttgtcctctcggtgatggtattgctttggatttgttgtgcaactgttgctacagctgtggagcagtatgttccctctgagaagctgagtatctatggtgacttggagtttatgaatgaacaaaagctaaacagatatccagcttcttctcttgtggttgttagatctaaaactgaagatcatgaagaagcagggcctctacctacaaaagtgaatcttgctcattctgaaatttaagcatttttcttttaaaagacaagtgtaatagacatctaaaattccactcctcatagagcttttaaaatggtttcattggatataggccttaagaaatcactataaaatgcaaataaagttactcaaatctgtgaagactgtatttgctataactttattggtattgtttttgtagtaatttaagaggtggatgtttgggattgtattattattttactaatatctgtagctattttgttttttgctttggttattgtttttttcccttttcttagctatgagctgatcattgctccttctcacctcctgccatgatactgtcagttaccttagttaacaagctgaatatttagtagaaatgatgcttctgctcaggaatggcccacaaatctgtaatttgaaatttagcaggaaatgacctttaatgacactacattttcaggaactgaaatcattaaaattttatttgaataa

SEQ ID NO: 300045 - DNA, 776 bp, Homo sapiens
  misc_feature (46)..(46): n is a, c, g, or t
gttgctacagctgggacagggttgaaaaattttggggttgttttancccccccccctttctccctttggtaaaggaaaagctgagtatctatggtgacttggagtttatgaatgaacaaaagctaaacagatatccagcttcttctcttgtggttgttagatctaaaactgaagatcatgaagaagcagggcctctacctacaaaagtgaatcttgctcattctgaaatttaagcatttttcttttaaaagacaagtgtaatagacatctaaaattccactcctcatagagcttttaaaatggtttcattggatataggccttaagaaatcactataaaatgcaaataaagttactcaaatctgtgaagactgtatttgctataactttattggtattgtttttgtagtaatttaagaggtggatgtttgggattgtattattattttactaatatctgtagctattttgttttttgctttggttattgtttttttcccttttcttagctatgagctgatcattgctccttctcacctcctgccatgatactgtcagttaccttagttaacaagctgaatatttagtagaaatgatgcttctgctcaggaatggcccacaaatctgtaatttgaaatttagcaggaaatgacctttaatgacactacattttcaggaactgaaatcattaaaattttatttgaataattatgtgctgaaatttgagtatctgatttttctagaccttccctcctattcctgcccaacctagataag

SEQ ID NO: 300046 - DNA, 480 bp, Homo sapiens
ctaagtacataaggttgactaattaagaatttcctgtttcttataaaattttaatataactaattgttgattttttttttccagtaactctgggtggattttaactacaactcttgtcctctcggtgatggtattgctttggatttgttgtgcaactgttgctacagctgtggagcagtatgttccctctgagaagctgagtatctatggtgacttggagtttatgaatgaacaaaagctaaacagatatccagcttcttctcttgtggttgttagatctaaaactgaagatcatgaagaagcagggcctctacctacaaaagtgaatcttgctcattctgaaatttaagcatttttcttttaaaagacaagtgtaatagacatctaaaattccactcctcatagagcttttaaaatggtttcattggatataggccttaagaaatcactataaaatgcaaataaagttactcaaatctg

SEQ ID NO: 300047 - DNA, 364 bp, Homo sapiens
  misc_feature (46)..(46): n is a, c, g, or t
gttgctacagctgggacagggttgaaaaattttggggttgttttancccccccccctttctccctttggtaaaggaaaagctgagtatctatggtgacttggagtttatgaatgaacaaaagctaaacagatatccagcttcttctcttgtggttgttagatctaaaactgaagatcatgaagaagcagggcctctacctacaaaagtgaatcttgctcattctgaaatttaagcatttttcttttaaaagacaagtgtaatagacatctaaaattccactcctcatagagcttttaaaatggtttcattggatataggccttaagaaatcactataaaatgcaaataaagttactcaaatctg

SEQ ID NO: 300048 - DNA, 405 bp, Homo sapiens
attctacaccctagtaggctcccttcccctactaaaaaaaaaaaaaaaaaaaaaaaaaaaaaaaaaaaaaaaaaaaaaaaactcgagactagttctctctctctctctcctcgggccgaattcggcacgatggcggcgccgaaggggagcctctgggtgaggacccaactggggctcccgccgctgctgctgctgaccatggccttggccggaggttcggggaccgcttcggctgaagcatttgactcggtcttgggtgatacggcgtcttgccaccgggcctgtcagttgacctaccccttgcacacctaccctaagaacaggagacggccgcatgtaatataggttaaaaattgcaaaaatttggataggcaaaccatatcttaaagccgatggccaaacttt

SEQ ID NO: 300049 - DNA, 364 bp, Homo sapiens
tccagtgaagatattatcctcattttacatatgaaaaaaccaaggctcagaggaattatttcagagttctttttctccatcccaactcccattggacagttgccattgccttaactcagataatcatttcttgtctgtatttttaaattaacttccaaactgtttttctaatttaaccctgtctaactccatcctttgctgtgtccagatttttttttctaaatttcatcatgccattctcctgtcttatataatcagtagctcccaattacatataggatttaagtccaaactgtttatcacaacctactcctgattactgctccaatgccatctctttaaaatttcctgacaagggaatttc

SEQ ID NO: 300050 - DNA, 1834 bp, Homo sapiens
agcaccgtgcgcctcccgcctacggagaactacatgccccagcctgccccgcgaagggaagaagtcaggaggccccgcttcgcgctaacgcttgcgatggttgaattcccctcctcacgccagcctaggagaagaagttcgtagtcccagaggtgaggcaggaggcggcagtttctggcgggtgagggcggagctgaagtgacagcggaggcggaagcaacggtcggtggggcggagaagggggctggccccaggaggaggaggaaacccttccgagaaaacagcaacaagctgagctgctgtgacagaggggaacaagatggcggcgccgaaggggagcctctgggtgaggacccaactggggctcccgccgctgctgctgctgaccatggccttggccggaggttcggggaccgcttcggctgaagcatttgactcggtcttgggtgatacggcgtcttgccaccgggcctgtcagttgacctaccccttgcacacctaccctaaggaagaggagttgtacgcatgtcagagaggttgcaggctgttttcaatttgtcagtttgtggatgatggaattgacttaaatcgaactaaattggaatgtgaatctgcatgtacagaagcatattcccaatctgatgagcaatatgcttgccatcttggttgccagaatcagctgccattcgctgaactgagacaagaacaacttatgtccctgatgccaaaaatgcacctactctttcctctaactctggtgaggtcattctggagtgacatgatggactccgcacagagcttcataacctcttcatggactttttatcttcaagccgatgacggaaaaatagttatattccagtctaagccagaaatccagtacgcaccacatttggagcaggagcctacaaatttgagagaatcatctctaagcaaaatgtcctatctgcaaatgagaaattcacaagcgcacaggaattttcttgaagatggagaaagtgatggctttttaagatgcctctctcttaactctgggtggattttaactacaactcttgtcctctcggtgatggtattgctttggatttgttgtgcaactgttgctacagctgtggagcagtatgttccctctgagaagctgagtatctatggtgacttggagtttatgaatgaacaaaagctaaacagatatccagcttcttctcttgtggttgttagatctaaaactgaagatcatgaagaagcagggcctctacctacaaaagtgaatcttgctcattctgaaatttaagcatttttcttttaaaagacaagtgtaatagacatctaaaattccactcctcatagagcttttaaaatggtttcattggatataggccttaagaaatcactataaaatgcaaataaagttactcaaatctgtgaagactgtatttgctataactttattggtattgtttttgtagtaatttaagaggtggatgtttgggattgtattattattttactaatatctgtagctattttgttttttgctttggttattgtttttttcccttttcttagctatgagctgatcattgctccttctcacctcctgccatgatactgtcagttaccttagttaacaagctgaatatttagtagaaatgatgcttctgctcaggaatggcccacaaatctgtaatttgaaatttagcaggaaatgacctttaatgacactacattttcaggaactgaaatcattaaaattttatttgaataattatgtgctgaaatttgagtatctgatttttctagaccttccctcctattcctgcccaacctagataag

SEQ ID NO: 300051 - DNA, 2371 bp, Homo sapiens
agcaccgtgcgcctcccgcctacggagaactacatgccccagcctgccccgcgaagggaagaagtcaggaggccccgcttcgcgctaacgcttgcgatggttgaattcccctcctcacgccagcctaggagaagaagttcgtagtcccagaggtgaggcaggaggcggcagtttctggcgggtgagggcggagctgaagtgacagcggaggcggaagcaacggtcggtggggcggagaagggggctggccccaggaggaggaggaaacccttccgagaaaacagcaacaagctgagctgctgtgacagaggggaacaagatggcggcgccgaaggggagcctctgggtgaggacccaactggggctcccgccgctgctgctgctgaccatggccttggccggaggttcggggaccgcttcggctgaagcatttgactcggtcttgggtgatacggcgtcttgccaccgggcctgtcagttgacctaccccttgcacacctaccctaaggaagaggagttgtacgcatgtcagagaggttgcaggctgttttcaatttgtcagtttgtggatgatggaattgacttaaatcgaactaaattggaatgtgaatctgcatgtacagaagcatattcccaatctgatgagcaatatgcttgccatcttggttgccagaatcagctgccattcgctgaactgagacaagaacaacttatgtccctgatgccaaaaatgcacctactctttcctctaactctggtgaggtcattctggagtgacatgatggactccgcacagagcttcataacctcttcatggactttttatcttcaagccgatgacggaaaaatagttatattccagtctaagccagaaatccagtacgcaccacatttggagcaggagcctacaaatttgagagaatcatctctaagcaaaatgtcctatctgcaaatgagaaattcacaagcgcacaggaattttcttgaagatggagaaagtgatggctttttaagatgcctctctcttaactctgggtggattttaactacaactcttgtcctctcggtgatggtattgctttggatttgttgtgcaactgttgctacagctgtggagcagtatgttccctctgagaagctgagtatctatggtgacttggagtttatgaatgaacaaaagctaaacagatatccagcttcttctcttgtggttgttagatctaaaactgaagatcatgaagaagcagggcctctacctacaaaagtgaatcttgctcattctgaaatttaagcatttttcttttaaaagacaagtgtaatagacatctaaaattccactcctcatagagcttttaaaatggtttcattggatataggccttaagaaatcactataaaatgcaaataaagttactcaaatctgtgaagactgtatttgctataactttattggtattgtttttgtagtaatttaagaggtggatgtttgggattgtattattattttactaatatctgtagctattttgttttttgctttggttattgtttttttcccttttcttagctatgagctgatcattgctccttctcacctcctgccatgatactgtcagttaccttagttaacaagctgaatatttagtagaaatgatgcttctgctcaggaatggcccacaaatctgtaatttgaaatttagcaggaaatgacctttaatgacactacattttcaggaactgaaatcattaaaattttatttgaataaaaaaacaacacacaccaacaaccaacaacacaacaaatcacaacaccaaaccacaacacacaacacaaccacaacccaaacaccacaccgactcaacgcaaaaaaacaaaaacaaaaaaggggggccacatatatacaaaatctcgacagagggagcacatattatgaccaccagtttttgttaaaaagaggcccaataattatgaaatttatataaaaaaaccagaacagcggattatacacacagcgctggaagaaacacattatatggactctcttgtggaagacccccaatacgaggggcgacacacagcggaaaaccaccacaaataattagagccgggagataaaacaaggaggaatgtgttgaaaccgcaattttgccgcgaaaagtgctccggattttttattaatagacgggggccgtggttcattaacacactacgtcgttaccgctatcgctgcgcgatcgggtgctgatgccgtctcgcctctcgggatgtgagtacaaccccagacacaacacgagtagtatgtagacttgtaccgaacaacgagagcagctcactgaacaacacagagagaggacgagatcaggctactaaa

SEQ ID NO: 300052 - DNA, 1708 bp, Homo sapiens
agcaccgtgcgcctcccgcctacggagaactacatgccccagcctgccccgcgaagggaagaagtcaggaggccccgcttcgcgctaacgcttgcgatggttgaattcccctcctcacgccagcctaggagaagaagttcgtagtcccagaggtgaggcaggaggcggcagtttctggcgggtgagggcggagctgaagtgacagcggaggcggaagcaacggtcggtggggcggagaagggggctggccccaggaggaggaggaaacccttccgagaaaacagcaacaagctgagctgctgtgacagaggggaacaagatggcggcgccgaaggggagcctctgggtgaggacccaactggggctcccgccgctgctgctgctgaccatggccttggccggaggttcggggaccgcttcggctgaagcatttgactcggtcttgggtgatacggcgtcttgccaccgggcctgtcagttgacctaccccttgcacacctaccctaaggaagaggagttgtacgcatgtcagagaggttgcaggctgttttcaatttgtcagtttgtggatgatggaattgacttaaatcgaactaaattggaatgtgaatctgcatgtacagaagcatattcccaatctgatgagcaatatgcttgccatcttggttgccagaatcagctgccattcgctgaactgagacaagaacaacttatgtccctgatgccaaaaatgcacctactctttcctctaactctggtgaggtcattctggagtgacatgatggactccgcacagagcttcataacctcttcatggactttttatcttcaagccgatgacggaaaaatagttatattccagtctaagccagaaatccagtacgcaccacatttggagcaggagcctacaaatttgagagaatcatctctaagcaaaatgtcctatctgcaaatgagaaattcacaagcgcacaggaattttcttgaagatggagaaagtgatggctttttaagatgcctctctcttaactctgggtggattttaactacaactcttgtcctctcggtgatggtattgctttggatttgttgtgcaactgttgctacagctgtggagcagtatgttccctctgagaagctgagtatctatggtgacttggagtttatgaatgaacaaaagctaaacagatatccagcttcttctcttgtggttgttagatctaaaactgaagatcatgaagaagcagggcctctacctacaaaagtgaatcttgctcattctgaaatttaagcatttttcttttaaaagacaagtgtaatagacatctaaaattccactcctcatagagcttttaaaatggtttcattggatataggccttaagaaatcactataaaatgcaaataaagttactcaaatctgtgaagactgtatttgctataactttattggtattgtttttgtagtaatttaagaggtggatgtttgggattgtattattattttactaatatctgtagctattttgttttttgctttggttattgtttttttcccttttcttagctatgagctgatcattgctccttctcacctaagaaaagggataaaagacaacatattggtacagtgaacactgctcgggtgatgggtgcaccaaaatctcagaattgaccactaaagaactcgttcatgtaatgaaaaacca

SEQ ID NO: 300053 - DNA, 1409 bp, Homo sapiens
agcaccgtgcgcctcccgcctacggagaactacatgccccagcctgccccgcgaagggaagaagtcaggaggccccgcttcgcgctaacgcttgcgatggttgaattcccctcctcacgccagcctaggagaagaagttcgtagtcccagaggaagaggagttgtacgcatgtcagagaggttgcaggctgttttcaatttgtcagtttgtggatgatggaattgacttaaatcgaactaaattggaatgtgaatctgcatgtacagaagcatattcccaatctgatgagcaatatgcttgccatcttggttgccagaatcagctgccattcgctgaactgagacaagaacaacttatgtccctgatgccaaaaatgcacctactctttcctctaactctggtgaggtcattctggagtgacatgatggactccgcacagagcttcataacctcttcatggactttttatcttcaagccgatgacggaaaaatagttatattccagtctaagccagaaatccagtacgcaccacatttggagcaggagcctacaaatttgagagaatcatctctaagcaaaatgtcctatctgcaaatgagaaattcacaagcgcacaggaattttcttgaagatggagaaagtgatggctttttaagatgcctctctcttaactctgggtggattttaactacaactcttgtcctctcggtgatggtattgctttggatttgttgtgcaactgttgctacagctgtggagcagtatgttccctctgagaagctgagtatctatggtgacttggagtttatgaatgaacaaaagctaaacagatatccagcttcttctcttgtggttgttagatctaaaactgaagatcatgaagaagcagggcctctacctacaaaagtgaatcttgctcattctgaaatttaagcatttttcttttaaaagacaagtgtaatagacatctaaaattccactcctcatagagcttttaaaatggtttcattggatataggccttaagaaatcactataaaatgcaaataaagttactcaaatctgtgaagactgtatttgctataactttattggtattgtttttgtagtaatttaagaggtggatgtttgggattgtattattattttactaatatctgtagctattttgttttttgctttggttattgtttttttcccttttcttagctatgagctgatcattgctccttctcacctcctgccatgatactgtcagttaccttagttaacaagctgaatatttagtagaaatgatgcttctgctcaggaatggcccacaaatctgtaatttgaaatttagcaggaaatgacctttaatgacactacattttcaggaactgaaatcattaaaattttatttgaataa

SEQ ID NO: 300054 - DNA, 1422 bp, Homo sapiens
agcaccgtgcgcctcccgcctacggagaactacatgccccagcctgccccgcgaagggaagaagtcaggaggccccgcttcgcgctaacgcttgcgatggttgaattcccctcctcacgccagcctaggagaagaagttcgtagtcccagaggtgaggcaggaggcggcagtttctggcgggtgagggcggagctgaagtgacagcggaggcggaagcaacggtcggtggggcggagaagggggctggccccaggaggaggaggaaacccttccgagaaaacagcaacaagctgagctgctgtgacagaggggaacaagatggcggcgccgaaggggagcctctgggtgaggacccaactggggctcccgccgctgctgctgctgaccatggccttggccggaggttcggggaccgcttcggctgaagcatttgactcggtcttgggtgatacggcgtcttgccaccgggcctgtcagttgacctaccccttgcacacctaccctaaggaagaggagttgtacgcatgtcagagaggttgcaggctgttttcaatttgtcagtttgtggatgatggaattgacttaaatcgaactaaattggaatgtgaatctgcatgtacagaagcatattcccaatctgatgagcaatatgcttgccatcttggttgccagaatcagctgccattcgctgaactgagacaagaacaacttatgtccctgatgccaaaaatgcacctactctttcctctaactctggtgaggtcattctggagtgacatgatggactccgcacagagcttcataacctcttcatggactttttatcttcaagccgatgacggaaaaatagttatattccagtctaagccagaaatccagtacgcaccacatttggagcaggagcctacaaatttgagagaatcatctctaagcaaaatgtcctatctgcaaatgagaaattcacaagcgcacaggaattttcttgaagatggagaaagtgatggctttttaagatgcctctctcttaactctgggtggattttaactacaactcttgtcctctcggtgatggtattgctttggatttgttgtgcaactgttgctacagctgtggagcagtatgttccctctgagaagctgagtatctatggtgacttggagtttatgaatgaacaaaagctaaacagatatccagcttcttctcttgtggttgttagatctaaaactgaagatcatgaagaagcagggcctctacctacaaaagtgaatcttgctcattctgaaatttaagcatttttcttttaaaagacaagtgtaatagacatctaaaattccactcctcatagagcttttaaaatggtttcattggatataggccttaagaaatcactataaaatgcaaataaagttactcaaatctg

SEQ ID NO: 300055 - DNA, 1724 bp, Homo sapiens
agcaccgtgcgcctcccgcctacggagaactacatgccccagcctgccccgcgaagggaagaagtcaggaggccccgcttcgcgctaacgcttgcgatggttgaattcccctcctcacgccagcctaggagaagaagttcgtagtcccagaggtgaggcaggaggcggcagtttctggcgggtgagggcggagctgaagtgacagcggaggcggaagcaacggtcggtggggcggagaagggggctggccccaggaggaggaggaaacccttccgagaaaacagcaacaagctgagctgctgtgacagaggggaacaagatggcggcgccgaaggggagcctctgggtgaggacccaactggggctcccgccgctgctgctgtgaagcatttgactcggtcttgggtgatacggcgtcttgccaccgggcctgtcagttgacctaccccttgcacacctaccctaaggaagaggagttgtacgcatgtcagagaggttgcaggctgttttcaatttgtcagtttgtggatgatggaattgacttaaatcgaactaaattggaatgtgaatctgcatgtacagaagcatattcccaatctgatgagcaatatgcttgccatcttggttgccagaatcagctgccattcgctgaactgagacaagaacaacttatgtccctgatgccaaaaatgcacctactctttcctctaactctggtgaggtcattctggagtgacatgatggactccgcacagagcttcataacctcttcatggactttttatcttcaagccgatgacggaaaaatagttatattccagtctaagccagaaatccagtacgcaccacatttggagcaggagcctacaaatttgagagaatcatctctaagcaaaatgtcctatctgcaaatgagaaattcacaagcgcacaggaattttcttgaagatggagaaagtgatggctttttaagatgcctctctcttaactctgggtggattttaactacaactcttgtcctctcggtgatggtattgctttggatttgttgtgcaactgttgctacagctgtggagcagtatgttccctctgagaagctgagtatctatggtgacttggagtttatgaatgaacaaaagctaaacagatatccagcttcttctcttgtggttgttagatctaaaactgaagatcatgaagaagcagggcctctacctacaaaagtgaatcttgctcattctgaaatttaagcatttttcttttaaaagacaagtgtaatagacatctaaaattccactcctcatagagcttttaaaatggtttcattggatataggccttaagaaatcactataaaatgcaaataaagttactcaaatctgtgaagactgtatttgctataactttattggtattgtttttgtagtaatttaagaggtggatgtttgggattgtattattattttactaatatctgtagctattttgttttttgctttggttattgtttttttcccttttcttagctatgagctgatcattgctccttctcacctcctgccatgatactgtcagttaccttagttaacaagctgaatatttagtagaaatgatgcttctgctcaggaatggcccacaaatctgtaatttgaaatttagcaggaaatgacctttaatgacactacattttcaggaactgaaatcattaaaattttatttgaataa

SEQ ID NO: 300056 - DNA, 1442 bp, Homo sapiens
agcaccgtgcgcctcccgcctacggagaactacatgccccagcctgccccgcgaagggaagaagtcaggaggccccgcttcgcgctaacgcttgcgatggttgaattcccctcctcacgccagcctaggagaagaagttcgtagtcccagaggtgtctgccagtttgtacacagtggatcacatagaagaggagttgtacgcatgtcagagaggttgcaggctgttttcaatttgtcagtttgtggatgatggaattgacttaaatcgaactaaattggaatgtgaatctgcatgtacagaagcatattcccaatctgatgagcaatatgcttgccatcttggttgccagaatcagctgccattcgctgaactgagacaagaacaacttatgtccctgatgccaaaaatgcacctactctttcctctaactctggtgaggtcattctggagtgacatgatggactccgcacagagcttcataacctcttcatggactttttatcttcaagccgatgacggaaaaatagttatattccagtctaagccagaaatccagtacgcaccacatttggagcaggagcctacaaatttgagagaatcatctctaagcaaaatgtcctatctgcaaatgagaaattcacaagcgcacaggaattttcttgaagatggagaaagtgatggctttttaagatgcctctctcttaactctgggtggattttaactacaactcttgtcctctcggtgatggtattgctttggatttgttgtgcaactgttgctacagctgtggagcagtatgttccctctgagaagctgagtatctatggtgacttggagtttatgaatgaacaaaagctaaacagatatccagcttcttctcttgtggttgttagatctaaaactgaagatcatgaagaagcagggcctctacctacaaaagtgaatcttgctcattctgaaatttaagcatttttcttttaaaagacaagtgtaatagacatctaaaattccactcctcatagagcttttaaaatggtttcattggatataggccttaagaaatcactataaaatgcaaataaagttactcaaatctgtgaagactgtatttgctataactttattggtattgtttttgtagtaatttaagaggtggatgtttgggattgtattattattttactaatatctgtagctattttgttttttgctttggttattgtttttttcccttttcttagctatgagctgatcattgctccttctcacctcctgccatgatactgtcagttaccttagttaacaagctgaatatttagtagaaatgatgcttctgctcaggaatggcccacaaatctgtaatttgaaatttagcaggaaatgacctttaatgacactacattttcaggaactgaaatcattaaaattttatttgaataa

SEQ ID NO: 300057 - DNA, 1603 bp, Homo sapiens
agcaccgtgcgcctcccgcctacggagaactacatgccccagcctgccccgcgaagggaagaagtcaggaggccccgcttcgcgctaacgcttgcgatggttgaattcccctcctcacgccagcctaggagaagaagttcgtagtcccagaggtgaggcaggaggcggcagtttctggcgggtgagggcggagctgaagtgacagcggaggcggaagcaacggtcggtggggcggagaagggggctggccccaggaggaggaggaaacccttccgagaaaacagcaacaagctgagctgctgtgacagaggggaacaagatggcggcgccgaaggggagcctctgggaagaggagttgtacgcatgtcagagaggttgcaggctgttttcaatttgtcagtttgtggatgatggaattgacttaaatcgaactaaattggaatgtgaatctgcatgtacagaagcatattcccaatctgatgagcaatatgcttgccatcttggttgccagaatcagctgccattcgctgaactgagacaagaacaacttatgtccctgatgccaaaaatgcacctactctttcctctaactctggtgaggtcattctggagtgacatgatggactccgcacagagcttcataacctcttcatggactttttatcttcaagccgatgacggaaaaatagttatattccagtctaagccagaaatccagtacgcaccacatttggagcaggagcctacaaatttgagagaatcatctctaagcaaaatgtcctatctgcaaatgagaaattcacaagcgcacaggaattttcttgaagatggagaaagtgatggctttttaagatgcctctctcttaactctgggtggattttaactacaactcttgtcctctcggtgatggtattgctttggatttgttgtgcaactgttgctacagctgtggagcagtatgttccctctgagaagctgagtatctatggtgacttggagtttatgaatgaacaaaagctaaacagatatccagcttcttctcttgtggttgttagatctaaaactgaagatcatgaagaagcagggcctctacctacaaaagtgaatcttgctcattctgaaatttaagcatttttcttttaaaagacaagtgtaatagacatctaaaattccactcctcatagagcttttaaaatggtttcattggatataggccttaagaaatcactataaaatgcaaataaagttactcaaatctgtgaagactgtatttgctataactttattggtattgtttttgtagtaatttaagaggtggatgtttgggattgtattattattttactaatatctgtagctattttgttttttgctttggttattgtttttttcccttttcttagctatgagctgatcattgctccttctcacctcctgccatgatactgtcagttaccttagttaacaagctgaatatttagtagaaatgatgcttctgctcaggaatggcccacaaatctgtaatttgaaatttagcaggaaatgacctttaatgacactacattttcaggaactgaaatcattaaaattttatttgaataa

SEQ ID NO: 300058 - DNA, 1308 bp, Homo sapiens
agagcatcaggtaccacaccgttgtcagttgacactacccccttgcacaccgaagaggagttgtacgcatgtcagagaggttgcaggctgttttcaatttgtcagtttgtggatgatggaattgacttaaatcgaactaaattggaatgtgaatctgcatgtacagaagcatattcccaatctgatgagcaatatgcttgccatcttggttgccagaatcagctgccattcgctgaactgagacaagaacaacttatgtccctgatgccaaaaatgcacctactctttcctctaactctggtgaggtcattctggagtgacatgatggactccgcacagagcttcataacctcttcatggactttttatcttcaagccgatgacggaaaaatagttatattccagtctaagccagaaatccagtacgcaccacatttggagcaggagcctacaaatttgagagaatcatctctaagcaaaatgtcctatctgcaaatgagaaattcacaagcgcacaggaattttcttgaagatggagaaagtgatggctttttaagatgcctctctcttaactctgggtggattttaactacaactcttgtcctctcggtgatggtattgctttggatttgttgtgcaactgttgctacagctgtggagcagtatgttccctctgagaagctgagtatctatggtgacttggagtttatgaatgaacaaaagctaaacagatatccagcttcttctcttgtggttgttagatctaaaactgaagatcatgaagaagcagggcctctacctacaaaagtgaatcttgctcattctgaaatttaagcatttttcttttaaaagacaagtgtaatagacatctaaaattccactcctcatagagcttttaaaatggtttcattggatataggccttaagaaatcactataaaatgcaaataaagttactcaaatctgtgaagactgtatttgctataactttattggtattgtttttgtagtaatttaagaggtggatgtttgggattgtattattattttactaatatctgtagctattttgttttttgctttggttattgtttttttcccttttcttagctatgagctgatcattgctccttctcacctcctgccatgatactgtcagttaccttagttaacaagctgaatatttagtagaaatgatgcttctgctcaggaatggcccacaaatctgtaatttgaaatttagcaggaaatgacctttaatgacactacattttcaggaactgaaatcattaaaattttatttgaataa

SEQ ID NO: 300059 - DNA, 2102 bp, Homo sapiens
agcaccgtgcgcctcccgcctacggagaactacatgccccagcctgccccgcgaagggaagaagtcaggaggccccgcttcgcgctaacgcttgcgatggttgaattcccctcctcacgccagcctaggagaagaagttcgtagtcccagaggtgaggcaggaggcggcagtttctggcgggtgagggcggagctgaagtgacagcggaggcggaagcaacggtcggtggggcggagaagggggctggccccaggaggaggaggaaacccttccgagaaaacagcaacaagctgagctgctgtgacagaggggaacaagatggcggcgccgaaggggagcctctgggtgaggacccaactggggctcccgccgctgctgctgctgaccatggccttggccggaggttcggggaccgcttcggctgaagcatttgactcggtcttgggtgatacggcgtcttgccaccgggcctgtcagttgacctaccccttgcacacctaccctaaggaagaggagttgtacgcatgtcagagaggttgcaggctgttttcaatttgtcagtttgtggatgatggaattgacttaaatcgaactaaattggaatgtgaatctgcatgtacagaagcatattcccaatctgatgagcaatatgcttgccatcttggttgccagaatcagctgccattcgctgaactgagacaagaacaacttatgtccctgatgccaaaaatgcacctactctttcctctaactctggtgaggtcattctggagtgacatgatggactccgcacagagcttcataacctcttcatggactttttatcttcaagccgatgacggaaaaatagttatattccagtctaagccagaaatccagtacgcaccacatttggagcaggagcctacaaatttgagagaatcatctctaagcaaaatgtcctatctgcaaatgagaaattcacaagcgcacaggaattttcttgaagatggagaaagtgatggctttttaagatgcctctctcttaactctgggtggattttaactacaactcttgtcctctcggtgatggtattgctttggatttgttgtgcaactgttgctacagctgtggagcagtatgttccctctgagaagctgagtatctatggtgacttggagtttatgaatgaacaaaagctaaacagatatccagcttcttctcttgtggttgttagatctaaaactgaagatcatgaagaagcagggcctctacctacaaaagtgaatcttgctcattctgaaatttaagcatttttcttttaaaagacaagtgtaatagacatctaaaattccactcctcatagagcttttaaaatggtttcattggatataggccttaagaaatcactataaaatgcaaataaagttactcaaatctgaaaaaaaaaataaaaaagaaataaaaatccagagtgaacgggtgatgaatatggtggcagggggaggatgtaagggaaagtttagggggagcgggaggatgatttgtgggaaaagcgagtgcatgatctctagggtggtgggcagacacaaatgctacaaatagggctgtgaccctgatcactgtgttctggaccccgagattgaggcggtacataaaacgcagggtattaaaaaagcccatctttaccaagccaagggcctttttcccaataaccaaacctggctgtttccttcaaccttgattttaaccaagcccaaagataccggagagtatgtcttgggccaacagctaaacctcgttgtgcacaacgactgggcccaagttgaatgcctcaaaaaggctgtgcaggaggagcccacactaaaagaggggagcccacccggggacacacagccaggcgtttcccggcgaaagagaaagcaaaacaccccaggtgtcaagcccaacgaagcgcaccacgaggggggtggccccgcgcgccgcgagagaagcaaagggacacacgtgtcaccgagcgacgggcagctatagagccaaggccacaggagccccctggtcaacactggccacaaagaataccactggctggacaaagtacacgccaagcaccagggggcc

SEQ ID NO: 300060 - DNA, 1303 bp, Homo sapiens
agcaccgtgcgcctcccgcctacggagaactacatgccccagcctgccccgcgaagggaagaagtcaggaggccccgcttcgcgctaacgcttgcgatggttgaattcccctcctcacgccagcctaggagaagaagttcgtagtcccagagcatgtacagaagcatattcccaatctgatgagcaatatgcttgccatcttggttgccagaatcagctgccattcgctgaactgagacaagaacaacttatgtccctgatgccaaaaatgcacctactctttcctctaactctggtgaggtcattctggagtgacatgatggactccgcacagagcttcataacctcttcatggactttttatcttcaagccgatgacggaaaaatagttatattccagtctaagccagaaatccagtacgcaccacatttggagcaggagcctacaaatttgagagaatcatctctaagcaaaatgtcctatctgcaaatgagaaattcacaagcgcacaggaattttcttgaagatggagaaagtgatggctttttaagatgcctctctcttaactctgggtggattttaactacaactcttgtcctctcggtgatggtattgctttggatttgttgtgcaactgttgctacagctgtggagcagtatgttccctctgagaagctgagtatctatggtgacttggagtttatgaatgaacaaaagctaaacagatatccagcttcttctcttgtggttgttagatctaaaactgaagatcatgaagaagcagggcctctacctacaaaagtgaatcttgctcattctgaaatttaagcatttttcttttaaaagacaagtgtaatagacatctaaaattccactcctcatagagcttttaaaatggtttcattggatataggccttaagaaatcactataaaatgcaaataaagttactcaaatctgtgaagactgtatttgctataactttattggtattgtttttgtagtaatttaagaggtggatgtttgggattgtattattattttactaatatctgtagctattttgttttttgctttggttattgtttttttcccttttcttagctatgagctgatcattgctccttctcacctcctgccatgatactgtcagttaccttagttaacaagctgaatatttagtagaaatgatgcttctgctcaggaatggcccacaaatctgtaatttgaaatttagcaggaaatgacctttaatgacactacattttcaggaactgaaatcattaaaattttatttgaataa

SEQ ID NO: 300061 - DNA, 1765 bp, Homo sapiens
agcaccgtgcgcctcccgcctacggagaactacatgccccagcctgccccgcgaagggaagaagtcaggaggccccgcttcgcgctaacgcttgcgatggttgaattcccctcctcacgccagcctaggagaagaagttcgtagtcccagaggtgaggcaggaggcggcagtttctggcgggtgagggcggagctgaagtgacagcggaggcggaagcaacggtcggtggggcggagaagggggctggccccaggaggaggaggaaacccttccgagaaaacagcaacaagctgagctgctgtgacagaggggaacaagatggcggcgccgaaggggagcctctgggtgaggacccaactggggctcccgccgctgctgctgctgaccatggccttggccggaggttcggggaccgcttcggctgaagcatttgactcggtcttgggtgatacggcgtcttgccaccgggcctgtcagttgacctaccccttgcacacctaccctaaggaagaggagttgtacgcatgtcagagaggttgcaggctgttttcaatttgtcagtttgtggatgatggaattgacttaaatcgaactaaattggaatgtgaatctgcatgtacagaagcatattcccaatctgatgagcaatatgcttgccatcttggttgccagaatcagctgccattcgctgaactgagacaagaacaacttatgtccctgatgccaaaaatgcacctactctttcctctaactctggtgaggtcattctggagtgacatgatggactccgcacagagcttcataacctcttcatggactttttatcttcaagccgatgacggaaaaatagttatattccagtctaagccagaaatccagtacgcaccacatttggagcaggagcctacaaatttgagagaatcatctctaagcaaaatgtcctatctgcaaatgagaaattcacaagcgcacaggaattttcttgaagatggagaaagtgatggctttttaagatgcctctctcttaactctgggtggattttaactacaactcttgtcctctcggtgatggtattgctttggatttgttgtgcaactgttgctacagctgtggagcagtatgttccctctgagaagctgagtatctatggtgacttggagtttatgaatgaacaaaagctaaacagatatccagcttcttctcttgtggttgttagatctaaaactgaagatcatgaagaagcagggcctctacctacaaaagtgaatcttgctcattctgaaatttaagcatttttcttttaaaagacaagtgtaatagacatctaaaattccactcctcatagagcttttgaagactgtatttgctataactttattggtattgtttttgtagtaatttaagaggtggatgtttgggattgtattattattttactaatatctgtagctattttgttttttgctttggttattgtttttttcccttttcttagctatgagctgatcattgctccttctcacctcctgccatgatactgtcagttaccttagttaacaagctgaatatttagtagaaatgatgcttctgctcaggaatggcccacaaatctgtaatttgaaatttagcaggaaatgacctttaatgacactacattttcaggaactgaaatcattaaaattttatttgaataattatgtgctgaaatttgagtatctgatttttctagaccttccctcctattcctgcccaacctagataag

SEQ ID NO: 300062 - DNA, 1564 bp, Homo sapiens
agcaccgtgcgcctcccgcctacggagaactacatgccccagcctgccccgcgaagggaagaagtcaggaggccccgcttcgcgctaacgcttgcgatggttgaattcccctcctcacgccagcctaggagaagaagttcgtagtcccagaggtgaggcaggaggcggcagtttctggcgggtgagggcggagctgaagtgacagcggaggcggaagcaacggtcggtggggcggagaagggggctggccccaggaggaggaggaaacccttccgagaaaacagcaacaagctgagctgctgtgacagaggggaacaagatggcggcgccgaaggggagcctctgggtgaggacccaactggggctcccgccgctgctgctgctgaccatggccttggccggaggttcggggaccgcttcggctgaagcatttgactcggtcttgggtgatacggcgtcttgccaccgggcctgtcagttgacctaccccttgcacacctaccctaagcttatgtccctgatgccaaaaatgcacctactctttcctctaactctggtgaggtcattctggagtgacatgatggactccgcacagagcttcataacctcttcatggactttttatcttcaagccgatgacggaaaaatagttatattccagtctaagccagaaatccagtacgcaccacatttggagcaggagcctacaaatttgagagaatcatctctaagcaaaatgtcctatctgcaaatgagaaattcacaagcgcacaggaattttcttgaagatggagaaagtgatggctttttaagatgcctctctcttaactctgggtggattttaactacaactcttgtcctctcggtgatggtattgctttggatttgttgtgcaactgttgctacagctgtggagcagtatgttccctctgagaagctgagtatctatggtgacttggagtttatgaatgaacaaaagctaaacagatatccagcttcttctcttgtggttgttagatctaaaactgaagatcatgaagaagcagggcctctacctacaaaagtgaatcttgctcattctgaaatttaagcatttttcttttaaaagacaagtgtaatagacatctaaaattccactcctcatagagcttttaaaatggtttcattggatataggccttaagaaatcactataaaatgcaaataaagttactcaaatctgtgaagactgtatttgctataactttattggtattgtttttgtagtaatttaagaggtggatgtttgggattgtattattattttactaatatctgtagctattttgttttttgctttggttattgtttttttcccttttcttagctatgagctgatcattgctccttctcacctcctgccatgatactgtcagttaccttagttaacaagctgaatatttagtagaaatgatgcttctgctcaggaatggcccacaaatctgtaatttgaaatttagcaggaaatgacctttaatgacactacattttcaggaactgaaatcattaaaattttatttgaataa

SEQ ID NO: 300063 - DNA, 1400 bp, Homo sapiens
agcaccgtgcgcctcccgcctacggagaactacatgccccagcctgccccgcgaagggaagaagtcaggaggccccgcttcgcgctaacgcttgcgatggttgaattcccctcctcacgccagcctaggagaagaagttcgtagtcccagaggtgaggcaggaggcggcagtttctggcgggtgagggcggagctgaagtgacagcggaggcggaagcaacggtcggtggggcggagaagggggctggccccaggaggaggaggaaacccttccgagaaaacagcaacaagctgagctgctgtgacagaggggaacaagatggcggcgccgaaggggagcctctgggtgaggacccaactggggctcccgccgctgctgctgctgaccatggccttggccggaggttcggggaccgcttcggctgaagcatttgactcggtcttgggtgatacggcgtcttgccaccgggcctgtcagttgacctaccccttgcacacctaccctaaggaagaggagttgtacgcatgtcagagaggttgcaggctgttttcaatttgtcagtttgtggatgatggaattgacttaaatcgaactaaattggaatgtgaatctgcatgtacagaagcatattcccaatctgatgagcaatatgcttgccatcttggttgccagaatcagctgccattcgctgaactgagacaagaacaacttatgtccctgatgccaaaaatgcacctactctttcctctaactctggtgaggtcattctggagtgacatgatggactccgcacagagcttcataacctcttcatggactttttatcttcaagccgatgacggaaaaatagttatattccagtctaagccagaaatccagtacgcaccacatttggagcaggagcctacaaatttgagagaatcatctctaagcaaaatgtcctatctgcaaatgagaaattcacaagcgcacaggaattttcttgaagatggagaaagtgatggctttttaagatgcctctctcttaactctgggtggattttaactacaactcttgtcctctcggtgatggtattgctttggatttgttgtgcaactgttgctacagctgtggagcagtatgttccctctgagaagctgagtatctatggtgacttggagtttatgaatgaacaaaagctaaacagatatccagcttcttctcttgtggttgttagatctaaaactgaagatcatgaagaggacaagagttgtagttaaaatccacccagagttaagagagaggcatcttaaaaagccatcactttctccatcttcaagaaaattcctgtgcgcttgtgaatttctcatttgcagatctgaggacattttgcttagagatgattctctcaaatttgta

SEQ ID NO: 300064 - DNA, 1189 bp, Homo sapiens
agcaccgtgcgcctcccgcctacggagaactacatgccccagcctgccccgcgaagggaagaagtcaggaggccccgcttcgcgctaacgcttgcgatggttgaattcccctcctcacgccagcctaggagaagaagttcgtagtcccagaggtgaggcaggaggcggcagtttctggcgggtgagggcggagctgaatgacatgatggactccgcacagagcttcataacctcttcatggactttttatcttcaagccgatgacggaaaaatagttatattccagtctaagccagaaatccagtacgcaccacatttggagcaggagcctacaaatttgagagaatcatctctaagcaaaatgtcctatctgcaaatgagaaattcacaagcgcacaggaattttcttgaagatggagaaagtgatggctttttaagatgcctctctcttaactctgggtggattttaactacaactcttgtcctctcggtgatggtattgctttggatttgttgtgcaactgttgctacagctgtggagcagtatgttccctctgagaagctgagtatctatggtgacttggagtttatgaatgaacaaaagctaaacagatatccagcttcttctcttgtggttgttagatctaaaactgaagatcatgaagaagcagggcctctacctacaaaagtgaatcttgctcattctgaaatttaagcatttttcttttaaaagacaagtgtaatagacatctaaaattccactcctcatagagcttttaaaatggtttcattggatataggccttaagaaatcactataaaatgcaaataaagttactcaaatctgtgaagactgtatttgctataactttattggtattgtttttgtagtaatttaagaggtggatgtttgggattgtattattattttactaatatctgtagctattttgttttttgctttggttattgtttttttcccttttcttagctatgagctgatcattgctccttctcacctcctgccatgatactgtcagttaccttagttaacaagctgaatatttagtagaaatgatgcttctgctcaggaatggcccacaaatctgtaatttgaaatttagcaggaaatgacctttaatgacactacattttcaggaactgaaatcattaaaattttatttgaataa

SEQ ID NO: 300065 - DNA, 1093 bp, Homo sapiens
agagcatcaggtaccacaccgttgtcagttgacactacccccttgcacaccgaagaggagttgtacgcatgtcagagaggttgcaggctgttttcaatttgtcagtttgtggatgatggaattgacttaaatcgaactaaattggaatgtgaatctgcatgtacagaagcatattcccaatctgatgagcaatatgcttgccatcttggttgccagaatcagctgccattcgctgaactgagacaagaacaacttatgtccctgatgccaaaaatgcacctactctttcctctaactctggtgaggtcattctggagtgacatgatggactccgcacagagcttcataacctcttaactctgggtggattttaactacaactcttgtcctctcggtgatggtattgctttggatttgttgtgcaactgttgctacagctgtggagcagtatgttccctctgagaagctgagtatctatggtgacttggagtttatgaatgaacaaaagctaaacagatatccagcttcttctcttgtggttgttagatctaaaactgaagatcatgaagaagcagggcctctacctacaaaagtgaatcttgctcattctgaaatttaagcatttttcttttaaaagacaagtgtaatagacatctaaaattccactcctcatagagcttttaaaatggtttcattggatataggccttaagaaatcactataaaatgcaaataaagttactcaaatctgtgaagactgtatttgctataactttattggtattgtttttgtagtaatttaagaggtggatgtttgggattgtattattattttactaatatctgtagctattttgttttttgctttggttattgtttttttcccttttcttagctatgagctgatcattgctccttctcacctcctgccatgatactgtcagttaccttagttaacaagctgaatatttagtagaaatgatgcttctgctcaggaatggcccacaaatctgtaatttgaaatttagcaggaaatgacctttaatgacactacattttcaggaactgaaatcattaaaattttatttgaataa

SEQ ID NO: 300066 - DNA, 837 bp, Homo sapiens
cctcttttggaaagaccaccagaaactctaaagaatgcaaccatctgtctgtcacctgcctgtgacctgggttaggtctacctggccaggtagacctataactctgggtggattttaactacaactcttgtcctctcggtgatggtattgctttggatttgttgtgcaactgttgctacagctgtggagcagtatgttccctctgagaagctgagtatctatggtgacttggagtttatgaatgaacaaaagctaaacagatatccagcttcttctcttgtggttgttagatctaaaactgaagatcatgaagaagcagggcctctacctacaaaagtgaatcttgctcattctgaaatttaagcatttttcttttaaaagacaagtgtaatagacatctaaaattccactcctcatagagcttttaaaatggtttcattggatataggccttaagaaatcactataaaatgcaaataaagttactcaaatctgtgaagactgtatttgctataactttattggtattgtttttgtagtaatttaagaggtggatgtttgggattgtattattattttactaatatctgtagctattttgttttttgctttggttattgtttttttcccttttcttagctatgagctgatcattgctccttctcacctcctgccatgatactgtcagttaccttagttaacaagctgaatatttagtagaaatgatgcttctgctcaggaatggcccacaaatctgtaatttgaaatttagcaggaaatgacctttaatgacactacattttcaggaactgaaatcattaaaattttatttgaataa

SEQ ID NO: 300067 - DNA, 1017 bp, Homo sapiens
agcaccgtgcgcctcccgcctacggagaactacatgccccagcctgccccgcgaagggaagaagtcaggaggccccgcttcgcgctaacgcttgcgatggttgaattcccctcctcacgccagcctaggagaagaagttcgtagtcccagaggtgaggcaggaggcggcagtttctggcgggtgagggcggagctgaagtgacagcggaggcggaagcaacggtcggtggggcggagaagggggctggccccaggaggaggaggaaacccttccgagaaaacagcaacaagctgagctgctgtgacagaggggaacaagatggcggcgccgaaggggagcctctgggtgaggacccaactggggctcccgccgctgctgctgctgaccatggccttggccggaggttcggggaccgcttcggctgaagcatttgactcggtcttgggtgatacggcgtcttgccaccgggcctgtcagttgacctaccccttgcacacctaccctaaggaagaggagttgtacgcatgtcagagaggttgcaggctgttttcaatttgtcagtttgtggatgatggaattgacttaaatcgaactaaattggaatgtgaatctgcatgtacagaagcatattcccaatctgatgagcaatatgcttgccatcttggttgccagaatcagctgccattcgctgaactgagacaagaacaacttatgtccctgatgccaaaaatgcacctactctttcctctaactctggtgaggtcattctggagtgacatgatggactccgcacagagcttcataacctcttcatggactttttatcttcaagccgatgacggaaaaatagttatattccagtctaagccagaaatccagtacgcaccacatttggagcaggagcctacaaatttgagagaatcatctctaagcaaaatgtcctcagtgatggctttttaagatgccttttcttaacctttggggatttaactacaaccttggctttcgggaagggt

SEQ ID NO: 300068 - DNA, 3511 bp, Homo sapiens
agcaccgtgcgcctcccgcctacggagaactacatgccccagcctgccccgcgaagggaagaagtcaggaggccccgcttcgcgctaacgcttgcgatggttgaattcccctcctcacgccagcctaggagaagaagttcgtagtcccagaggtgaggcaggaggcggcagtttctggcgggtgagggcggagctgaagtgacagcggaggcggaagcaacggtcggtggggcggagaagggggctggccccaggaggaggaggaaacccttccgagaaaacagcaacaagctgagctgctgtgacagaggggaacaagatggcggcgccgaaggggagcctctgggtgaggacccaactggggctcccgccgctgctgctgctgaccatggccttggccggaggttcggggaccgcttcggctgaagcatttgactcggtcttgggtgatacggcgtcttgccaccgggcctgtcagttgacctaccccttgcacacctaccctaaggtagggcccgtccggagcgggctgcgacccttcccttgcagcccatttctcggctccccacacgtatgtcggctctggcaacctggctgttaaatcggcccttcaatcgctgtctcccatctgtgtagctcctgttttcctccctaatcctgcctgcaccccatttctgctgtcattaccggaagtttgtcctgcactaccctgtgataggctgggggacacaaagatgagaaagacgcgatccctttcctctgggagcttgccgggctgcaggggagtcgagcactcggaggaggataggggaggatatggatgattaatgcggggtcctcacctaagggagcgtaaggggggattgtagaaagggaggcgcagatacgcgagtccacaaatgattgattgataacccttgtttactaagcgcctctcggggccaggagcgcagtcttcggggagtcagacaagtagacgattccactgtggtataaaaagcgtcacgaaggcagctcagggagtagcgagacgctcaggaatgctgtctgcctatgttgagttactgtgtccaagacgctgccaagagggactgggttagagaagaggcaattaggtgtctgcctaccagaaactgaccactcagtgcagaaaacggggaattcgtggagtgggtgaagaaatgagactgtggacaggagggggttcgcagcttacagagaggaatggccctcctctctatgcttcccccctttcttttaattacatacctaaccctcttcacgttggtttttcagcctaagaactctgtttactcaacattctaaattgcttgatgattcccaccacacctttcccatgtatgatttgagtatatgccctcccccacgttgttttatgagagcttttgttgatgttgctggtggtttcctcttcgtttttccttcatctcctctatgctatttgcttaaccattgtggctggacctccttgctctctaaaactggagtggctacggagacagttccagtgaagcttaggatgttccatattggcgagtattttcaggtctttgaaatgaaaagttctaagtgccggcacttctcagattttgttacggctggattttaaactgcatggagattatcaattttcaaaaaaaagtgtgggagaagggactgtactaaatttttccagagatttatgtaacaatcgagaaagaagtgagaagttttaacttcagacttaaatcaatgaatactgcttctaaccacgttatttttctccacctcttgtaaacttctcatcattaagaggattgtatgaagaagctcattaatattgatttggcctggaattgggttgagacttactttctattgttctagggtttgtttccttttttgggattttctcggcaattttgtggtataagtttgaaaaacgagatagaaatctcgttttaggctgggcgcggtggctcacgcctgtaattccagcagtttgggaggccgaggcgagtggatcctgggtggtcaggagttcaagatcagcctgaccaacatggtgaaaccccatctctactaaaaatacaaaaattagccgaacatggcgcacgcttgtgatcccagctactcaggaggctgagtcaggagaaccgctggaacccgggcggtggaggttgcagtgagccaagattgtgccactgcactccagcctgggtaacagaacaagaccccgtctctttaaaaaaaaaaaaaaaagagacagagacattcatacatatatctaagtctacctactctcaaaagatgctagatattactattattctccaatgagttttatgacatttgcagtgattctgttttatgctttcattcttttagtgtcttcttgtatatggtattaacaattaaggaactttatatatttatgaagacccttctatcagtgtgagagcatttcatgcatattctttgttctcgcagccttttcaaatagcatctatcattttccatacatgttaagctaaaacatttaggagcagaaaaacttgcaccaaattattttaccacttggtaggagagctaagatgttgaaggacttgatcacttaaggcatccatagctgtttttcttgatacccaattgttatactcctgaggattttaacttgagacgtggaacagctttctttggccatccattgggagctgaatcacatatctacaacactttgagaaaaagtattcttctttcttaaagttgtttatagaattttttttaccaactatttataaattaaattgttatttaaagactaacttggagaggttcctaattatccagactactaatgtacattggttttcttttgcagaagctgagtatctatggtgacttggagtttatgaatgaacaaaagctaaacagatatccagcttcttctcttgtggttgttagatctaaaactgaagatcatgaagaagcagggcctctacctacaaaagtgaatcttgctcattctgaaatttaagcatttttcttttaaaagacaagtgtaatagacatctaaaattccactcctcatagagcttttaaaatggtttcattggatataggccttaagaaatcactataaaatgcaaataaagttactcaaatctgtgaagactgtatttgctataactttattggtattgtttttgtagtaatttaagaggtggatgtttgggattgtattattattttactaatatctgtagctattttgttttttgctttggttattgtttttttcccttttcttagctatgagctgatcattgctccttctcacctcctgccatgatactgtcagttaccttagttaacaagctgaatatttagtagaaatgatgcttctgctcaggaatggcccacaaatctgtaatttgaaatttagcaggaaatgacctttaatgacactacattttcaggaactgaaatcattaaaattttatttgaataa

SEQ ID NO: 300069 - DNA, 934 bp, Homo sapiens
agcaccgtgcgcctcccgcctacggagaactacatgccccagcctgccccgcgaagggaagaagtcaggaggccccgcttcgcgctaacgcttgcgatggttgaattcccctcctcacgccagcctaggagaagaagttcgtagtcccagaggtgaggcaggaggcggcagtttctggcgggtgagggcggagctgaagtgacagcggaggcggaagcaacggtcggtggggcggagaagggggctggccccaggaggaggaggaaacccttccgagaaaacagcaacaagctgagctgctgtgacagaggggaacaagatggcggcgccgaaggggagcctctgggtgaggacccaactggggctcccgccgctgctgctgctgaccatggccttggccggaggttcggggaccgcttcggctgaagcatttgactcggtcttgggtgatacggcgtcttgccaccgggcctgtcagttgacctaccccttgcacacctaccctaaggaagaggagttgtacgcatgtcagagaggttgcaggctgttttcaatttgtcagtttgtggatgatggaattgacttaaatcgaactaaattggaatgtgaatctgcatgtacagaagcatattcccaatctgatgagcaatatgcttgccatcttggttgccagaatcagctgccattcgctgaactgagacaagaacaacttatgtccctgatgccaaaaatgcacctactctttcctctaactctggtgaggtcattctggagtgacatgatggactccgcacagagcttcataacctcttcatggactttttatcttcaagccgatgacggaaaaatagttatattccagtctaagccagaaatccagtacttcaacttgtttctgtagaaattgccagaaatgttgatgccttcacagcgt

SEQ ID NO: 300070 - DNA, 878 bp, Homo sapiens
agcaccgtgcgcctcccgcctacggagaactacatgccccagcctgccccgcgaagggaagaagtcaggaggccccgcttcgcgctaacgcttgcgatggttgaattcccctcctcacgccagcctaggagaagaagttcgtagtcccagaggtgaggcaggaggcggcagtttctggcgggtgagggcggagctgaagtgacagcggaggcggaagcaacggtcggtggggcggagaagggggctggccccaggaggaggaggaaacccttccgagaaaacagcaacaagctgagctgctgtgacagaggggaacaagatggcggcgccgaaggggagcctctgggtgaggacccaactggggctcccgccgctgctgctgctgaccatggccttggccggaggttcggggaccgcttcggctgaagcatttgactcggtcttgggtgatacggcgtcttgccaccgggcctgtcagttgacctaccccttgcacacctaccctaaggaagaggagttgtacgcatgtcagagaggttgcaggctgttttcaatttgtcagtttgtggatgatggaattgacttaaatcgaactaaattggaatgtgaatctgcatgtacagaagcatattcccaatctgatgagcaatatgcttgccatcttggttgccagaatcagctgccattcgctgaactgagacaagaacaacctgccatgatactgtcagttaccttagttaacaagctgaatatttagtagaaatgatgcttctgctcaggaatggcccacaaatctgtaatttgaaatttagcaggaaatgacctttaatgacactacattttcaggaactgaaatcattaaaattttatttgaataa

SEQ ID NO: 300071 - DNA, 3168 bp, Homo sapiens
agcaccgtgcgcctcccgcctacggagaactacatgccccagcctgccccgcgaagggaagaagtcaggaggccccgcttcgcgctaacgcttgcgatggttgaattcccctcctcacgccagcctaggagaagaagttcgtagtcccagaggtgaggcaggaggcggcagtttctggcgggtgagggcggagctgaagtgacagcggaggcggaagcaacggtcggtggggcggagaagggggctggccccaggaggaggaggaaacccttccgagaaaacagcaacaagctgagctgctgtgacagaggggaacaagatggcggcgccgaaggggagcctctgggtgaggacccaactggggctcccgccgctgctgctgctgaccatggccttggccggaggttcggggaccgcttcggctgaagcatttgactcggtcttgggtgatacggcgtcttgccaccgggcctgtcagttgacctaccccttgcacacctaccctaaggtagggcccgtccggagcgggctgcgacccttcccttgcagcccatttctcggctccccacacgtatgtcggctctggcaacctggctgttaaatcggcccttcaatcgctgtctcccatctgtgtagctcctgttttcctccctaatcctgcctgcaccccatttctgctgtcattaccggaagtttgtcctgcactaccctgtgataggctgggggacacaaagatgagaaagacgcgatccctttcctctgggagcttgccgggctgcaggggagtcgagcactcggaggaggataggggaggatatggatgattaatgcggggtcctcacctaagggagcgtaaggggggattgtagaaagggaggcgcagatacgcgagtccacaaatgattgattgataacccttgtttactaagcgcctctcggggccaggagcgcagtcttcggggagtcagacaagtagacgattccactgtggtataaaaagcgtcacgaaggcagctcagggagtagcgagacgctcaggaatgctgtctgcctatgttgagttactgtgtccaagacgctgccaagagggactgggttagagaagaggcaattaggtgtctgcctaccagaaactgaccactcagtgcagaaaacggggaattcgtggagtgggtgaagaaatgagactgtggacaggagggggttcgcagcttacagagaggaatggccctcctctctatgcttcccccctttcttttaattacatacctaaccctcttcacgttggtttttcagcctaagaactctgtttactcaacattctaaattgcttgatgattcccaccacacctttcccatgtatgatttgagtatatgccctcccccacgttgttttatgagagcttttgttgatgttgctggtggtttcctcttcgtttttccttcatctcctctatgctatttgcttaaccattgtggctggacctccttgctctctaaaactggagtggctacggagacagttccagtgaagcttaggatgttccatattggcgagtattttcaggtctttgaaatgaaaagttctaagtgccggcacttctcagattttgttacggctggattttaaactgcatggagattatcaattttcaaaaaaaagtgtgggagaagggactgtactaaatttttccagagatttatgtaacaatcgagaaagaagtgagaagttttaacttcagacttaaatcaatgaatactgcttctaaccacgttatttttctccacctcttgtaaacttctcatcattaagaggattgtatgaagaagctcattaatattgatttggcctggaattgggttgagacttactttctattgttctagggtttgtttccttttttgggattttctcggcaattttgtggtataagtttgaaaaacgagatagaaatctcgttttaggctgggcgcggtggctcacgcctgtaattccagcagtttgggaggccgaggcgagtggatcctgggtggtcaggagttcaagatcagcctgaccaacatggtgaaaccccatctctactaaaaatacaaaaattagccgaacatggcgcacgcttgtgatcccagctactcaggaggctgagtcaggagaaccgctggaacccgggcggtggaggttgcagtgagccaagattgtgccactgcactccagcctgggtaacagaacaagaccccgtctctttaaaaaaaaaaaaaaaagagacagagacattcatacatatatctaagtctacctactctcaaaagatgctagatattactattattctccaatgagttttatgacatttgcagtgattctgttttatgctttcattcttttagtgtcttcttgtatatggtattaacaattaaggaactttatatatttatgaagacccttctatcagtgtgagagcatttcatgcatattctttgttctcgcagccttttcaaatagcatctatcattttccatacatgttaagctaaaacatttaggagcagaaaaacttgcaccaaattattttaccacttggtaggagagctaagatgttgaaggacttgatcacttaaggcatccatagctgtttttcttgatacccaattgttatactcctgaggattttaacttgagacgtggaacagctttctttggccatccattgggagctgaatcacatatctacaacactttgagaaaaagtattcttctttcttaaagttgtttatagaattttttttaccaactatttataaattaaattgttatttaaagactaacttggagaggttcctaattatccagactactaatgtacattggttttcttttgcagaagctgagtatctatggtgacttggagtttatgaatgaacaaaagctaaacagatatccagcttcttctcttgtggttgttagatctaaaactgaagatcatgaagaagcagggcctctacctacaaaagtgaatcttgctcattctgaaatttaagcatttttcttttaaaagacaagtgtaatagacatctaaaattccactcctcatagagcttttaaaatggtttcattggatataggccttaagaaatcactataaaatgcaaataaagttactcaaatctg

SEQ ID NO: 300072 - DNA, 2140 bp, Homo sapiens
agcaccgtgcgcctcccgcctacggagaactacatgccccagcctgccccgcgaagggaagaagtcaggaggccccgcttcgcgctaacgcttgcgatggttgaattcccctcctcacgccagcctaggagaagaagttcgtagtcccagaggtgaggcaggaggcggcagtttctggcgggtgagggcggagctgaagtgacagcggaggcggaagcaacggtcggtggggcggagaagggggctggccccaggaggaggaggaaacccttccgagaaaacagcaacaagctgagctgctgtgacagaggggaacaagatggcggcgccgaaggggagcctctgggtgaggacccaactggggctcccgccgctgctgctgctgaccatggccttggccggaggttcggggaccgcttcggctgaagcatttgactcggtcttgggtgatacggcgtcttgccaccgggcctgtcagttgacctaccccttgcacacctaccctaaggtagggcccgtccggagcgggctgcgacccttcccttgcagcccatttctcggctccccacacgtatgtcggctctggcaacctggctgttaaatcggcccttcaatcgctgtctcccatctgtgtagctcctgttttcctccctaatcctgcctgcaccccatttctgctgtcattaccggaagtttgtcctgcactaccctgtgataggctgggggacacaaagatgagaaagacgcgatccctttcctctgggagcttgccgggctgcaggggagtcgagcactcggaggaggataggggaggatatggatgattaatgcggggtcctcacctaagggagcgtaaggggggattgtagaaagggaggcgcagatacgcgagtccacaaatgattgattgataacccttgtttactaagcgcctctcggggccaggagcgcagtcttcggggagtcagacaagtagacgattccactgtggtataaaaagcgtcacgaaggcagctcagggagtagcgagacgctcaggaatgctgtctgcctatgttgagttactgtgtccaagacgctgccaagagggactgggttagagaagaggcaattaggtgtctgcctaccagaaactgaccactcagtgcagaaaacggggaattcgtggagtgggtgaagaaatgagactgtggacaggagggggttcgcagcttacagagaggaatggccctcctctctatgcttcccccctttcttttaattacatacctaaccctcttcacgttggtttttcagcctaagaactctgtttactcaacattctaaattgcttgatgattcccaccacacctttcccatgtatgatttgagtatatgccctcccccacgttgttttatgagagcttttgttgatgttgctggtggtttcctcttcgtttttccttcatctcctctatgctatttgcttaaccattgtggctggacctccttgctctctaaaactggagtggctacggagacagttccagtgaagcttaggatgttccatattggcgagtattttcaggtctttgaaatgaaaagttctaagtgccggcacttctcagattttgttacggctggattttaaactgcatggagattatcaattttcaaaaaaaagtgtgggagaagggactgtactaaatttttccagagatttatgtaacaatcgagaaagaagtgagaagttttaacttcagacttaaatcaatgaatactgcttctaaccacgttatttttctccacctcttgtaaacttctcatcattaagaggattgtatgaagaagctcattaatattgatttggcctggaattgggttgagacttactttctattgttctagggtttgtttccttttttgggattttctcggcaattttgtggtataaaccagaatgttgggaaaataatcaaataatttgaaaggataccttcctggaagttgtaggtactttaataatgtccactattttctaacaattggtgttatatctataaactatttttacttatttattaaagcttttctcacaaagaactccaaatcatctggctccctataggtcctggacaacatggcaagaccccgtctctgg

SEQ ID NO: 300073 - DNA, 718 bp, Homo sapiens
atattaccaaatttggaaattcacattgatgaaacctttttaagtataaaaatttttttaataaaatgccaaatccttttctttcctctttccctttctcttttgtttcttgtaatttgactatttttctcttacagcatgtacagaagcatattcccaatctgatgagcaatatgcttgccatcttggttgccagaatcagctgccattcgctgaactgagacaagaacaagtacgaaacaatactgcctttcaaactagcctgcttagatggcactgacttgtattgcttgaagtgtttatcacccacttgatcctattttagtgttatattttatatttggctttcagcaaacaaaattagtttgcaaatagaaaagtcagttgaataattgcttttgtataatgctttactattaaaagttatgcttacgttcataatcttattttgtttcttctcacattccagtgaagatattatcctcattttacatatgaaaaaaccaaggctcagaggaattatttcagagttctttttctccatcccaactcccattggacagttgccattgccttaactcagataatcatttcttgtctgtatttttaaattaacttccaaactgtttttctaatttaaccctgtctaactccatcctttgctgtgtccagatttttttttctaaatttcatcatgccattctcctgtcttatataa

SEQ ID NO: 300074 - DNA, 2586 bp, Homo sapiens
  misc_feature (2)..(2): n is a, c, g, or t
  misc_feature (1510)..(1510): n is a, c, g, or t
  misc_feature (1515)..(1515): n is a, c, g, or t
  misc_feature (1533)..(1534): n is a, c, g, or t
gncagaggccagctttgagtcctggcttcacctctcatcagctgtgtgacctagggtggcatgtggagcctcccaccaccacctaggtcctgagatgcgctgaagcccagcctgtctgccatcatcccccagcatggaccgtgggagcctcctgcccttccagctatggtgcccccggccctttggcacctactcacagaaccagccacgcccgccttctgcggccctcaagccatcagcctgccctgagcctggtggcggggccgagccagaccatgggcctgcccactcagagaacacaccacccgccttggccactgaggtccctgcctcccagccggctccgctcctctcagcagcagctgctggtgatgagggtcgagtcctcctggacacgtggtatgtcatcaagcccgggaatacaaaggagaaggtggccttctttgtggcccaccagtgtggtgggggcagccgggccagctccatgaaggtcaaggggcactggggcagcgatagctccaaggccaagcggcggaggcgctgtcttgaccccaccaaggctcctcctgacccagggggccgggagggcccccctgctgctgaggagggccccgcctcagccggtgaggacgtggacctgctctctgtggccgagatggtggccctggtggaacagcgggcagccctggccctgcagagctacccacgaccgaccaccccagcgcctgtagtctttgtgtccgccgagcaaggtggaccggccaagggggtgggatctgaacggcggtccggtggtggggactgcagccgtgtagccgaggccgtggcccactttgaagcgcagagggacagccctcccaccaagaacgtgaaggaggagactgtgtgcctgacggtcagcccggaggaaccgccgcctccgggccagctcttctttctccagaaccgcgggccggacgggcccccggagccacccccggccgactccccggccactgcgcccggcccagacgatgccgagggcacggcggacacctccctgtgccgcttgtaccggcacgtgtcgcacgacttcctagagatccgcttcaagattcagcggctgctggagccgcgacagtacatgctgctgctgcccgagcacgtgctggtcaagatcttcagcttcctgcccacgcgcgcgctggccgccctcaagtgcacctgccaccacttcaagggcatcatcgaggcgtttggcgtgcgggccacagactcgcgctggagccgagacccgctctaccgcgatgatccgtgcaaacagtgccgcaagagatacgagaagggcgacgtgtcgctctgccgctggcaccccaagccctaccaccatgacctgccttacggacgttcctactggatgtgctgccgtcgagccgaccgcgagactcccggctgccgcctgggcctccacgataacaactgggtgctgccctgcaatgggccaggcgggggccgggccggccgggaggangggangtgaagccgggggagggnnggggagagcccaccacgcccacccctcccctctccccccgggagccgagggtccggactgggccgcctgcccattcccctactccaggcagcattgatccctcaccggaactgagctggggttcagcaggggtgacccaggaaagccctctgcttgatcctgttgattttctactcttcagaaccagggccgtggaccctctgagaagggtgtttttttttttttatcagcatctcactttcttctccattcagccccaaccccctccctgccatgctttccaccccaaggacccaccagcagggagcagacggcagctaattttggtaccacttaagggtccccccattctggcccccatcctctccctcaccccaattctttctcgctggagctgttatttcccaagaagccgcatcgcccaaggttggcacctctcctaacctgccacacgacagctctcacctctctaggaattgggggctgtcaggtcacaggtgggatctggcatttttttatgacagtccatttctagatggtttgcctattaaagaagtgggggggaaatactgttttctccttaacctcaagctaccagtctctcctcttccgcgtagaggaagaggggggcagacaaaaaaaaagctgaagtataaaaaccctcctcctcccgttattatttaagctactgccatcaaccccacccccataaagctgtgaagccctttgcctcgcttttgacagcgtgggggggccccgtgggcagggacttcggatttgcatttctgggttgtttttccttccactctggggtctcgttcaggcattggggtctcctcaccccagccacatgtttctttaagaatcctttggtcaaccaggaccttgatttttcaggcattttggtctggggtatttttgtttgttctctctgttttttgttttcttttttttctttccatcgtggttctggaagcttctagcgtgtggcatctgaccaattttgaattggtcctttctataaaatcaatatttataaggcaaaaaacaga

SEQ ID NO: 300075 - DNA, 3049 bp, Homo sapiens
  misc_feature (42)..(42): n is a, c, g, or t
  misc_feature (1973)..(1973): n is a, c, g, or t
  misc_feature (1978)..(1978): n is a, c, g, or t
  misc_feature (1996)..(1997): n is a, c, g, or t
ttgaagccggtcgcctgcacgtttcggtccggttttcccggngtcgacccacgcgtccggcgtagccgagggagatgcagcgcgcggcgatggtggcatgtggagcctcccaccaccacctaggtcctgagatgcgctgaagcccagcctgtctgccatcatcccccagcatggaccgtgggagcctcctgcccttccagctatggtgcccccggccctttggcacctactcacagaaccagccacgcccgccttctgcggccctcaagccatcagcctgccctgagcctggtggcggggccgagccagaccatgggcctgcccactcagagaacacaccacccgccttggccactgaggtccctgcctcccagccggctccgctcctctcagcagcagctgctggtgatgagggtcgagtcctcctggacacgtggtatgtcatcaagcccgggaatacaaaggagaaggtggccttctttgtggcccaccagtgtggtgggggcagccgggccagctccatgaaggtcaaggggcactggggcagcgatagctccaaggccaagcggcggaggcgctgtcttgaccccaccaaggctcctcctgacccagggggccgggagggcccccctgctgctgaggagggccccgcctcagccggtgaggacgtggacctgctctctgtggccgagatggtggccctggtggaacagcgggcagccctggccctgcagagctacccacgaccgaccaccccagcgcctgtagtctttgtgtccgccgagcaaggtggaccggccaagggggtgggatctgaacggcggtccggtggtggggactgcagccgtgtagccgaggccgtggcccactttgaagcgcagagggacagccctcccaccaagggcctccgcaaggaagagcggcccgggccaggccctggggaggtgcgcatcgccttccgcatctccaacggccgggagccccgtgcaccagacagcggcctgcccagtgggggcgggggcaggcctggttgtgcctaccctggcagcccaggtcctggggcccgagccaaggacaagatcacatgtgacttataccagctcatcagcccctcgcgggatgccctccccagcaacgtggagttcctgctggccagggcggatgaggccagtgagggtgacagcccggcacccgccaggcctgaggacactcccccggcgccccctccgccccctgcccgggactgcggagcgtcaggcttccacgtggacgtggtggtgacgggcgtggtagatgagtgcatcttctttggcaaggacggcaccaagaacgtgaaggaggagactgtgtgcctgacggtcagcccggaggaaccgccgcctccgggccagctcttctttctccagaaccgcgggccggacgggcccccggagccacccccggccgactccccggccactgcgcccggcccagacgatgccgagggcacggcggacacctccctgtgccgcttgtaccggcacgtgtcgcacgacttcctagagatccgcttcaagattcagcggctgctggagccgcgacagtacatgctgctgctgcccgagcacgtgctggtcaagatcttcagcttcctgcccacgcgcgcgctggccgccctcaagtgcacctgccaccacttcaagggcatcatcgaggcgtttggcgtgcgggccacagactcgcgctggagccgagacccgctctaccgcgatgatccgtgcaaacagtgccgcaagagatacgagaagggcgacgtgtcgctctgccgctggcaccccaagccctaccaccatgacctgccttacggacgttcctactggatgtgctgccgtcgagccgaccgcgagactcccggctgccgcctgggcctccacgataacaactgggtgctgccctgcaatgggccaggcgggggccgggccggccgggaggangggangtgaagccgggggagggnnggggagagcccaccacgcccacccctcccctctccccccgggagccgagggtccggactgggccgcctgcccattcccctactccaggcagcattgatccctcaccggaactgagctggggttcagcaggggtgacccaggaaagccctctgcttgatcctgttgattttctactcttcagaaccagggccgtggaccctctgagaagggtgtttttttttttttatcagcatctcactttcttctccattcagccccaaccccctccctgccatgctttccaccccaaggacccaccagcagggagcagacggcagctaattttggtaccacttaagggtccccccattctggcccccatcctctccctcaccccaattctttctcgctggagctgttatttcccaagaagccgcatcgcccaaggttggcacctctcctaacctgccacacgacagctctcacctctctaggaattgggggctgtcaggtcacaggtgggatctggcatttttttatgacagtccatttctagatggtttgcctattaaagaagtgggggggaaatactgttttctccttaacctcaagctaccagtctctcctcttccgcgtagaggaagaggggggcagacaaaaaaaaagctgaagtataaaaaccctcctcctcccgttattatttaagctactgccatcaaccccacccccataaagctgtgaagccctttgcctcgcttttgacagcgtgggggggccccgtgggcagggacttcggatttgcatttctgggttgtttttccttccactctggggtctcgttcaggcattggggtctcctcaccccagccacatgtttctttaagaatcctttggtcaaccaggaccttgatttttcaggcattttggtctggggtatttttgtttgttctctctgttttttgttttcttttttttctttccatcgtggttctggaagcttctagcgtgtggcatctgaccaattttgaattggtcctttctataaaatcaatatttataaggcaaaaaacaga

SEQ ID NO: 300076 - DNA, 3153 bp, Homo sapiens
  misc_feature (2077)..(2077): n is a, c, g, or t
  misc_feature (2082)..(2082): n is a, c, g, or t
  misc_feature (2100)..(2101): n is a, c, g, or t
gcagcttgaggagaaagctaggctagaacaggcaccctcgtgttttctttctttttttttcccaagatgggttctctctcagtcacccaggctggagtgcagtggtatgatcacagcatcacagctcactgcagcctccacctcctgggctcaagcgatactcccacctcagcctcccaactagctgggactacaggtggcatgtggagcctcccaccaccacctaggtcctgagatgcgctgaagcccagcctgtctgccatcatcccccagcatggaccgtgggagcctcctgcccttccagctatggtgcccccggccctttggcacctactcacagaaccagccacgcccgccttctgcggccctcaagccatcagcctgccctgagcctggtggcggggccgagccagaccatgggcctgcccactcagagaacacaccacccgccttggccactgaggtccctgcctcccagccggctccgctcctctcagcagcagctgctggtgatgagggtcgagtcctcctggacacgtggtatgtcatcaagcccgggaatacaaaggagaaggtggccttctttgtggcccaccagtgtggtgggggcagccgggccagctccatgaaggtcaaggggcactggggcagcgatagctccaaggccaagcggcggaggcgctgtcttgaccccaccaaggctcctcctgacccagggggccgggagggcccccctgctgctgaggagggccccgcctcagccggtgaggacgtggacctgctctctgtggccgagatggtggccctggtggaacagcgggcagccctggccctgcagagctacccacgaccgaccaccccagcgcctgtagtctttgtgtccgccgagcaaggtggaccggccaagggggtgggatctgaacggcggtccggtggtggggactgcagccgtgtagccgaggccgtggcccactttgaagcgcagagggacagccctcccaccaagggcctccgcaaggaagagcggcccgggccaggccctggggaggtgcgcatcgccttccgcatctccaacggccgggagccccgtgcaccagacagcggcctgcccagtgggggcgggggcaggcctggttgtgcctaccctggcagcccaggtcctggggcccgagccaaggacaagatcacatgtgacttataccagctcatcagcccctcgcgggatgccctccccagcaacgtggagttcctgctggccagggcggatgaggccagtgagggtgacagcccggcacccgccaggcctgaggacactcccccggcgccccctccgccccctgcccgggactgcggagcgtcaggcttccacgtggacgtggtggtgacgggcgtggtagatgagtgcatcttctttggcaaggacggcaccaagaacgtgaaggaggagactgtgtgcctgacggtcagcccggaggaaccgccgcctccgggccagctcttctttctccagaaccgcgggccggacgggcccccggagccacccccggccgactccccggccactgcgcccggcccagacgatgccgagggcacggcggacacctccctgtgccgcttgtaccggcacgtgtcgcacgacttcctagagatccgcttcaagattcagcggctgctggagccgcgacagtacatgctgctgctgcccgagcacgtgctggtcaagatcttcagcttcctgcccacgcgcgcgctggccgccctcaagtgcacctgccaccacttcaagggcatcatcgaggcgtttggcgtgcgggccacagactcgcgctggagccgagacccgctctaccgcgatgatccgtgcaaacagtgccgcaagagatacgagaagggcgacgtgtcgctctgccgctggcaccccaagccctaccaccatgacctgccttacggacgttcctactggatgtgctgccgtcgagccgaccgcgagactcccggctgccgcctgggcctccacgataacaactgggtgctgccctgcaatgggccaggcgggggccgggccggccgggaggangggangtgaagccgggggagggnnggggagagcccaccacgcccacccctcccctctccccccgggagccgagggtccggactgggccgcctgcccattcccctactccaggcagcattgatccctcaccggaactgagctggggttcagcaggggtgacccaggaaagccctctgcttgatcctgttgattttctactcttcagaaccagggccgtggaccctctgagaagggtgtttttttttttttatcagcatctcactttcttctccattcagccccaaccccctccctgccatgctttccaccccaaggacccaccagcagggagcagacggcagctaattttggtaccacttaagggtccccccattctggcccccatcctctccctcaccccaattctttctcgctggagctgttatttcccaagaagccgcatcgcccaaggttggcacctctcctaacctgccacacgacagctctcacctctctaggaattgggggctgtcaggtcacaggtgggatctggcatttttttatgacagtccatttctagatggtttgcctattaaagaagtgggggggaaatactgttttctccttaacctcaagctaccagtctctcctcttccgcgtagaggaagaggggggcagacaaaaaaaaagctgaagtataaaaaccctcctcctcccgttattatttaagctactgccatcaaccccacccccataaagctgtgaagccctttgcctcgcttttgacagcgtgggggggccccgtgggcagggacttcggatttgcatttctgggttgtttttccttccactctggggtctcgttcaggcattggggtctcctcaccccagccacatgtttctttaagaatcctttggtcaaccaggaccttgatttttcaggcattttggtctggggtatttttgtttgttctctctgttttttgttttcttttttttctttccatcgtggttctggaagcttctagcgtgtggcatctgaccaattttgaattggtcctttctataaaatcaatatttataaggcaaaaaacaga

SEQ ID NO: 300077 - DNA, 3027 bp, Homo sapiens
  misc_feature (1951)..(1951): n is a, c, g, or t
  misc_feature (1956)..(1956): n is a, c, g, or t
  misc_feature (1974)..(1975): n is a, c, g, or t
tggaggttggggtggtcctgggaagaaaggctgtccccctagctccccaacctcctcttcgtgtctccaggtggcatgtggagcctcccaccaccacctaggtcctgagatgcgctgaagcccagcctgtctgccatcatcccccagcatggaccgtgggagcctcctgcccttccagctatggtgcccccggccctttggcacctactcacagaaccagccacgcccgccttctgcggccctcaagccatcagcctgccctgagcctggtggcggggccgagccagaccatgggcctgcccactcagagaacacaccacccgccttggccactgaggtccctgcctcccagccggctccgctcctctcagcagcagctgctggtgatgagggtcgagtcctcctggacacgtggtatgtcatcaagcccgggaatacaaaggagaaggtggccttctttgtggcccaccagtgtggtgggggcagccgggccagctccatgaaggtcaaggggcactggggcagcgatagctccaaggccaagcggcggaggcgctgtcttgaccccaccaaggctcctcctgacccagggggccgggagggcccccctgctgctgaggagggccccgcctcagccggtgaggacgtggacctgctctctgtggccgagatggtggccctggtggaacagcgggcagccctggccctgcagagctacccacgaccgaccaccccagcgcctgtagtctttgtgtccgccgagcaaggtggaccggccaagggggtgggatctgaacggcggtccggtggtggggactgcagccgtgtagccgaggccgtggcccactttgaagcgcagagggacagccctcccaccaagggcctccgcaaggaagagcggcccgggccaggccctggggaggtgcgcatcgccttccgcatctccaacggccgggagccccgtgcaccagacagcggcctgcccagtgggggcgggggcaggcctggttgtgcctaccctggcagcccaggtcctggggcccgagccaaggacaagatcacatgtgacttataccagctcatcagcccctcgcgggatgccctccccagcaacgtggagttcctgctggccagggcggatgaggccagtgagggtgacagcccggcacccgccaggcctgaggacactcccccggcgccccctccgccccctgcccgggactgcggagcgtcaggcttccacgtggacgtggtggtgacgggcgtggtagatgagtgcatcttctttggcaaggacggcaccaagaacgtgaaggaggagactgtgtgcctgacggtcagcccggaggaaccgccgcctccgggccagctcttctttctccagaaccgcgggccggacgggcccccggagccacccccggccgactccccggccactgcgcccggcccagacgatgccgagggcacggcggacacctccctgtgccgcttgtaccggcacgtgtcgcacgacttcctagagatccgcttcaagattcagcggctgctggagccgcgacagtacatgctgctgctgcccgagcacgtgctggtcaagatcttcagcttcctgcccacgcgcgcgctggccgccctcaagtgcacctgccaccacttcaagggcatcatcgaggcgtttggcgtgcgggccacagactcgcgctggagccgagacccgctctaccgcgatgatccgtgcaaacagtgccgcaagagatacgagaagggcgacgtgtcgctctgccgctggcaccccaagccctaccaccatgacctgccttacggacgttcctactggatgtgctgccgtcgagccgaccgcgagactcccggctgccgcctgggcctccacgataacaactgggtgctgccctgcaatgggccaggcgggggccgggccggccgggaggangggangtgaagccgggggagggnnggggagagcccaccacgcccacccctcccctctccccccgggagccgagggtccggactgggccgcctgcccattcccctactccaggcagcattgatccctcaccggaactgagctggggttcagcaggggtgacccaggaaagccctctgcttgatcctgttgattttctactcttcagaaccagggccgtggaccctctgagaagggtgtttttttttttttatcagcatctcactttcttctccattcagccccaaccccctccctgccatgctttccaccccaaggacccaccagcagggagcagacggcagctaattttggtaccacttaagggtccccccattctggcccccatcctctccctcaccccaattctttctcgctggagctgttatttcccaagaagccgcatcgcccaaggttggcacctctcctaacctgccacacgacagctctcacctctctaggaattgggggctgtcaggtcacaggtgggatctggcatttttttatgacagtccatttctagatggtttgcctattaaagaagtgggggggaaatactgttttctccttaacctcaagctaccagtctctcctcttccgcgtagaggaagaggggggcagacaaaaaaaaagctgaagtataaaaaccctcctcctcccgttattatttaagctactgccatcaaccccacccccataaagctgtgaagccctttgcctcgcttttgacagcgtgggggggccccgtgggcagggacttcggatttgcatttctgggttgtttttccttccactctggggtctcgttcaggcattggggtctcctcaccccagccacatgtttctttaagaatcctttggtcaaccaggaccttgatttttcaggcattttggtctggggtatttttgtttgttctctctgttttttgttttcttttttttctttccatcgtggttctggaagcttctagcgtgtggcatctgaccaattttgaattggtcctttctataaaatcaatatttataaggcaaaaaacaga

SEQ ID NO: 300078 - DNA, 1098 bp, Homo sapiens
gcagcttgaggagaaagctaggctagaacaggcaccctcgtgttttctttctttttttttcccaagatgggttctctctcagtcacccaggctggagtgcagtggtatgatcacagcatcacagctcactgcagcctccacctcctgggctcaagcgatactcccacctcagcctcccaactagctgggactacaggtgcgccacaccccacccggctaatttttgtatcttttttcgtagagatggattttgcccaggctggtctcaaactcctgggctcaagcaatctgcccacctcggcctcccaaagtgctaagattacaggcacaagccaccacacccggctttgttctctgttttttagagggtctcactctgtcacccgggttggagtgcagtggtgccatcattgctccctgcagcctggaactcctcctaggctctagaacaggccctcttactccgcgggtccacggctgtgctttagggaatcccctgtactgtctttgcaagggtgtgcatttttctgactgaggacacacagctttaataaattctcattaagccccactacctgaaaaaaaaaaagaaaagccgatttcttaagtgcttgtctgaatctgacctcagattttcatccccatcccagcgcatttcgttcctctctctgtgggtttaagcagccatagctgtgggtggggctgggaatttctgtcttttcaggaacgagctactgagtgagcaaatagaaaaaggaccttgtctgtcagtggtcctttcacttaagtgtaaaagttatggcagtttaaaggcctctggattgtgggcaaaggcagttggacagtggggtaggacctatggggttggtgcgtgctgccagttagggtcccgctctgcaagttaaaagggcatctctcatcccctctgcaacctctgtctgctcacctgagcatggcagtgggaatagagttctttttttttttttttttttttttgagacggagtttcgctcttgtcgcccaggctggagtgtaatggtgccatctggtctcgctgcaacctccacctcccaggttcaagcgattctcgtgcctcag

SEQ ID NO: 300079 - DNA, 1109 bp, Homo sapiens
ttgcttggttgtagtttctaagcacgatgtcctgaaagtctggcgtgagacccgaggtgctcgtgtctttttactttaacttctgtgtgctggtgagaggagagaagcagctgttcttctccaggtgctgctaaggccttagtggaaataacgcccatcaagtttttattaatgttgagctggccacagtctaggtcctggtgagaggcctctctgctgtgagccttggctagatgcgctgagggggctcagtgcatgtgtagatggatgtgtgtcttgtttatgcatgtagattttgttttgtatttattcacatacatggtgaggagatcgagaccatcctggccaacatggtgaaaccccatctctactaaaaattagctgggtgtggcggcatgcgcctgtaatctcagctactggggaggctgaggcaggagaattgcttgaacccgggaagcggaggttgcagtgagccgagattgctccactgcactccagcctggtgacagagcaaggctccgtttcaaaaaaaaaaaaaagttaaacttacacttaacatatgacccagcagtcccacccctaagtacatacccaagagaagtgaaaacttacattcacacaaacacttgtacgcaaatgttcacagcagctttatccactgtcctcccaaattagaaaccacctgtccttcaactggtgagtgaataaacaaactggtgcatccatacaatggaccaccaatggacgcagctataaaaaggaacaaattattaacactaggccctcacttaatgtcattggtaggttcttgaagtgaaacaacacacactgcaacttgaagtgaaacaacatacactgaagccagttttaccataggctaattgacatgagtaagagttaagttcctacagcatatttccggtccccaaaacaccaccagacttttaaataaagacccaaaacaggccgggtgctgtggctcacgcctgtaatcccagcactttgggaagccgaggcaggcagatcacctgaggtcaagagttcgagaccagcctgaccaacatggaaaccccgtctctactacaaatataaaaattagctgggcatgg

SEQ ID NO: 300080 - DNA, 483 bp, Homo sapiens
ggatatgtaataggagtctgatttctttctttctttccttctttctacaaatactgagcacctgtgcaccaggcactattctaggccatttggttattagcatacccaaggaagtaatatttcaactgaatcctattggtatggcacctaaacaacctccccccaacattttgtgttcaagagcattttcataagcactgttgaaaggagacaaagcagtatgtgagtctggtctttactaaaaagcaaatttgagtcacttataatggattcttcattaccaaatgatgggaacctagtattcaggaaataatgagcttacttaaaaatggttaggtccccacttgtctaggcaagttaaaactgcaggcattagaggtgtgtgagcaagaatcctctctccccctcaggatgcccaggtttcagaggaatccatgcttgcttggttgtagtttctaagcacgatgtcctgaaagtctggcg

SEQ ID NO: 300081 - DNA, 2399 bp, Homo sapiens
tattgagttcttcaaacattgtagcctctttatggtctctgagaaataactaccttaaacccataatctttaatacttcctaaactttcttaataagagaagctctattcctgacactacctctcatttgcaaggtcaaatcatcattagttttgtagtctattaactgggtttgcttaggtcaggcattattattactaaccttattgttaatattctaaccataagaattaaactattaatggtgaatagagtttttcactttaacataggcctatcccactggtgggatacgagccaattcgaaagaaaagtcagtcatgtgcttttcagaggatgaaagcttaagataaagactaaaagtgtttgatgctggaggtgggagtggtattatataggtctcagccaagacatgtgataatcactgtagtagtagctggaaagagaaatctgtgactccaattagccagttcctgcagaccttgtgaggactagaggaagaatgctcctggctgttttgtactgcctgctgtggagtttccagacctccgctggccatttccctagagcctgtgtctcctctaagaacctgatggagaaggaatgctgtccaccgtggagcggggacaggagtccctgtggccagctttcaggcagaggttcctgtcagaatatccttctgtccaatgcaccacttgggcctcaatttcccttcacaggggtggatgaccgggagtcgtggccttccgtcttttataataggacctgccagtgctctggcaacttcatgggattcaactgtggaaactgcaagtttggcttttggggaccaaactgcacagagagacgactcttggtgagaagaaacatcttcgatttgagtgccccagagaaggacaaattttttgcctacctcactttagcaaagcataccatcagctcagactatgtcatccccatagggacctatggccaaatgaaaaatggatcaacacccatgtttaacgacatcaatatttatgacctctttgtctggatgcattattatgtgtcaatggatgcactgcttgggggatctgaaatctggagagacattgattttgcccatgaagcaccagcttttctgccttggcatagactcttcttgttgcggtgggaacaagaaatccagaagctgacaggagatgaaaacttcactattccatattgggactggcgggatgcagaaaagtgtgacatttgcacagatgagtacatgggaggtcagcaccccacaaatcctaacttactcagcccagcatcattcttctcctcttggcagattgtctgtagccgattggaggagtacaacagccatcagtctttatgcaatggaacgcccgagggacctttacggcgtaatcctggaaaccatgacaaatccagaaccccaaggctcccctcttcagctgatgtagaattttgcctgagtttgacccaatatgaatctggttccatggataaagctgccaatttcagctttagaaatacactggaaggatttgctagtccacttactgggatagcggatgcctctcaaagcagcatgcacaatgccttgcacatctatatgaatggaacaatgtcccaggtacagggatctgccaacgatcctatcttccttcttcaccatgcatttgttgacagtatttttgagcagtggctccgaaggcaccgtcctcttcaagaagtttatccagaagccaatgcacccattggacataaccgggaatcctacatggttccttttataccactgtacagaaatggtgatttctttatttcatccaaagatctgggctatgactatagctatctacaagattcagacccagactcttttcaagactacattaagtcctatttggaacaagcgagtcggatctggtcatggctccttggggcggcgatggtaggggccgtcctcactgccctgctggcagggcttgtgagcttgctgtgtcgtcacaagagaaagcagcttcctgaagaaaagcagccactcctcatggagaaagaggattaccacagcttgtatcagagccatttataaaaggcttaggcaatagagtagggccaaaaagcctgacctcactctaactcaaagtaatgtccaggttcccagagaatatctgctggtatttttctgtaaagaccatttgcaaaattgtaacctaatacaaagtgtagccttcttccaactcaggtagaacacacctgtctttgtcttgctgttttcactcagcccttttaacattttcccctaagcccatatgtctaaggaaaggatgctatttggtaatgaggaactgttatttgtatgtgaattaaagtgctcttattttaaaaaattgaaataa

SEQ ID NO: 300082 - DNA, 230 bp, Homo sapiens
  misc_feature (217)..(217): n is a, c, g, or t
aataaccttttcctctgcagtatttttgagcagtggctccgaaggcaccgtcctcttcaagaagtttatccagaagccaatgcacccattggacataaccgggaatcctacatggttccttttataccactgtacagaaatggtgatttctttatttcatccaaagatctgggctatgactatagctatctacaagattcaggtaaagtttactttntttcagaggaatt

SEQ ID NO: 300083 - DNA, 5255 bp, Homo sapiens
cgcttgtgggccggccttgggggagggggacgcgcacccacagaaggactcagagggcttcacggtaagctgagcagggtcaaggtccacagggagcgggagagggtagtaatccgggaagtcttcctggtggcagtgaattctttgcggggttcggcaggcgcaggatccttggggccgcgcaccctgcagcggcccctcccctcccctcccccctcccacctgtgggaaacgcaggccctgagagaggctccgtcagtgccagcagctggcgccactgcgtcccctgccccggcctcagccagccctgggacctctgcggaggactgatcccgggaagggggccctgtcttcccagggccccggtgcggccgagctgggaagaccttggggagggcaggcctgccacctactgcagccgcggcccccgtccatccgcgagggacaggctgtgcccttggcggcgcccacccgcgacccagatgtgtgtcgcctacccaccctcccccagacccccgtttcctcaggcgctcgccgcctcggggcgcctggcacgcggcagccccgcaaggtaggtccttcattcctcccatttcgcagaggagaaaactgcagtccgggatggctcagtcggcccctccaaagtcgcgcagctggttcgggccgagccccgactgcgagagtgaggcacatggcccctgcagaccgggcctcggagggtcccaggcttgaggacccgtcggcccctcaaccccttggaaaggcaaggagagaagcctgcgctggtagtgagcttccacttctgccctgactgcaacacttaggttagggggctgggaaggacccccaccctcaatttttggataggggtgtatttctctccctcccctaatttctgaggttggttccctgttggattcaggtactgctctccccttccaaccccatttccccagcccatgaggttgggatattagggtcccagacccaagataaagaaccccaaaattctggggttgcagcaaagagttgagagggtcactgagcctgggaagctcatggcggaggtggggctaaggcagaagtttaggaatggaacgctgagctgagctgagctgagctgagctgagctgagctgagcaacgctgggggctatgtgcatggagccctgggggttgggctttatcaggtgggcaacaggcagcccccattcccaagttctctcttttatcccagccttattccttcaccttggatgcctgggaactttttgtacccattgtagggaaggggacactgaggggcagagcggtgccgggttgacttggctggggtggtgggaataggagtagggtcttacctatctctgccttcccacctgtgcccacagtgcccccctggcttagtcatggcgaagctggagacgctgcctgtgcgcgctgacccagggcgggaccctctcctggcctttgccccacggccctccgagcttggacccccggacccccgcctggccatgggcagcgtgggcagtggggtggcccatgcccaggagtttgccatgaagagcgtgggtacccgcacagggggtgggggcagccagggcagtttccctggcccccgaggcagtggcagtggggccagcagggagaggccgggccgctacccctcagaggacaagggtctcgccaactccctctacctcaatggtgagctgcggggcagtgaccacaccgatgtctgtggcaacgtggttggcagcagcggaggcagcagcagcagtggtggcagtgacaaagccccaccgcagtatcgtgagcccagccacccacccaagctcctggccacctctggcaagctagaccagtgctcagaaccactagttcggccgtcggccttcaagcctgtcgtacccaagaatttccactccatgcagaatttgtgccccccgcagaccaatgggactcctgagggacggcagggccctggtggcctcaaaggcggactggacaagtctcggaccatgactccagcgggtgggagtgggagtggcctctcagactcaggccggaactccctcacaagcctgcccacctacagctccagctacagccagcacctggcacccctcagtgcctccaccagccacattaaccgcattggcactgccagctatggtagtggtagtggcggcagcagcggtggggggtcgggctaccaggacctggggacctccgatagtggacgggcctccagcaagagtgggtcgtcgtcatctatggggcggccaggccacctgggctctggggagggcggaggtggaggcctgcctttcgcggcctgctcaccgccctcccccagtgcactcatccaggagctggaggagcggctgtgggagaaggagcaggaggtggcagctctgcggcgcagcctggagcagagcgaggcggctgtggcccaggtactggaggagcggcagaaggcgtgggagcgggagctggccgagctgcggcagggctgcagcgggaagctacagcaggtggcccgacgtgcccagcgcgcccagcagggcctacagctgcaggtgttgcggctgcagcaggacaagaagcagctgcaggaggaggcggcccggctgatgcggcagcgggaagagctggaggacaaggtggccgcctgccagaaggagcaggccgacttcctgccccggatagaggaaactaagtgggaggtgtgccagaaggctggcgagatctccctcctgaagcagcagctgaaggactcgcaggcggatgtgtcgcagaagttgagtgagatcgtgggactgcgctcgcagctgcgggagggccgggcttcgctgcgggagaaggaggagcagctgctcagcctgcgggactccttcagcagcaagcaggccagcctggagctgggcgaaggcgagctgcctgccgcctgcctcaagccggcgctgacccccgtggacccggccgagccacaggatgctctggccacctgcgagagcgacgaggctaagatgcgccgtcaggccggggtggccgctgccgcctccttggtttccgtggacggggaggcggaggctggcggggagagcgggacgcgggccctgcggcgggaggtggggcggctgcaggccgagctggcggctgagcggcgggcccgggagcgccagggtgccagcttcgccgaggagcgccgcgtgtggctggaggagaaggagaaggtgatcgagtaccagaagcagctgcagctgagctacgtggagatgtaccagcgcaaccagcagctggagcgcaggctgcgggagcgcggggccgcagggggtgcaagcacgcccactccccagcatggcgaggagaagaaggcctggaccccctcccgcctcgagcgcattgagtccacagaaatctgatcgacctgggcactcggcattttgacacatgtcctgtcaaaaggccagagtccccagtgtcccctcccctccatctctcttccccatagaccccataaccccagaccaaagaggttctctaagcagctgtgaccaggttcctccctccccacctgccctcctagctccagcactgcccccgtggcagcccacttggacccccctaaaaggagggaataggaggagggcagggtgagtgggggcaatcctaggtggtgggggagtcatgctccctttctcggcacccccttgttggagatggaggcagcagacgtgcagtgccataaggtgccccagtccttctggaggcctgggctgctactgttggccaccctgtgtctagtgatgctctctgtgctcacctcctaggccatggagcctgagggggcctgcaccgggtttgctgaaactgacagagcctgggctccagacctctctccctcctacagtgctctccctccctgggcagattggcaggacaagtgggagcagatggcctgcctttggctgagagggctacctgcccagcccctcccccaacaagatctcttggactcaggcctcagagcctggcctggttgtgagtgtgtgtccctgtgtgtgtgttgcgggaggggaggactggggctggaagtccagcacccagggaagatctgtcctcctgttcttgggaagcgttgcctgacggcttctcggctctaccctcacccttctggccaggatcccgcagggcaacagccccatctgcttggctgaccccacacccaggaccactgtccggctctaacacagctattaagtgctacctgcctctcaggcactctcctcgcccagtttctgaggtcagacgagtgtctgcgatgtcttcccgcactctattcccccagcctctttctgctttcatgctcagcacatcatcttcctaggcagtctcttccccaaagtctcaccttttcttccaatagaaaattccgcttgacctttggtgcactgcccacttcccagctccactggcccaagtctgagccggaggcccttgttttgggggcggggggagagttggatgtgattgcccttgaagaacaaggctgacctgagaggttcctggcgccctgaggtggctcagcacctgcccagggtaggcctggcatgaggggttaggtcagccaatgtcagctgcttctcttggggccctctcagagtctatctccccaagacaggaagggaaaagcaaatttctaattcaccagcaataaaaattggaggaggcttggccctcagcccttatatctctctctttttcactctcttcctcccacccccaagactgagttttggggggcaaggtggagagagctggcaactactgtgagcaagtcccctagcccctgaccagcctcctcccatgactggtgactgtttaatgagctgtgcatcccccacaaaaacatgagtgcccctctgtgtggcctctaaccctctgcacagcccttctgggtggtcctcaccaggtctctgagctgggtgggaggccatcctggcgaccactgcccattccattcacccctcactgtacctgccctagaacctgggcctaggccacaggggcagggagaagagaaggcattagtaagaaaaaaatagaaaaaaatatgaacagactcagctttgggacgtccaaccacaaaagaaattatatataaatatatataaatatatatctctaccatatgtgatggaaagactttttgttttcctttcccaaagaaataaaacggaaaaagcc

SEQ ID NO: 300084 - DNA, 4189 bp, Homo sapiens
cccgcgcagcgcgccccgccgggcgtgcttcgggctgcgccagcaagcggggccggtggcgcccgtgtcggagaccccgcgccggaccctgaggcagcgaaggagaaaactgcagtccgggatggctcagtcggcccctccaaagtcgcgcagctggttcgggccgagccccgactgcgagagtgaggcacatggcccctgcagaccgggcctcggagggtcccaggcttgaggacccgtcggcccctcaaccccttggaaaggcaaggagagaagcctgcgctggtagtgagcttccacttctgccctgactgcaacacttagtgcccccctggcttagtcatggcgaagctggagacgctgcctgtgcgcgctgacccagggcgggaccctctcctggcctttgccccacggccctccgagcttggacccccggacccccgcctggccatgggcagcgtgggcagtggggtggcccatgcccaggagtttgccatgaagagcgtgggtacccgcacagggggtgggggcagccagggcagtttccctggcccccgaggcagtggcagtggggccagcagggagaggccgggccgctacccctcagaggacaagggtctcgccaactccctctacctcaatggtgagctgcggggcagtgaccacaccgatgtctgtggcaacgtggttggcagcagcggaggcagcagcagcagtggtggcagtgacaaagccccaccgcagtatcgtgagcccagccacccacccaagctcctggccacctctggcaagctagaccagtgctcagaaccactagttcggccgtcggccttcaagcctgtcgtacccaagaatttccactccatgcagaatttgtgccccccgcagaccaatgggactcctgagggacggcagggccctggtggcctcaaaggcggactggacaagtctcggaccatgactccagcgggtgggagtgggagtggcctctcagactcaggccggaactccctcacaagcctgcccacctacagctccagctacagccagcacctggcacccctcagtgcctccaccagccacattaaccgcattggcactgccagctatggtagtggtagtggcggcagcagcggtggggggtcgggctaccaggacctggggacctccgatagtggacgggcctccagcaagagtgggtcgtcgtcatctatggggcggccaggccacctgggctctggggagggcggaggtggaggcctgcctttcgcggcctgctcaccgccctcccccagtgcactcatccaggagctggaggagcggctgtgggagaaggagcaggaggtggcagctctgcggcgcagcctggagcagagcgaggcggctgtggcccaggtactggaggagcggcagaaggcgtgggagcgggagctggccgagctgcggcagggctgcagcgggaagctacagcaggtggcccgacgtgcccagcgcgcccagcagggcctacagctgcaggtgttgcggctgcagcaggacaagaagcagctgcaggaggaggcggcccggctgatgcggcagcgggaagagctggaggacaaggtggccgcctgccagaaggagcaggccgacttcctgccccggatagaggaaactaagtgggaggtgtgccagaaggctggcgagatctccctcctgaagcagcagctgaaggactcgcaggcggatgtgtcgcagaagttgagtgagatcgtgggactgcgctcgcagctgcgggagggccgggcttcgctgcgggagaaggaggagcagctgctcagcctgcgggactccttcagcagcaagcaggccagcctggagctgggcgaaggcgagctgcctgccgcctgcctcaagccggcgctgacccccgtggacccggccgagccacaggatgctctggccacctgcgagagcgacgaggctaagatgcgccgtcaggccggggtggccgctgccgcctccttggtttccgtggacggggaggcggaggctggcggggagagcgggacgcgggccctgcggcgggaggtggggcggctgcaggccgagctggcggctgagcggcgggcccgggagcgccagggtgccagcttcgccgaggagcgccgcgtgtggctggaggagaaggagaaggtgatcgagtaccagaagcagctgcagctgagctacgtggagatgtaccagcgcaaccagcagctggagcgcaggctgcgggagcgcggggccgcagggggtgcaagcacgcccactccccagcatggcgaggagaagaaggcctggaccccctcccgcctcgagcgcattgagtccacagaaatctgatcgacctgggcactcggcattttgacacatgtcctgtcaaaaggccagagtccccagtgtcccctcccctccatctctcttccccatagaccccataaccccagaccaaagaggttctctaagcagctgtgaccaggttcctccctccccacctgccctcctagctccagcactgcccccgtggcagcccacttggacccccctaaaaggagggaataggaggagggcagggtgagtgggggcaatcctaggtggtgggggagtcatgctccctttctcggcacccccttgttggagatggaggcagcagacgtgcagtgccataaggtgccccagtccttctggaggcctgggctgctactgttggccaccctgtgtctagtgatgctctctgtgctcacctcctaggccatggagcctgagggggcctgcaccgggtttgctgaaactgacagagcctgggctccagacctctctccctcctacagtgctctccctccctgggcagattggcaggacaagtgggagcagatggcctgcctttggctgagagggctacctgcccagcccctcccccaacaagatctcttggactcaggcctcagagcctggcctggttgtgagtgtgtgtccctgtgtgtgtgttgcgggaggggaggactggggctggaagtccagcacccagggaagatctgtcctcctgttcttgggaagcgttgcctgacggcttctcggctctaccctcacccttctggccaggatcccgcagggcaacagccccatctgcttggctgaccccacacccaggaccactgtccggctctaacacagctattaagtgctacctgcctctcaggcactctcctcgcccagtttctgaggtcagacgagtgtctgcgatgtcttcccgcactctattcccccagcctctttctgctttcatgctcagcacatcatcttcctaggcagtctcttccccaaagtctcaccttttcttccaatagaaaattccgcttgacctttggtgcactgcccacttcccagctccactggcccaagtctgagccggaggcccttgttttgggggcggggggagagttggatgtgattgcccttgaagaacaaggctgacctgagaggttcctggcgccctgaggtggctcagcacctgcccagggtaggcctggcatgaggggttaggtcagccaatgtcagctgcttctcttggggccctctcagagtctatctccccaagacaggaagggaaaagcaaatttctaattcaccagcaataaaaattggaggaggcttggccctcagcccttatatctctctctttttcactctcttcctcccacccccaagactgagttttggggggcaaggtggagagagctggcaactactgtgagcaagtcccctagcccctgaccagcctcctcccatgactggtgactgtttaatgagctgtgcatcccccacaaaaacatgagtgcccctctgtgtggcctctaaccctctgcacagcccttctgggtggtcctcaccaggtctctgagctgggtgggaggccatcctggcgaccactgcccattccattcacccctcactgtacctgccctagaacctgggcctaggccacaggggcagggagaagagaaggcattagtaagaaaaaaatagaaaaaaatatgaacagactcagctttgggacgtccaaccacaaaagaaattatatataaatatatataaatatatatctctaccatatgtgatggaaagactttttgttttcctttcccaaagaaataaaacggaaaaagcc

SEQ ID NO: 300085 - DNA, 3954 bp, Homo sapiens
cccgcgcagcgcgccccgccgggcgtgcttcgggctgcgccagcaagcggggccggtggcgcccgtgtcggagaccccgcgccggaccctgaggcagcgaaggagaaaactgcagtccgggatggctcagtcggcccctccaaagtcgcgcagctggttcgggccgagccccgactgcgagagtgaggcacatggcccctgcagaccgggcctcggagggtcccaggcttgaggacccgtcggcccctcaaccccttggaaaggcaaggagagaagcctgcgctggtagtgagcttccacttctgccctgactgcaacacttagtgcccccctggcttagtcatggcgaagctggagacgctgcctgtgcgcgctgacccagggcgggaccctctcctggcctttgccccacggccctccgagcttggacccccggacccccgcctggccatgggcagcgtgggcagtggggtggcccatgcccaggagtttgccatgaagagcgtgggtacccgcacagggggtgggggcagccagggcagtttccctggcccccgaggcagtggcagtggggccagcagggagaggccgggccgctacccctcagaggacaagggtctcgccaactccctctacctcaatggtgagctgcggggcagtgaccacaccgatgtctgtggcaacgtggttggcagcagcggaggcagcagcagcagtggtggcagtgacaaagccccaccgcagtatcgtgagcccagccacccacccaagctcctggccacctctggcaagctagaccagtgctcagaaccactagttcggccgtcggccttcaagcctgtcgtacccaagaatttccactccatgcagaatttgtgccccccgcagaccaatgggactcctgagggacggcagggccctggtggcctcaaaggcggactggacaagtctcggaccatgactccagcgggtgggagtgggagtggcctctcagactcaggccggaactccctcacaagcctgcccacctacagctccagctacagccagcacctggcacccctcagtgcctccaccagccacattaaccgcattggcactgccagctatggtagtggtagtggcggcagcagcggtggggggtcgggctaccaggacctggggacctccgatagtggacgggcctccagcaagagtgggtcgtcgtcatctatggggcggccaggccacctgggctctggggagggcggaggtggaggcctgcctttcgcggcctgctcaccgccctcccccagtgcactcatccaggagctggaggagcggctgtgggagaaggagcaggaggtggcagctctgcggcgcagcctggagcagagcgaggcggctgtggcccaggtactggaggagcggcagaaggcgtgggagcgggagctggccgagctgcggcagggctgcagcgggaagctacagcaggtggcccgacgtgcccagcgcgcccagcagggcctacagctgcaggtgttgcggctgcagcaggacaagaagcagctgcaggaggaggcggcccggctgatgcggcagcgggaagagctggaggacaaggtggccgcctgccagaaggagcaggccgacttcctgccccggatagaggaaactaagtgggaggtgtgccagaaggctggcgagatctccctcctgaagcagcagctgaaggactcgcaggcggatgtgtcgcagaagttgagtgagatcgtgggactgcgctcgcagctgcgggagggccgggcttcgctgcgggagaaggaggagcagctgctcagcctgcgggactccttcagcagcaagcaggccagcctggagctgggcgaaggcgagctgcctgccgcctgcctcaagccggcgctgacccccgtggacccggccgagccacaggatgctctggccacctgcgagagcgacgaggctaagatgcgccgtcaggccggggtggccgctgccgcctccttggtttccgtggacggggaggcggaggctggcggggagagcgggacgcgggccctgcggcgggaggtggggcggctgcaggccgagctggcggctgagcggcgggcccgggagcgccagggtgccagcttcgccgaggagcgccgcgtgtggctggaggagaaggagaaggtgatcgagtaccagaagcagctgcagctgagctacgtggagatgtaccagcgcaaccagcagctggagcgcaggctgcgggagcgcggggccgcagggggtgcaagcacgcccactccccagcatggcgaggagaagaaggcctggaccccctcccgcctcgagcgcattgagtccacagaaatctgatcgacctgggcactcggcattttgacacatgtcctgtcaaaaggccagagtccccagtgtcccctcccctccatctctcttccccatagaccccataaccccagaccaaagaggttctctaagcagctgtgaccaggttcctccctccccacctgccctcctagctccagcactgcccccgtggcagcccacttggacccccctaaaaggagggaataggaggagggcagggtgagtgggggcaatcctaggtggtgggggagtcatgctccctttctcggcacccccttgttggagatggaggcagcagacgtgcagtgccataaggtgccccagtccttctggaggcctgggctgctactgttggccaccctgtgtctagtgatgctctctgtgctcacctcctaggccatggagcctgagggggcctgcaccgggtttgctgaaactgacagagcctgggctccagacctctctccctcctacagtgctctccctccctgggcagattggcaggacaagtgggagcagatggcctgcctttggctgagagggctacctgcccagcccctcccccaacaagatctcttggactcaggcctcagagcctggcctggttgtgagtgtgtgtccctgtgtgtgtgttgcgggaggggaggactggggctggaagtccagcacccagggaagatctgtcctcctgttcttgggaagcgttgcctgacggcttctcggctctaccctcacccttctggccaggatcccgcagggcaacagccccatctgcttggctgaccccacacccaggaccactgtccggctctaacacagctattaagtgctacctgcctctcaggcactctcctcgcccagtttctgaggtcagacgagtgtctgcgatgtcttcccgcactctattcccccagcctctttctgctttcatgctcagcacatcatcttcctaggcagtctcttccccaaagtctcaccttttcttccaatagaaaattccgcttgacctttggtgcactgcccacttcccagctccactggcccaagtctgagccggaggcccttgttttgggggcggggggagagttggatgtgattgcccttgaagaacaaggctgacctgagaggttcctggcgccctgaggtggctcagcacctgcccagggtaggcctggcatgaggggttaggtcagccaatgtcagctgcttctcttggggccctctcagagtctatctccccaagacaggaagggaaaagcaaatttctaattcaccagcaataaaaattggaggaggcttggccctcagcccttatatctctctctttttcactctcttcctcccacccccaagactgagttttggggggcaaggtggagagagctggcaactactgtgagcaaggagaagagaaggcattagtaagaaaaaaatagaaaaaaatatgaacagactcagctttgggacgtccaaccacaaaagaaattatatataaatatatataaatatatatctctaccatatgtgatggaaagactttttgttttcctttcccaaagaaataaaacggaaaaagcc

SEQ ID NO: 300086 - DNA, 182 bp, Homo sapiens
ctcataacacttactagagttatgggtcaatttctaagcttataccacctgaggaagataaagaactaaaaatccttggtttataaagggcttttggtttttaaaattcactaacaaatatgcaaagcttaaaggtttgtgggaattatttttcagaaggaaaaaattacttaagcccccca

SEQ ID NO: 300087 - DNA, 2556 bp, Homo sapiens
agcggggtcttacgtttcgcccccggcagcgccgacagcggacccaagatggcgaccgagttggagtacgagtctgtgctgtgtgtgaagccagacgtcagcgtctaccggattccgccccgggcctccaaccgcggttacagggcctctgactggaaattagaccagcctgattggactggtcgcctccgaatcacttcaaaagggaagactgcctatatcaaactcgaggataaagtttcaggggagctctttgctcaggcaccagtagaacaatatcctggtattgctgtggagacggtgacagattctagccgctactttgtaatccggatccaggatggtactgggcgcagtgctttcattggcattggcttcacagatcggggagatgccttcgactttaatgtctccttgcaggatcacttcaagtgggtaaagcaggaatctgagatttccaaggaatctcaagaaatggatgctcgtcctaagttggatctgggcttcaaggaaggacaaaccatcaagttgtgtatcgggaacattacaaacaagaaaggaggtgcttctaagcccaggactgcaaggggtgggggtctgagcttactcccacccccgccaggaggcaaagtcactattcccccaccatcctcctcagttgccatcagcaatcatgtcaccccaccacccattccgaaatctaaccatggaggcagtgatgcagatatccttttagatttggattctcctgctcctgtcacgacaccagcaccaactccagtttctgtaagcaatgacttgtggggagacttcagcactgcctccagctctgttccaaaccaggcaccacagccatccaactgggtccagttctgaatggcattggcaggacattaaggacagacttgaggaataaaaatgaccttgagggcaccaatctgtgagggaagttaggaacccatttcctccccagaaccagaatgactggacaatctttttcatagcttctccatcacattcaagctggtttatgtcactcccctgtgttgttacttgtacagccaagaaagtatctgttatctcctgcgtagtaccaaggtaggggactagtggatcttatcatagttttggctgactatgcagggcttaaaaggccagcgtctgtttgagggggaatgacctctaacatctgtaaaatttgtctcatcttttaatttctttaacttatttcaaaatcatctcatgacccttgtgtgcctctttgtgaagccctatttagcaatttcaggggagtcaaaaaccttgcaacttccttctccactaacccaggactaaaaatggacaggctgacctcagtgtttacaaattcagaattttgataggggtagatatggagaaagacctatttcctgggtctctgctgtgtagtctccttcaggcttattgtgctcagtgaacatccagtgctgggtgcagctccatcaccctcttgtgtgtttacatgtctctttctatgataagagggttgtgttggtggcacctccactactcttttctgtttgttgagtttgaattgtgtaacatctttgatcagtgggtgtatctgtaatgaaggaggttcaagaggctgtgctttccaagtgatagtctataggagtgtttaatttcttgcagctccatctggttgctgcatttgaagcatggcattaatttgtatttgccctgttctttgacctaaagttgaagggtttagagtttttaacctgatctgtagagcagagaggttgaaagcacttaactcttgtttagtatcctcattgccttgctgcctgggtatctggcccctttccataaacatttcttttcagttcatgtagttctttaatagaaagctgctattatgtatattgtcatttgtgaaggaagttggagagtcacagctttactgtgacaggttttgcccaaggctttgatacctgtcacccagggtatcttaaaagcaagttgttctcccactactttcctttccctctgccctgccattcctattacaatgctgtgaaaaaagttctgcttcttaggtgaatgggtactttctattttgtttctaaacgagcaattttgaggatgaaatgggaagatatcattgcttcctttttgcacctattgggtatgtacactctggccgaagggagtccttatgtttagtttcaaaatatattactttcctggattctcttcttcactttttctgactttgggtccattttcttttcattgcctccttttccaggcagctctattcttgcagagccatagcaggacatgttaaaattccaatagaaaacactaaaaggaaagtctgtggaatcactagtgactaaatactgggaacctattttctcaatcttcctccatgttgtgttctttgtattcttgagatgataatatattatgtatttgaattcctgaaaaatggaaaatgtttaagatatatgtatataaagtgtatgctgtattggtgcaataatggtaattaaaaatatgaaaaaagtg

SEQ ID NO: 300088 - DNA, 2474 bp, Homo sapiens
agcggggtcttacgtttcgcccccggcagcgccgacagcggacccaagatggcgaccgagttggagtacgagtctgtgctgtgtgtgaagccagacgtcagcgtctaccggattccgccccgggcctccaaccgcggttacagggcctctgactggaaattagaccagcctgattggactggtcgcctccgaatcacttcaaaagggaagactgcctatatcaaactcgaggataaagtttcaggggagctctttgctcaggcaccagtagaacaatatcctggtattgctgtggagacggtgacagattctagccgctactttgtaatccggatccaggatggtactggtgggtaaagcaggaatctgagatttccaaggaatctcaagaaatggatgctcgtcctaagttggatctgggcttcaaggaaggacaaaccatcaagttgtgtatcgggaacattacaaacaagaaaggaggtgcttctaagcccaggactgcaaggggtgggggtctgagcttactcccacccccgccaggaggcaaagtcactattcccccaccatcctcctcagttgccatcagcaatcatgtcaccccaccacccattccgaaatctaaccatggaggcagtgatgcagatatccttttagatttggattctcctgctcctgtcacgacaccagcaccaactccagtttctgtaagcaatgacttgtggggagacttcagcactgcctccagctctgttccaaaccaggcaccacagccatccaactgggtccagttctgaatggcattggcaggacattaaggacagacttgaggaataaaaatgaccttgagggcaccaatctgtgagggaagttaggaacccatttcctccccagaaccagaatgactggacaatctttttcatagcttctccatcacattcaagctggtttatgtcactcccctgtgttgttacttgtacagccaagaaagtatctgttatctcctgcgtagtaccaaggtaggggactagtggatcttatcatagttttggctgactatgcagggcttaaaaggccagcgtctgtttgagggggaatgacctctaacatctgtaaaatttgtctcatcttttaatttctttaacttatttcaaaatcatctcatgacccttgtgtgcctctttgtgaagccctatttagcaatttcaggggagtcaaaaaccttgcaacttccttctccactaacccaggactaaaaatggacaggctgacctcagtgtttacaaattcagaattttgataggggtagatatggagaaagacctatttcctgggtctctgctgtgtagtctccttcaggcttattgtgctcagtgaacatccagtgctgggtgcagctccatcaccctcttgtgtgtttacatgtctctttctatgataagagggttgtgttggtggcacctccactactcttttctgtttgttgagtttgaattgtgtaacatctttgatcagtgggtgtatctgtaatgaaggaggttcaagaggctgtgctttccaagtgatagtctataggagtgtttaatttcttgcagctccatctggttgctgcatttgaagcatggcattaatttgtatttgccctgttctttgacctaaagttgaagggtttagagtttttaacctgatctgtagagcagagaggttgaaagcacttaactcttgtttagtatcctcattgccttgctgcctgggtatctggcccctttccataaacatttcttttcagttcatgtagttctttaatagaaagctgctattatgtatattgtcatttgtgaaggaagttggagagtcacagctttactgtgacaggttttgcccaaggctttgatacctgtcacccagggtatcttaaaagcaagttgttctcccactactttcctttccctctgccctgccattcctattacaatgctgtgaaaaaagttctgcttcttaggtgaatgggtactttctattttgtttctaaacgagcaattttgaggatgaaatgggaagatatcattgcttcctttttgcacctattgggtatgtacactctggccgaagggagtccttatgtttagtttcaaaatatattactttcctggattctcttcttcactttttctgactttgggtccattttcttttcattgcctccttttccaggcagctctattcttgcagagccatagcaggacatgttaaaattccaatagaaaacactaaaaggaaagtctgtggaatcactagtgactaaatactgggaacctattttctcaatcttcctccatgttgtgttctttgtattcttgagatgataatatattatgtatttgaattcctgaaaaatggaaaatgtttaagatatatgtatataaagtgtatgctgtattggtgcaataatggtaattaaaaatatgaaaaaagtg

SEQ ID NO: 300089 - DNA, 415 bp, Homo sapiens
ttcggatcacgttggatccgaattcggatcaacgtacactctggccgaagggagtccttatgtttagtttcaaaatatattactttcctggattctcttcttcactttttctgactttgggtccattttcttttcattgcctccttttccaggcagctctattcttgcagagccatagcaggacatgttaaaattccaatagaaaacactaaaaggaaagtctgtggaatcactagtgactaaatactgggaacctattttctcaatcttcctccatgttgtgttctttgtattcttgagatgataatatattatgtatttgaattcctgaaaaatggaaaatgtttaagatatatgtatataaagtgtatgctgtattggtgcaataatggtaattaaaaatatgaaaaaagtg

SEQ ID NO: 300090 - DNA, 517 bp, Homo sapiens
agcggggtcttacgtttcgcccccggcagcgccgacagcggacccaagatggcgaccgagttggagtacgagtctgtgctgtgtgtgaagccagacgtcagcgtctaccggattccgccccgggcctccaaccgcggttacagggcctctgactggaaattagaccagcctgattggactggtcgcctccgaatcacttcaaaagggaagactgcctatatcaaactcgaggataaagtttcaggggagctctttgctcaggcaccagtagaacaatatcctggtattgctgtggagacggtgacagattctagccgctactttgtaatccggatccaggatggtactggtaagagaactgggattttgagtggaacgaagttaggaaaacaggtgaatgcacagccatgaaaagtgtttccgattgcatttatctttctttggtttacttcattttttcttccctttctctaaagttgctctagttgctaaaggaaaagtattaacatgttatttg

SEQ ID NO: 300091 - DNA, 2663 bp, Homo sapiens
agcggggtcttacgtttcgcccccggcagcgccgacagcggacccaagatggcgaccgagttggagtacgagtctgtgctgtgtgtgaagccagacgtcagcgtctaccggattccgccccgggcctccaaccgcggttacagggcctctgactggaaattagaccagcctgattggactggtcgcctccgaatcacttcaaaagggaagactgcctatatcaaactcgaggataaagtttcaggggagctctttgctcaggcaccagtagaacaatatcctggtattgctgtggagacggtgacagattctagccgctactttgtaatccggatccaggatggtactgggcgcagtgctttcattggcattggcttcacagatcggggagatgccttcgactttaatgtctccttgcaggatcacttcaagtgggtaaagcaggaatctgagatttccaaggaatctcaagaaatggatgctcgtcctaagttggatctgggcttcaaggaaggacaaaccatcaagttgtgtatcgggaacattacaaacaagaaaggaggtgcttctaagcccaggactgcaaggggtgggggtctgagcttactcccacccccgccaggaggcaaagtcactattcccccaccatcctcctcagttgccatcagcaatcatgtcaccccaccacccattccgaaatctaaccatggaggcagtgatgcagatatccttttagatttggattctcctgctcctgtcacgacaccagcaccaactccagtttctgtaagcaatgacttgtggggagacttcagcactgcctccagctctgttccaaaccaggcaccacagccatccaactgggtccagttctgaatggcattggcaggacattaaggacagacttgaggaataaaaatgaccttgagggcaccaatctgtgagggaagttaggaacccatttcctccccagaaccagaatgactggacaatctttttcatagcttctccatcacattcaagctggtttatgtcactcccctgtgttgttacttgtacagccaagaaagtatctgttatctcctgcgtagtaccaaggtaggggactagtggatcttatcatagttttggctgactatgcagggcttaaaaggccagcgtctgtttgagggggaatgacctctaacatctgtaaaatttgtctcatcttttaatttctttaacttatttcaaaatcatctcatgacccttgtgtgcctctttgtgaagccctatttagcaatttcaggggagtcaaaaaccttgcaacttccttctccactaacccaggactaaaaatggacaggctgacctcagtgtttacaaattcagaattttgataggggtagatatggagaaagacctatttcctgggtctctgctgtgtagtctccttcaggcttattgtgctcagtgaacatccagtgctgggtgcagctccatcaccctcttgtgtgtttacatgtctctttctatgataagagggttgtgttggtggcacctccactactcttttctgtttgttgagtttgaattgtgtaacatctttgatcagtgggtgtatctgtaatgaaggaggttcaagaggctgtgctttccaagtgatagtctataggagtgtttaatttcttgcagctccatctggttgctgcatttgaagcatggcattaatttgtatttgccctgttctttgacctaaagttgaagggtttagagtttttaacctgatctgtagagcagagaggttgaaagcacttaactcttgtttagtatcctcattgccttgctgcctgggtatctggcccctttccataaacatttcttttcagttcatgtagttctttaatagaaagctgctattatgtatattgtcatttgtgaaggaagttggagagtcacagctttactgtgacaggttttgcccaaggctttgatacctgtcacccagggtatcttaaaagcaagttgttctcccactactttcctttccctctgccctgccattcctattacaatgctgtgaaaaaagttctgcttcttaggtgaatgggtactttctattttgtttctaaacgagcaattttgaggatgaaatgggaagatatcattgcttcctttttgcacctattgggtatgtacactctggccgaagggagtccttatgtttagtttcaaaatatattactttcctggattctcttcttcactttttctgactttgggtccattttcttttcattgcctccttttccaggcagctctattcttgcagagccatagcaggacatgttaaaattccaatagaaaacactaaaaggaaagtctgtggaatcactagtgactaaatactgggaacctattttctcaatcttcctccatgttgtgttctttgtattcttgagatgataatatattatgtatttgaattcctgaaaaatggaaaatgtttaagatatatgtatataaagtgtatgctgtattggtgcaataatggtaattaaaaatatgaaaaaagtgtctcttttatcttttaatttgcttatttgattaccttttaaatttaattgaccaaatataagtggaccagtagttaataaaggatatttatatcactctttattaag

SEQ ID NO: 300092 - DNA, 2476 bp, Homo sapiens
agcggggtcttacgtttcgcccccggcagcgccgacagcggacccaagatggcgaccgagttggagtacgagtctgtgctgtgtgtgaagccagacgtcagcgtctaccggattccgccccgggcctccaaccgcggttacagggcctctgactggaaattagaccagcctgattggactggtcgcctccgaatcacttcaaaagggaagactgcctatatcaaactcgaggataaagtttcaggggagctctttgctcaggcaccagtagaacaatatcctggtattgctgtggagacggtgacagattctagccgctactttgtaatccggatccaggatggtactgggcgcagtgctttcattggcattggcttcacagatcggggagatgccttcgactttaatgtctccttgcaggatcacttcaagtgggtaaagcaggaatctgagatttccaaggaatctcaagaaatggatgctcgtcctaagttggatctgggcttcaaggaaggacaaaccatcaagttgtgtatcgggaacattacaaacaagaaaggaggtgcttctaagcccaggactgcaaggggtgggggtctgagcttactcccacccccgccaggaggcaaagtcactattcccccaccatcctcctcagttgccatcagcaatcatgtcaccccaccacccattccgaaatctaaccatggaggcagtgatgcagatatccttttagatttggattctcctgctcctgtcacgacaaccacagccatccaactgggtccagttctgaatggcattggcaggacattaaggacagacttgaggaataaaaatgaccttgagggcaccaatctgtgagggaagttaggaacccatttcctccccagaaccagaatgactggacaatctttttcatagcttctccatcacattcaagctggtttatgtcactcccctgtgttgttacttgtacagccaagaaagtatctgttatctcctgcgtagtaccaaggtaggggactagtggatcttatcatagttttggctgactatgcagggcttaaaaggccagcgtctgtttgagggggaatgacctctaacatctgtaaaatttgtctcatcttttaatttctttaacttatttcaaaatcatctcatgacccttgtgtgcctctttgtgaagccctatttagcaatttcaggggagtcaaaaaccttgcaacttccttctccactaacccaggactaaaaatggacaggctgacctcagtgtttacaaattcagaattttgataggggtagatatggagaaagacctatttcctgggtctctgctgtgtagtctccttcaggcttattgtgctcagtgaacatccagtgctgggtgcagctccatcaccctcttgtgtgtttacatgtctctttctatgataagagggttgtgttggtggcacctccactactcttttctgtttgttgagtttgaattgtgtaacatctttgatcagtgggtgtatctgtaatgaaggaggttcaagaggctgtgctttccaagtgatagtctataggagtgtttaatttcttgcagctccatctggttgctgcatttgaagcatggcattaatttgtatttgccctgttctttgacctaaagttgaagggtttagagtttttaacctgatctgtagagcagagaggttgaaagcacttaactcttgtttagtatcctcattgccttgctgcctgggtatctggcccctttccataaacatttcttttcagttcatgtagttctttaatagaaagctgctattatgtatattgtcatttgtgaaggaagttggagagtcacagctttactgtgacaggttttgcccaaggctttgatacctgtcacccagggtatcttaaaagcaagttgttctcccactactttcctttccctctgccctgccattcctattacaatgctgtgaaaaaagttctgcttcttaggtgaatgggtactttctattttgtttctaaacgagcaattttgaggatgaaatgggaagatatcattgcttcctttttgcacctattgggtatgtacactctggccgaagggagtccttatgtttagtttcaaaatatattactttcctggattctcttcttcactttttctgactttgggtccattttcttttcattgcctccttttccaggcagctctattcttgcagagccatagcaggacatgttaaaattccaatagaaaacactaaaaggaaagtctgtggaatcactagtgactaaatactgggaacctattttctcaatcttcctccatgttgtgttctttgtattcttgagatgataatatattatgtatttgaattcctgaaaaatggaaaatgtttaagatatatgtatataaagtgtatgctgtattggtgcaataatggtaattaaaaatatgaaaaaagtg

SEQ ID NO: 300093 - DNA, 2602 bp, Homo sapiens
acacacacacacacacacacacacacacacacacacacctttccagttccccatgcacatttatgggtaatcgtgttgcttgccactctggattatctgatttattttttgtactgttgtcaatttcgtcaccaactgtcatcatccaccattcggtttttccttcagcagttttaccagtgagcaaagggcctctgactggaaattagaccagcctgattggactggtcgcctccgaatcacttcaaaagggaagactgcctatatcaaactcgaggataaagtttcaggggagctctttgctcaggcaccagtagaacaatatcctggtattgctgtggagacggtgacagattctagccgctactttgtaatccggatccaggatggtactgggcgcagtgctttcattggcattggcttcacagatcggggagatgccttcgactttaatgtctccttgcaggatcacttcaagtgggtaaagcaggaatctgagatttccaaggaatctcaagaaatggatgctcgtcctaagttggatctgggcttcaaggaaggacaaaccatcaagttgtgtatcgggaacattacaaacaagaaaggaggtgcttctaagcccaggactgcaaggggtgggggtctgagcttactcccacccccgccaggaggcaaagtcactattcccccaccatcctcctcagttgccatcagcaatcatgtcaccccaccacccattccgaaatctaaccatggaggcagtgatgcagatatccttttagatttggattctcctgctcctgtcacgacaccagcaccaactccagtttctgtaagcaatgacttgtggggagacttcagcactgcctccagctctgttccaaaccaggcaccacagccatccaactgggtccagttctgaatggcattggcaggacattaaggacagacttgaggaataaaaatgaccttgagggcaccaatctgtgagggaagttaggaacccatttcctccccagaaccagaatgactggacaatctttttcatagcttctccatcacattcaagctggtttatgtcactcccctgtgttgttacttgtacagccaagaaagtatctgttatctcctgcgtagtaccaaggtaggggactagtggatcttatcatagttttggctgactatgcagggcttaaaaggccagcgtctgtttgagggggaatgacctctaacatctgtaaaatttgtctcatcttttaatttctttaacttatttcaaaatcatctcatgacccttgtgtgcctctttgtgaagccctatttagcaatttcaggggagtcaaaaaccttgcaacttccttctccactaacccaggactaaaaatggacaggctgacctcagtgtttacaaattcagaattttgataggggtagatatggagaaagacctatttcctgggtctctgctgtgtagtctccttcaggcttattgtgctcagtgaacatccagtgctgggtgcagctccatcaccctcttgtgtgtttacatgtctctttctatgataagagggttgtgttggtggcacctccactactcttttctgtttgttgagtttgaattgtgtaacatctttgatcagtgggtgtatctgtaatgaaggaggttcaagaggctgtgctttccaagtgatagtctataggagtgtttaatttcttgcagctccatctggttgctgcatttgaagcatggcattaatttgtatttgccctgttctttgacctaaagttgaagggtttagagtttttaacctgatctgtagagcagagaggttgaaagcacttaactcttgtttagtatcctcattgccttgctgcctgggtatctggcccctttccataaacatttcttttcagttcatgtagttctttaatagaaagctgctattatgtatattgtcatttgtgaaggaagttggagagtcacagctttactgtgacaggttttgcccaaggctttgatacctgtcacccagggtatcttaaaagcaagttgttctcccactactttcctttccctctgccctgccattcctattacaatgctgtgaaaaaagttctgcttcttaggtgaatgggtactttctattttgtttctaaacgagcaattttgaggatgaaatgggaagatatcattgcttcctttttgcacctattgggtatgtacactctggccgaagggagtccttatgtttagtttcaaaatatattactttcctggattctcttcttcactttttctgactttgggtccattttcttttcattgcctccttttccaggcagctctattcttgcagagccatagcaggacatgttaaaattccaatagaaaacactaaaaggaaagtctgtggaatcactagtgactaaatactgggaacctattttctcaatcttcctccatgttgtgttctttgtattcttgagatgataatatattatgtatttgaattcctgaaaaatggaaaatgtttaagatatatgtatataaagtgtatgctgtattggtgcaataatggtaattaaaaatatgaaaaaagtg

SEQ ID NO: 300094 - DNA, 2508 bp, Homo sapiens
agcggggtcttacgtttcgcccccggcagcgccgacagcggacccaagatggcgaccgagttggagtacgagtctgtgctgtgtgtgaagccagacgtcagcgtctaccggattccgccccgggcctccaaccgcggttacagggcctctgactggaaattagaccagcctgattggactggtcgcctccgaatcagggagctctttgctcaggcaccagtagaacaatatcctggtattgctgtggagacggtgacagattctagccgctactttgtaatccggatccaggatggtactgggcgcagtgctttcattggcattggcttcacagatcggggagatgccttcgactttaatgtctccttgcaggatcacttcaagtgggtaaagcaggaatctgagatttccaaggaatctcaagaaatggatgctcgtcctaagttggatctgggcttcaaggaaggacaaaccatcaagttgtgtatcgggaacattacaaacaagaaaggaggtgcttctaagcccaggactgcaaggggtgggggtctgagcttactcccacccccgccaggaggcaaagtcactattcccccaccatcctcctcagttgccatcagcaatcatgtcaccccaccacccattccgaaatctaaccatggaggcagtgatgcagatatccttttagatttggattctcctgctcctgtcacgacaccagcaccaactccagtttctgtaagcaatgacttgtggggagacttcagcactgcctccagctctgttccaaaccaggcaccacagccatccaactgggtccagttctgaatggcattggcaggacattaaggacagacttgaggaataaaaatgaccttgagggcaccaatctgtgagggaagttaggaacccatttcctccccagaaccagaatgactggacaatctttttcatagcttctccatcacattcaagctggtttatgtcactcccctgtgttgttacttgtacagccaagaaagtatctgttatctcctgcgtagtaccaaggtaggggactagtggatcttatcatagttttggctgactatgcagggcttaaaaggccagcgtctgtttgagggggaatgacctctaacatctgtaaaatttgtctcatcttttaatttctttaacttatttcaaaatcatctcatgacccttgtgtgcctctttgtgaagccctatttagcaatttcaggggagtcaaaaaccttgcaacttccttctccactaacccaggactaaaaatggacaggctgacctcagtgtttacaaattcagaattttgataggggtagatatggagaaagacctatttcctgggtctctgctgtgtagtctccttcaggcttattgtgctcagtgaacatccagtgctgggtgcagctccatcaccctcttgtgtgtttacatgtctctttctatgataagagggttgtgttggtggcacctccactactcttttctgtttgttgagtttgaattgtgtaacatctttgatcagtgggtgtatctgtaatgaaggaggttcaagaggctgtgctttccaagtgatagtctataggagtgtttaatttcttgcagctccatctggttgctgcatttgaagcatggcattaatttgtatttgccctgttctttgacctaaagttgaagggtttagagtttttaacctgatctgtagagcagagaggttgaaagcacttaactcttgtttagtatcctcattgccttgctgcctgggtatctggcccctttccataaacatttcttttcagttcatgtagttctttaatagaaagctgctattatgtatattgtcatttgtgaaggaagttggagagtcacagctttactgtgacaggttttgcccaaggctttgatacctgtcacccagggtatcttaaaagcaagttgttctcccactactttcctttccctctgccctgccattcctattacaatgctgtgaaaaaagttctgcttcttaggtgaatgggtactttctattttgtttctaaacgagcaattttgaggatgaaatgggaagatatcattgcttcctttttgcacctattgggtatgtacactctggccgaagggagtccttatgtttagtttcaaaatatattactttcctggattctcttcttcactttttctgactttgggtccattttcttttcattgcctccttttccaggcagctctattcttgcagagccatagcaggacatgttaaaattccaatagaaaacactaaaaggaaagtctgtggaatcactagtgactaaatactgggaacctattttctcaatcttcctccatgttgtgttctttgtattcttgagatgataatatattatgtatttgaattcctgaaaaatggaaaatgtttaagatatatgtatataaagtgtatgctgtattggtgcaataatggtaattaaaaatatgaaaaaagtg

SEQ ID NO: 300095 - DNA, 975 bp, Homo sapiens
agcggggtcttacgtttcgcccccggcagcgccgacagcggacccaagatggcgaccgagttggagtacgagtctgtgctgtgtgtgaagccagacgtcagcgtctaccggattccgccccgggcctccaaccgcggttacagggcctctgactggaaattagaccagcctgattggactggtcgcctccgaatcacttcaaaagggaagactgcctatatcaaactcgaggataaagtttcaggggagctctttgctcaggcaccagtagaacaatatcctggtattgctgtggagacggtgacagattctagccgctactttgtaatccggatccaggatggtactgggcgcagtgctttcattggcattggcttcacagatcggggagatgccttcgactttaatgtctccttgcaggatcacttcaagtgggtaaagcaggaatctgagatttccaaggaatctcaagaaatggatgctcgtcctaagttggatctgggcttcaaggaaggacaaaccatcaagttgtgtatcgggaacattacaaacaagaaaggaggtgcttctaagcccaggactgcaaggggtgggggtctgagcttactcccacccccgccaggaggcaaagtcactattcccccaccatcctcctcagttgccatcagcaatcatgtcaccccaccacccattccgaaatctaaccatggaggcagtgatgcagatatccttttagatttggattctcctgctcctgtcacgacaccagcaccaactccagtttctgtaagcaatgacttgtggggagacttcagcactgcctccaggtaatgggcatagtgaaactagcatactctcaatcagggtgtaggagatatgtacagtcaattgaaatctttgatctggagaagcaatggatatgcaggtcacatagagtcttttggaagagttctagtgaaggaaatatagtagtgc

SEQ ID NO: 300096 - DNA, 827 bp, Homo sapiens
agcggggtcttacgtttcgcccccggcagcgccgacagcggacccaagatggcgaccgagttggagtacgagtctgtgctgtgtgtgaagccagacgtcagcgtctaccggattccgccccgggcctccaaccgcggttacagggcctctgactggaaattagaccagcctgattggactggtcgcctccgaatcacttcaaaagggaagactgcctatatcaaactcgaggataaagtttcaggggagctctttgctcaggcaccagtagaacaatatcctggtattgctgtggagacggtgacagattctagccgctactttgtaatccggatccaggatggtactgggcgcagtgctttcattggcattggcttcacagatcggggagatgccttcgactttaatgtctccttgcaggatcacttcaactcacttcaagtgagtgaagcttgtccttagttacgaggctgaatgcttataggaatgctgcttctcacatgaatgggcagtatctcttttcctcctggtttctttgtttcttaaactatttcattgtgaatataaatctccccattcacttttgtttccttaggtcatctttgtatctattctgtttcctttccttatagcctgcaatatatttcagatcccttgtgcagtagtttgaaatgatgctctgtcgaatttgccccgtcttttaggtggtagagggaggcctatggtaacagcagggctttatgtggggagtcgtgtgccactcttgttacctatgtagctgacatgttttgtgacttttgcaacatttctttagcccacttgatttt

SEQ ID NO: 300097 - DNA, 840 bp, Homo sapiens
  misc_feature (8)..(8): n is a, c, g, or t
  misc_feature (15)..(15): n is a, c, g, or t
  misc_feature (17)..(17): n is a, c, g, or t
  misc_feature (45)..(45): n is a, c, g, or t
tcatagangatcccncntaaatggctgtcccaaatgctgactccnaagctctggacttattggacaaaatgttgacattcaacccacacaagaggattgaagtagaacaggctctggcccacccatatctggagcagtattacgacccgagtgacgagcccatcgccgaagcaccattcaagttcgacatggaattggatgacttgcctaaggaaaagctcaaagaactaatttttgaagagactgctagattccagccaggatacagatcttaaatttgtcaggacaagggctcagaggactggacgtgctcagacatcggtgttcttcttcccagttcttgacccctggtcctgtctccagcccgtcttggcttatccactttgactcctttgagccgtttggaggggcggtttctggtagttgtggcttttatgctttcaaagaatttcttcagtccagagaattcctcctggcagccctgtgtgtgtcacccattggtgacctgcggcagtatgtacttcagtgcacctactgcttactgttgctttagtcactaattgctttctggtttgaaagatgcagtggttcctccctctcctgaatccttttctacatgatgccctgctgaccatgcagccgcaccagagagagattcttccccaattggctctagtcactggcatctcactttatgatagggaaggctactacctagggcactttaagtcagtgacagccccttatttgcacttcaccttttgatagggaaggctactacctagggcactttaagtcagtgacagccccttatggtcaaaaggtgaagtgcaaataagg

SEQ ID NO: 300098 - DNA, 401 bp, Homo sapiens
agtcctgttgtaaattcagaatctgagcagtggtcattttatgaatcagtaaattactgccttacccataacaactttgactgttaaatgttttgttttcttttaaagcccatcgccgaagcaccattcaagttcgacatggaattggatgacttgcctaaggaaaagctcaaagaactaatttttgaagagactgctagattccagccaggatacagatcttaaatttgtcaggtacctggagtttaatacagtgagctctagcaagggaggcgctgccttttgtttctagaatattatgttcctcaaggtccattattttgtattcttttccaagctccttattggaaggtatttttttaaatttagaattaaaaattatttagaaagttaaatataaa

SEQ ID NO: 300099 - DNA, 11161 bp, Homo sapiens
  misc_feature (6213)..(6213): n is a, c, g, or t
  misc_feature (7151)..(7151): n is a, c, g, or t
  misc_feature (7426)..(7426): n is a, c, g, or t
  misc_feature (10119)..(10119): n is a, c, g, or t
  misc_feature (10357)..(10357): n is a, c, g, or t
  misc_feature (10572)..(10572): n is a, c, g, or t
acataatttctggagccctgtaccaacgtgtggccacatattctgtcaggaaccctgtgtgatcatggtctggatctgcaacacgggccaggccaaagtcacagatcttgagatcacaggtggtgttgagcagcaggcaggcaggcaatcggtccgagtggctgtcggctcttcagctctcccgctcggcgtcttccttcctcctcccggtcagcgtcggcggctgcaccggcggcggcgcagtccctgcgggaggggcgacaagagctgagcggcggccgccgagcgtcgagctcagcgcggcggaggcggcggcggcccggcagccaacatggcggcggcggcggcggcgggcgcgggcccggagatggtccgcgggcaggtgttcgacgtggggccgcgctacaccaacctctcgtacatcggcgagggcgcctacggcatggtgtgctctgcttatgataatgtcaacaaagttcgagtagctatcaagaaaatcagcccctttgagcaccagacctactgccagagaaccctgagggagataaaaatcttactgcgcttcagacatgagaacatcattggaatcaatgacattattcgagcaccaaccatcgagcaaatgaaagatgtatatatagtacaggacctcatggaaacagatctttacaagctcttgaagacacaacacctcagcaatgaccatatctgctattttctctaccagatcctcagagggttaaaatatatccattcagctaacgttctgcaccgtgacctcaagccttccaacctgctgctcaacaccacctgtgatctcaagatctgtgactttggcctggcccgtgttgcagatccagaccatgatcacacagggttcctgacagaatatgtggccacacgttggtacagggctccagaaattatgttgaattccaagggctacaccaagtccattgatatttggtctgtaggctgcattctggcagaaatgctttctaacaggcccatctttccagggaagcattatcttgaccagctgaaccacattttgggtattcttggatccccatcacaagaagacctgaattgtataataaatttaaaagctaggaactatttgctttctcttccacacaaaaataaggtgccatggaacaggctgttcccaaatgctgactccaaagctctggacttattggacaaaatgttgacattcaacccacacaagaggattgaagtagaacaggctctggcccacccatatctggagcagtattacgacccgagtgacgagcccatcgccgaagcaccattcaagttcgacatggaattggatgacttgcctaaggaaaagctcaaagaactaatttttgaagagactgctagattccagccaggatacagatcttaaatttgtcaggacaagggctcagaggactggacgtgctcagacatcggtgttcttcttcccagttcttgacccctggtcctgtctccagcccgtcttggcttatccactttgactcctttgagccgtttggaggggcggtttctggtagttgtggcttttatgctttcaaagaatttcttcagtccagagaattcctcctggcagccctgtgtgtgtcacccattggtgacctgcggcagtatgtacttcagtgcacctactgcttactgttgctttagtcactaattgctttctggtttgaaagatgcagtggttcctccctctcctgaatccttttctacatgatgccctgctgaccatgcagccgcaccagagagagattcttccccaattggctctagtcactggcatctcactttatgatagggaaggctactacctagggcactttaagtcagtgacagccccttatttgcacttcaccttttgaccataactgtttccccagagcaggagcttgtggaaataccttggctgatgttgcagcctgcagcaagtgcttccgtctccggaatccttggggagcacttgtccacgtcttttctcatatcatggtagtcactaacatatataaggtatgtgctattggcccagcttttagaaaatgcagtcatttttctaaataaaaaggaagtactgcacccagcagtgtcactctgtagttactgtggtcacttgtaccatatagaggtgtaacacttgtcaagaagcgttatgtgcagtacttaatgtttgtaagacttacaaaaaaagatttaaagtggcagcttcactcgacatttggtgagagaagtacaaaggttgcagtgctgagctgtgggcggtttctggggatgtcccagggtggaactccacatgctggtgcatatacgcccttgagctacttcaaatgtgggtgtttcagtaaccacgttccatgcctgaggatttagcagagaggaacactgcgtctttaaatgagaaagtatacaattctttttccttctacagcatgtcagcatctcaagttcatttttcaacctacagtataacaatttgtaataaagcctccaggagctcatgacgtgaagcactgttctgtcctcaagtactcaaatatttctgatactgctgagtcagactgtcagaaaaagctagcactaactcgtgtttggagctctatccatattttactgatctctttaagtatttgttcctgccactgtgtactgtggagttgactcggtgttctgtcccagtgcggtgcctcctcttgacttccccactgctctctgtggtgagaaatttgccttgttcaataattactgtaccctcgcatgactgttacagctttctgtgcagagatgactgtccaagtgccacatgcctacgattgaaatgaaaactctattgttacctctgagttgtgttccacggaaaatgctatccagcagatcatttaggaaaaataattctatttttagcttttcatttctcagctgtccttttttcttgtttgatttttgacagcaatggagaatgggttatataaagactgcctgctaatatgaacagaaatgcatttgtaattcatgaaaataaatgtacatcttctatcttcacattcatgttaagattcagtgttgctttcctctggatcagcgtgtctgaatggacagtcaggttcaggttgtgctgaacacagaaatgctcacaggcctcactttgccgcccaggcactggcccagcacttggatttacataagatgagttagaaaggtacttctgtagggtcctttttacctctgctcggcagagaatcgatgctgtcatgttcctttattcacaatcttaggtctcaaatattctgtcaaaccctaacaaagaagccccgacatctcaggttggattccctggttctctctaaagagggcctgcccttgtgccccagaggtgctgctgggcacagccaagagttgggaagggccgccccacagtacgcagtcctcaccacccagcccagggtgctcacgctcaccactcctgtggctgaggaaggatagctggctcatcctcggaaaacagacccacatctctattcttgccctgaaatacgcgcttttcacttgcgtgctcagagctgccgtctgaaggtccacacagcattgacgggacacagaaatgtgactgttaccggataacactgattagtcagttttcatttataaaaaagcattgacagttttattactcttgtttctttttaaatggaaagttactattataaggttaatttgcagtcctcttctaaatagaaaaccatatccttggctactaacatctggagactgtgagctccttcccattccccttcctggtactgtggagtcagattggcatgaaaccactaacttcattctagaatcattgtagccataagttgtgtgctttttattaatcatgccaaacataatgtaactgggcagagaatggtcctaaccaaggtacctatgaaaagcgctagctatcatgtgtagtagatgcatcattttggctcttcttacatttgtaaaaatgtacagattaggtcatcttaattcatattagtgacacggaacagcacctccactatttgtatgttcaaataagctttcagactaatagcttttttggtgtctaaaatgtaagcaaaaaattcctgctgaaacattccagtcctttcatttagtataaaagaaatactgaacaagccagtgggatggaattgaaagaactaatcatgaggactctgtcctgacacaggtcctcaaagctagcagagatacgcagacattgtggcatctgggtagaagaatactgtattgtgtgtgcagtgcacagtgtgtggtgtgtgcacactcattccttctgctcttgggcacaggcagtgggtgtagaggtaaccagtagctttgagaagctacatgtagctcaccagtggttttctctaaggaatcacaaaggtaaactacccaaccacatgccacgtaatatttcagccattcagaggaaactgttttctctttatttgcttatatgttaatatggtttttaaattggtaacttttatatagtatggtaacagtatgttaatacacacatacatatgcacacatgctttgggtccttccataatacttttatatttgtaaatcaatgttttggagcaatcccaagtttaagggaaatatttttgtaaatgtaatggttttgaaaatctgagcaatccttttgcttatacatttttaaagcatttgtgctttaaaattgttatgctggtgtttgaaacatgatactcctgtggtgcagatgagaagctataacagtgaatatgtggtttctcttacgtcatccaccttgacatgatgggtcagaaacaaatggaaatccagagcaagtcctccagggttgcaccaggtttacctaaagcttgttgccttttcttgtgctgtttatccgtgtagagcactcaagaaagttctgaaactgctttgtatctgctttgtactgttggtgccttcttggtattgtaccccaaaattctgcatagattatttagtataatggtaagttaaaaaatgttaaaggaagattttattaagaatctgaatgtttattcattatattgttacaatttaacattaacatttatttgtggtatttgtgatttggttaatctgtataaaaattgtaagtagaaaggtttatatttcatcttaattcttttgatgttgtaaacgtactttttaaaagatggattatttgaatgtttatggcacctgacttgtaaaaaaaaaaaactacaaaaaaatccttagaatcattaaattgtgtccctgtattaccaaaataacacagcaccgtgcatgtatagtttaattgcagtttcatctgtgaaaacgtgaaattgtctagtccttcgttatgttccccagatgtcttccagatttgctctgcatgtggtaacttgtgttagggctgtgagctgttcctcgagttgaatggggatgtcagtgctcctagggttctccaggtggttcttcagaccttcacctgtgggggggggggtaggcggtgcccacgcccatctcctcatcctcctgaacttctgcaaccccactgctgggcagacatcctgggcaaccccttttttcagagcaagaagtcataaagataggatttcttggacatttggttcttatcaatattgggcattatgtaatgacttatttacaaaacaaagatactggaaaatgttttggatgtggtgttatggaaagagcacaggccttggacccatccagctgggttcagaactaccccctgcttataactgcggctggctgtgggccagtcattctgcgtctctgctttcttcctctgcttcagactgtcagctgtaaagtggaagcaatattacttgccttgtatatggtaaagattataaaaatacatttcaactgttcagcatagtacttcaaagcaagtactcagtaaatagcaagtctttttaaatgctgctttatttcactaaattttgttgtgaggtgtcactaaaatgcctgcaaacaaacgtaactgctaatctgagaggaaaccctcttactaatcagagaagaaaccctcctgtcagaaaccttcagggaagtgagctgatcacacctaaactgggagtttgcaatggggtatttgaagcactgtgggagtattccactggcccnctccctgagagacttaacagtcttccctgttgtccagattctgtataaggcaatcagaataatcatcttccttgttcagcagaggagcctggtcccattttccccactttgtgatgggcttctctcagcggtagctcagcagttccagatggcagtttggaccagcatctaggctggccagttcgctgtgtttacttagaaccaacacgttcagagctggcctggaccatctgaggggaacaggaaacacccctaggctgtggaagcaagtgcagacccccacccccggccctgaagccaagggggcagggtttgggagtggccaaagagaagcagtgcagggatgggttttcctagggacaggcttagcattcctgactctaggaagaaggagcagtgaggcggagaaacagtggaggggatggtggcattgggccccatggggccgagatggacacagggctcgttctcttgagtctggtgccaaggacagctgaagacgacatcattttcaggtggagaggagagagtggagggagatcatgccctgtgatgtgtcttttgcaggtgaaggtgggagacaaggtctctgctgacgatgaggcagagccaccgtgaaagttgtaataggaggactgcccgccgctggaagggcctgcagtgacgctaggacaccctctgcctgcatgtcacgttagctgggctgggcgaagtagaagaccaaggggaagaggtgcagtggggagaccaggtgggatgcaaccacaggaccagtggaggggctgtggcacgtgggcggagactgagtggctgggcatgtgttgtggctgagcatgtggtgtgggcagtggtcctagaccccgccatgtccggacaatgatatagagcgtctcagcatcgccagtctagactgtctatggagagcagaaagttgtctngggctgcctggggaactgtgaggccagctatatcaccgtcgctgatggtgacattacggtggtggcaggagcaaggagagagggaagaaggaccccgtccagctttagtcacaaaatacccaatggaagatgccagtgccaatcctgtgggtttccttgggacttcacactggctttcttatctgctccagatccattcagtagtcactgagttcctgccaaatactttgtagcgccagaagccaggagcggggtctgcagcagggcagtccccnttttcaggaaatgcctggagctgctggtccctgagagaaaggaaaacatctttcagccgtacgcaggccaagaaggccaatgtccagtagctttgtgattttttttatatttttttatttatttatttttgagatagagtcttgctctgtcgctcaggctggagtgcagtggcgtgatctccactcactgcaacttccgcctcctggggtcaagcagttctgcctcagcctcccgagtagctgggattacaggcacacgccaccacacccagctaatttttgtgtttttagtagagacggtttcaccatgtcggccaggctggtctcaaactcctgacctcagatgattcagcctcccaaagtgctgggattacaggtgtgagccactgcacccagcctgtgatgtttctgtggggttccacaaatgtgtgtgtgtgtaaaagctgatgattacagcaagaatgtgaacagtagcagttttccatttgaaggcaagttttgtctttatctgggtatcagaaggaccctctgggccattgtcgcttcctgtactcagagccaccctagtactacgggcacacacagaaaacagcagcctgcgtactttcaaaggaaaggcatctttaatcaccaatgcctggaaaaattattttgtttccctcttccttccgtcttgtttcctaacttcttaccaaagtttagagtctgagtttttcgtataataatgtcccacatccacacatcgggcctacagatgctctcccttgaatcgactggaaacatgacaccggttccatgctctggaactgtcacctgtgatgtgctgggctgtgtcccaagcacaggaatcccagcagtttcagctcgatgcagaaccaccatgctccagacacaggcttgggaaagacacgtcaaaattaaaatactaggtaagagaagcacctgattgggtagaagttggagaggaatcctggaattttgtggccagaaggagccactgccccttttgtttagtaagactagacagtaacagaagccagttgtcagctatgaaagtggtgggtgaagcaggggaggctcctctatggtgggaccctggacaagggaagccgaatgtgtgaagaaggggtgcgggggtgtgcggtgccctaggacactagggcaaaggtttcaaacctggaacaaggcactggaggaagatctgctgccagtcagcagtgcgggccctcgagttagcagtccgtgcgcagaggggccagttctgagaccagtttggagagtcaggcagtgacccattggccatgtcataattccttcagcctgcctcctctttaatcccagagagtgctctttcttcatacttcctttaaaatactaaattgttcccattccatggggagctggctaggctttacaggctaggaaatgtaggttttctgagatggaaccatctacacaaggaggaggaaggcactaagactacagatgagacccatgacagggctgagcatttggaagccaaccctggttgcttttcaagaattgctttgtggctgggtgcagtggttcacacctgtaattgcagcactttgggaggctgaggcaggtggattgcttgaacccaggagttcgagaccagcctgggcaacatatgggacaccccaccgcccccggctctgcaaaaaaattaaaaattagccaggcgtggtgtcatgagcctgtggtctcaactactcaggaggctgaggctggaggatcgcttgaacctgggaggtcaaggctccagtgaaccataattgtgccactgcactgcagcctgggcgacaatttgttttctaaattgcttttgaaagtctactgcattacatattccaaaaagcagtggttttcaaatacttttatcaccgatatccttttatgaaatgaaatcagtagaactttctctgctctgaataagcaagggtgggaacctgtctacctcccacagatagcataatgtgcctgccatagaggagccaaaaaatggtgatgggaactgagaggagagcaaatgtcacaaaagactgagcaattgagaaaacaaaacaagaccacagatgactgttaacgcctccacagtggaccaagaaaggacagagagctggcagcatgggcatcactgtctggtcggcagcaggaaggcctcgctagggaattgagtacagtcatctaactagtttaaaagtacaggaaggatgattaaggctattggagaggtcatacaaataggggaggggcaggcaatggctgataagacatgaatttgtaaggcgatgagtattgcagtcagcaaaacaaacgagactgctctcccaacacataactcagcagggaggccaggcattggtttaaccatttaatataaagaagttaaaattacaaatgcgctaagtgcctaaagaagaataagtgcaggaatgagagcagcatggactgccacagttttagaataagcactgtcactgctagattggaaacaaaaatccataaatttggcccggtgtggtggcggacgcctgtagtcccagctacttggaggctgaggcgtgagaatcgcttgaacccgggaggcggaggttgcagtgagccgagatggcgccactgcactccagcctgggcgtcagagtgagaactctgtatcaaaaaataaaaanaaaaaaaagtccataaatctgcaatgtctcagttaagaaagaaagactgggccaatgcagatttcaaaccggagaaagtcatactgtcagtgaaggccgcctgtggccggaaggcgccaggggattagcaccctggactcagtgttgctgggaaacagggccccaaggctgggagcacagtgtttaaagggcatctacccaagaagggagcacagggcaaggaggagctgcagggggncttggctgccaaagtgaattctgaggagagagctattgctgcctacgatatgcaggctgcacagaacacaagtggaatcagcaggcaggagaggcagctaacgacgcagcccgtttcttatttctgttttctcacaagcgatgaaagtggaaaagagggtgagcaggtggcccacacatgtgcctccagtgctgcggcccctccggggaccatcngccaggccccggggagggagccagccacagtgtgtccggctcttctctgaagggaagagagccttgaatagactgaagcgaagacggttctgcaaggacaaggcagaccgaaggcattggttttttttttcagataaggagaattagactcccaagtagacaccagagtcactgtttggttggtgggtgatagtggggtcacagtggctgcctgtgctcccccagggtgagcgtgactgtgctaacctgggtggggcagcatgcacacccctctggcagccctttgttgctcgctgatgacaagtttggatgatcccgccaaacagcttgctaagatgtagtccccagtgttggaggtggggcctgatgggaggtgctacccttgtgagataaggttgtgtaaaagcctgtggcacctccccacactgacgctctcacccctgctctggccatgtgccgcgcctgctcccacttccccttctgccaggagtaaaagcccccgagacctcccagaagccaagcagatgctagtgccatgcttcctctgcagcctgcagaactgtgagccaattaaacctcttttctctat

SEQ ID NO: 300100 - DNA, 11072 bp, Homo sapiens
  misc_feature (6124)..(6124): n is a, c, g, or t
  misc_feature (7062)..(7062): n is a, c, g, or t
  misc_feature (7337)..(7337): n is a, c, g, or t
  misc_feature (10030)..(10030): n is a, c, g, or t
  misc_feature (10268)..(10268): n is a, c, g, or t
  misc_feature (10483)..(10483): n is a, c, g, or t
gcgcccctccctccgcccgcccgccggcccgcccgtcagtctggcaggcaggcaggcaatcggtccgagtggctgtcggctcttcagctctcccgctcggcgtcttccttcctcctcccggtcagcgtcggcggctgcaccggcggcggcgcagtccctgcgggaggggcgacaagagctgagcggcggccgccgagcgtcgagctcagcgcggcggaggcggcggcggcccggcagccaacatggcggcggcggcggcggcgggcgcgggcccggagatggtccgcgggcaggtgttcgacgtggggccgcgctacaccaacctctcgtacatcggcgagggcgcctacggcatggtgtgctctgcttatgataatgtcaacaaagttcgagtagctatcaagaaaatcagcccctttgagcaccagacctactgccagagaaccctgagggagataaaaatcttactgcgcttcagacatgagaacatcattggaatcaatgacattattcgagcaccaaccatcgagcaaatgaaagatgtatatatagtacaggacctcatggaaacagatctttacaagctcttgaagacacaacacctcagcaatgaccatatctgctattttctctaccagatcctcagagggttaaaatatatccattcagctaacgttctgcaccgtgacctcaagccttccaacctgctgctcaacaccacctgtgatctcaagatctgtgactttggcctggcccgtgttgcagatccagaccatgatcacacagggttcctgacagaatatgtggccacacgttggtacagggctccagaaattatgttgaattccaagggctacaccaagtccattgatatttggtctgtaggctgcattctggcagaaatgctttctaacaggcccatctttccagggaagcattatcttgaccagctgaaccacattttgggtattcttggatccccatcacaagaagacctgaattgtataataaatttaaaagctaggaactatttgctttctcttccacacaaaaataaggtgccatggaacaggctgttcccaaatgctgactccaaagctctggacttattggacaaaatgttgacattcaacccacacaagaggattgaagtagaacaggctctggcccacccatatctggagcagtattacgacccgagtgacgagcccatcgccgaagcaccattcaagttcgacatggaattggatgacttgcctaaggaaaagctcaaagaactaatttttgaagagactgctagattccagccaggatacagatcttaaatttgtcaggacaagggctcagaggactggacgtgctcagacatcggtgttcttcttcccagttcttgacccctggtcctgtctccagcccgtcttggcttatccactttgactcctttgagccgtttggaggggcggtttctggtagttgtggcttttatgctttcaaagaatttcttcagtccagagaattcctcctggcagccctgtgtgtgtcacccattggtgacctgcggcagtatgtacttcagtgcacctactgcttactgttgctttagtcactaattgctttctggtttgaaagatgcagtggttcctccctctcctgaatccttttctacatgatgccctgctgaccatgcagccgcaccagagagagattcttccccaattggctctagtcactggcatctcactttatgatagggaaggctactacctagggcactttaagtcagtgacagccccttatttgcacttcaccttttgaccataactgtttccccagagcaggagcttgtggaaataccttggctgatgttgcagcctgcagcaagtgcttccgtctccggaatccttggggagcacttgtccacgtcttttctcatatcatggtagtcactaacatatataaggtatgtgctattggcccagcttttagaaaatgcagtcatttttctaaataaaaaggaagtactgcacccagcagtgtcactctgtagttactgtggtcacttgtaccatatagaggtgtaacacttgtcaagaagcgttatgtgcagtacttaatgtttgtaagacttacaaaaaaagatttaaagtggcagcttcactcgacatttggtgagagaagtacaaaggttgcagtgctgagctgtgggcggtttctggggatgtcccagggtggaactccacatgctggtgcatatacgcccttgagctacttcaaatgtgggtgtttcagtaaccacgttccatgcctgaggatttagcagagaggaacactgcgtctttaaatgagaaagtatacaattctttttccttctacagcatgtcagcatctcaagttcatttttcaacctacagtataacaatttgtaataaagcctccaggagctcatgacgtgaagcactgttctgtcctcaagtactcaaatatttctgatactgctgagtcagactgtcagaaaaagctagcactaactcgtgtttggagctctatccatattttactgatctctttaagtatttgttcctgccactgtgtactgtggagttgactcggtgttctgtcccagtgcggtgcctcctcttgacttccccactgctctctgtggtgagaaatttgccttgttcaataattactgtaccctcgcatgactgttacagctttctgtgcagagatgactgtccaagtgccacatgcctacgattgaaatgaaaactctattgttacctctgagttgtgttccacggaaaatgctatccagcagatcatttaggaaaaataattctatttttagcttttcatttctcagctgtccttttttcttgtttgatttttgacagcaatggagaatgggttatataaagactgcctgctaatatgaacagaaatgcatttgtaattcatgaaaataaatgtacatcttctatcttcacattcatgttaagattcagtgttgctttcctctggatcagcgtgtctgaatggacagtcaggttcaggttgtgctgaacacagaaatgctcacaggcctcactttgccgcccaggcactggcccagcacttggatttacataagatgagttagaaaggtacttctgtagggtcctttttacctctgctcggcagagaatcgatgctgtcatgttcctttattcacaatcttaggtctcaaatattctgtcaaaccctaacaaagaagccccgacatctcaggttggattccctggttctctctaaagagggcctgcccttgtgccccagaggtgctgctgggcacagccaagagttgggaagggccgccccacagtacgcagtcctcaccacccagcccagggtgctcacgctcaccactcctgtggctgaggaaggatagctggctcatcctcggaaaacagacccacatctctattcttgccctgaaatacgcgcttttcacttgcgtgctcagagctgccgtctgaaggtccacacagcattgacgggacacagaaatgtgactgttaccggataacactgattagtcagttttcatttataaaaaagcattgacagttttattactcttgtttctttttaaatggaaagttactattataaggttaatttgcagtcctcttctaaatagaaaaccatatccttggctactaacatctggagactgtgagctccttcccattccccttcctggtactgtggagtcagattggcatgaaaccactaacttcattctagaatcattgtagccataagttgtgtgctttttattaatcatgccaaacataatgtaactgggcagagaatggtcctaaccaaggtacctatgaaaagcgctagctatcatgtgtagtagatgcatcattttggctcttcttacatttgtaaaaatgtacagattaggtcatcttaattcatattagtgacacggaacagcacctccactatttgtatgttcaaataagctttcagactaatagcttttttggtgtctaaaatgtaagcaaaaaattcctgctgaaacattccagtcctttcatttagtataaaagaaatactgaacaagccagtgggatggaattgaaagaactaatcatgaggactctgtcctgacacaggtcctcaaagctagcagagatacgcagacattgtggcatctgggtagaagaatactgtattgtgtgtgcagtgcacagtgtgtggtgtgtgcacactcattccttctgctcttgggcacaggcagtgggtgtagaggtaaccagtagctttgagaagctacatgtagctcaccagtggttttctctaaggaatcacaaaggtaaactacccaaccacatgccacgtaatatttcagccattcagaggaaactgttttctctttatttgcttatatgttaatatggtttttaaattggtaacttttatatagtatggtaacagtatgttaatacacacatacatatgcacacatgctttgggtccttccataatacttttatatttgtaaatcaatgttttggagcaatcccaagtttaagggaaatatttttgtaaatgtaatggttttgaaaatctgagcaatccttttgcttatacatttttaaagcatttgtgctttaaaattgttatgctggtgtttgaaacatgatactcctgtggtgcagatgagaagctataacagtgaatatgtggtttctcttacgtcatccaccttgacatgatgggtcagaaacaaatggaaatccagagcaagtcctccagggttgcaccaggtttacctaaagcttgttgccttttcttgtgctgtttatccgtgtagagcactcaagaaagttctgaaactgctttgtatctgctttgtactgttggtgccttcttggtattgtaccccaaaattctgcatagattatttagtataatggtaagttaaaaaatgttaaaggaagattttattaagaatctgaatgtttattcattatattgttacaatttaacattaacatttatttgtggtatttgtgatttggttaatctgtataaaaattgtaagtagaaaggtttatatttcatcttaattcttttgatgttgtaaacgtactttttaaaagatggattatttgaatgtttatggcacctgacttgtaaaaaaaaaaaactacaaaaaaatccttagaatcattaaattgtgtccctgtattaccaaaataacacagcaccgtgcatgtatagtttaattgcagtttcatctgtgaaaacgtgaaattgtctagtccttcgttatgttccccagatgtcttccagatttgctctgcatgtggtaacttgtgttagggctgtgagctgttcctcgagttgaatggggatgtcagtgctcctagggttctccaggtggttcttcagaccttcacctgtgggggggggggtaggcggtgcccacgcccatctcctcatcctcctgaacttctgcaaccccactgctgggcagacatcctgggcaaccccttttttcagagcaagaagtcataaagataggatttcttggacatttggttcttatcaatattgggcattatgtaatgacttatttacaaaacaaagatactggaaaatgttttggatgtggtgttatggaaagagcacaggccttggacccatccagctgggttcagaactaccccctgcttataactgcggctggctgtgggccagtcattctgcgtctctgctttcttcctctgcttcagactgtcagctgtaaagtggaagcaatattacttgccttgtatatggtaaagattataaaaatacatttcaactgttcagcatagtacttcaaagcaagtactcagtaaatagcaagtctttttaaatgctgctttatttcactaaattttgttgtgaggtgtcactaaaatgcctgcaaacaaacgtaactgctaatctgagaggaaaccctcttactaatcagagaagaaaccctcctgtcagaaaccttcagggaagtgagctgatcacacctaaactgggagtttgcaatggggtatttgaagcactgtgggagtattccactggcccnctccctgagagacttaacagtcttccctgttgtccagattctgtataaggcaatcagaataatcatcttccttgttcagcagaggagcctggtcccattttccccactttgtgatgggcttctctcagcggtagctcagcagttccagatggcagtttggaccagcatctaggctggccagttcgctgtgtttacttagaaccaacacgttcagagctggcctggaccatctgaggggaacaggaaacacccctaggctgtggaagcaagtgcagacccccacccccggccctgaagccaagggggcagggtttgggagtggccaaagagaagcagtgcagggatgggttttcctagggacaggcttagcattcctgactctaggaagaaggagcagtgaggcggagaaacagtggaggggatggtggcattgggccccatggggccgagatggacacagggctcgttctcttgagtctggtgccaaggacagctgaagacgacatcattttcaggtggagaggagagagtggagggagatcatgccctgtgatgtgtcttttgcaggtgaaggtgggagacaaggtctctgctgacgatgaggcagagccaccgtgaaagttgtaataggaggactgcccgccgctggaagggcctgcagtgacgctaggacaccctctgcctgcatgtcacgttagctgggctgggcgaagtagaagaccaaggggaagaggtgcagtggggagaccaggtgggatgcaaccacaggaccagtggaggggctgtggcacgtgggcggagactgagtggctgggcatgtgttgtggctgagcatgtggtgtgggcagtggtcctagaccccgccatgtccggacaatgatatagagcgtctcagcatcgccagtctagactgtctatggagagcagaaagttgtctngggctgcctggggaactgtgaggccagctatatcaccgtcgctgatggtgacattacggtggtggcaggagcaaggagagagggaagaaggaccccgtccagctttagtcacaaaatacccaatggaagatgccagtgccaatcctgtgggtttccttgggacttcacactggctttcttatctgctccagatccattcagtagtcactgagttcctgccaaatactttgtagcgccagaagccaggagcggggtctgcagcagggcagtccccnttttcaggaaatgcctggagctgctggtccctgagagaaaggaaaacatctttcagccgtacgcaggccaagaaggccaatgtccagtagctttgtgattttttttatatttttttatttatttatttttgagatagagtcttgctctgtcgctcaggctggagtgcagtggcgtgatctccactcactgcaacttccgcctcctggggtcaagcagttctgcctcagcctcccgagtagctgggattacaggcacacgccaccacacccagctaatttttgtgtttttagtagagacggtttcaccatgtcggccaggctggtctcaaactcctgacctcagatgattcagcctcccaaagtgctgggattacaggtgtgagccactgcacccagcctgtgatgtttctgtggggttccacaaatgtgtgtgtgtgtaaaagctgatgattacagcaagaatgtgaacagtagcagttttccatttgaaggcaagttttgtctttatctgggtatcagaaggaccctctgggccattgtcgcttcctgtactcagagccaccctagtactacgggcacacacagaaaacagcagcctgcgtactttcaaaggaaaggcatctttaatcaccaatgcctggaaaaattattttgtttccctcttccttccgtcttgtttcctaacttcttaccaaagtttagagtctgagtttttcgtataataatgtcccacatccacacatcgggcctacagatgctctcccttgaatcgactggaaacatgacaccggttccatgctctggaactgtcacctgtgatgtgctgggctgtgtcccaagcacaggaatcccagcagtttcagctcgatgcagaaccaccatgctccagacacaggcttgggaaagacacgtcaaaattaaaatactaggtaagagaagcacctgattgggtagaagttggagaggaatcctggaattttgtggccagaaggagccactgccccttttgtttagtaagactagacagtaacagaagccagttgtcagctatgaaagtggtgggtgaagcaggggaggctcctctatggtgggaccctggacaagggaagccgaatgtgtgaagaaggggtgcgggggtgtgcggtgccctaggacactagggcaaaggtttcaaacctggaacaaggcactggaggaagatctgctgccagtcagcagtgcgggccctcgagttagcagtccgtgcgcagaggggccagttctgagaccagtttggagagtcaggcagtgacccattggccatgtcataattccttcagcctgcctcctctttaatcccagagagtgctctttcttcatacttcctttaaaatactaaattgttcccattccatggggagctggctaggctttacaggctaggaaatgtaggttttctgagatggaaccatctacacaaggaggaggaaggcactaagactacagatgagacccatgacagggctgagcatttggaagccaaccctggttgcttttcaagaattgctttgtggctgggtgcagtggttcacacctgtaattgcagcactttgggaggctgaggcaggtggattgcttgaacccaggagttcgagaccagcctgggcaacatatgggacaccccaccgcccccggctctgcaaaaaaattaaaaattagccaggcgtggtgtcatgagcctgtggtctcaactactcaggaggctgaggctggaggatcgcttgaacctgggaggtcaaggctccagtgaaccataattgtgccactgcactgcagcctgggcgacaatttgttttctaaattgcttttgaaagtctactgcattacatattccaaaaagcagtggttttcaaatacttttatcaccgatatccttttatgaaatgaaatcagtagaactttctctgctctgaataagcaagggtgggaacctgtctacctcccacagatagcataatgtgcctgccatagaggagccaaaaaatggtgatgggaactgagaggagagcaaatgtcacaaaagactgagcaattgagaaaacaaaacaagaccacagatgactgttaacgcctccacagtggaccaagaaaggacagagagctggcagcatgggcatcactgtctggtcggcagcaggaaggcctcgctagggaattgagtacagtcatctaactagtttaaaagtacaggaaggatgattaaggctattggagaggtcatacaaataggggaggggcaggcaatggctgataagacatgaatttgtaaggcgatgagtattgcagtcagcaaaacaaacgagactgctctcccaacacataactcagcagggaggccaggcattggtttaaccatttaatataaagaagttaaaattacaaatgcgctaagtgcctaaagaagaataagtgcaggaatgagagcagcatggactgccacagttttagaataagcactgtcactgctagattggaaacaaaaatccataaatttggcccggtgtggtggcggacgcctgtagtcccagctacttggaggctgaggcgtgagaatcgcttgaacccgggaggcggaggttgcagtgagccgagatggcgccactgcactccagcctgggcgtcagagtgagaactctgtatcaaaaaataaaaanaaaaaaaagtccataaatctgcaatgtctcagttaagaaagaaagactgggccaatgcagatttcaaaccggagaaagtcatactgtcagtgaaggccgcctgtggccggaaggcgccaggggattagcaccctggactcagtgttgctgggaaacagggccccaaggctgggagcacagtgtttaaagggcatctacccaagaagggagcacagggcaaggaggagctgcagggggncttggctgccaaagtgaattctgaggagagagctattgctgcctacgatatgcaggctgcacagaacacaagtggaatcagcaggcaggagaggcagctaacgacgcagcccgtttcttatttctgttttctcacaagcgatgaaagtggaaaagagggtgagcaggtggcccacacatgtgcctccagtgctgcggcccctccggggaccatcngccaggccccggggagggagccagccacagtgtgtccggctcttctctgaagggaagagagccttgaatagactgaagcgaagacggttctgcaaggacaaggcagaccgaaggcattggttttttttttcagataaggagaattagactcccaagtagacaccagagtcactgtttggttggtgggtgatagtggggtcacagtggctgcctgtgctcccccagggtgagcgtgactgtgctaacctgggtggggcagcatgcacacccctctggcagccctttgttgctcgctgatgacaagtttggatgatcccgccaaacagcttgctaagatgtagtccccagtgttggaggtggggcctgatgggaggtgctacccttgtgagataaggttgtgtaaaagcctgtggcacctccccacactgacgctctcacccctgctctggccatgtgccgcgcctgctcccacttccccttctgccaggagtaaaagcccccgagacctcccagaagccaagcagatgctagtgccatgcttcctctgcagcctgcagaactgtgagccaattaaacctcttttctctat

SEQ ID NO: 300101 - DNA, 11205 bp, Homo sapiens
  misc_feature (6257)..(6257): n is a, c, g, or t
  misc_feature (7195)..(7195): n is a, c, g, or t
  misc_feature (7470)..(7470): n is a, c, g, or t
  misc_feature (10163)..(10163): n is a, c, g, or t
  misc_feature (10401)..(10401): n is a, c, g, or t
  misc_feature (10616)..(10616): n is a, c, g, or t
acataatttctggagccctgtaccaacgtgtggccacatattctgtcaggaaccctgtgtgatcatggtctggatctgcaacacgggccaggccaaagtcacagatcttgagatcacaggtggtgttgagcagcaggcaggcaggcaatcggtccgagtggctgtcggctcttcagctctcccgctcggcgtcttccttcctcctcccggtcagcgtcggcggctgcaccggcggcggcgcagtccctgcgggaggggcgacaagagctgagcggcggccgccgagcgtcgagctcagcgcggcggaggcggcggcggcccggcagccaacatggcggcggcggcggcggcgggcgcgggcccggagatggtccgcgggcaggtgttcgacgtggggccgcgctacaccaacctctcgtacatcggcgagggcgcctacggcatggtgtgctctgcttatgataatgtcaacaaagttcgagtagctatcaagaaaatcagcccctttgagcaccagacctactgccagagaaccctgagggagataaaaatcttactgcgcttcagacatgagaacatcattggaatcaatgacattattcgagcaccaaccatcgagcaaatgaaagatgtatatatagtacaggacctcatggaaacagatctttacaagctcttgaagacacaacacctcagcaatgaccatatctgctattttctctaccagatcctcagagggttaaaatatatccattcagctaacgttctgcaccgtgacctcaagccttccaacctgctgctcaacaccacctgtgatctcaagatctgtgactttggcctggcccgtgttgcagatccagaccatgatcacacagggttcctgacagaatatgtggccacacgttggtacagggctccagaaattatgttgaattccaagggctacaccaagtccattgatatttggtctgtaggctgcattctggcagaaatgctttctaacaggcccatctttccagggaagcattatcttgaccagctgaaccacattttgggtattcttggatccccatcacaagaagacctgaattgtataataaatttaaaagctaggaactatttgctttctcttccacacaaaaataaggtgccatggaacaggctgttcccaaatgctgactccaaagctctggacttattggacaaaatgttgacattcaacccacacaagaggattgaagtagaacaggctctggcccacccatatctggagcagtattacgacccgagtgacgagcccatcgccgaagcaccattcaagttcgacatggaattggatgacttgcctaaggaaaagctcaaagaactaatttttgaagagactgctagattccagccaggatacagatcttaaatttgtcaggacaagggctcagaggactggacgtgctcagacatcggtgttcttcttcccagttcttgacccctggtcctgtctccagcccgtcttggcttatccactttgactcctttgagccgtttggaggggcggtttctggtagttgtggcttttatgctttcaaagaatttcttcagtccagagaattcctcctggcagccctgtgtgtgtcacccattggtgacctgcggcagtatgtacttcagtgcacctactgcttactgttgctttagtcactaattgctttctggtttgaaagatgcagtggttcctccctctcctgaatccttttctacatgatgccctgctgaccatgcagccgcaccagagagagattcttccccaattggctctagtcactggcatctcactttatgatagggaaggctactacctagggcactttaagtcagtgacagccccttatttgcacttcaccttttgaccataactgtttccccagagcaggagcttgtggaaataccttggctgatgttgcagcctgcagcaagtgcttccgtctccggaatccttggggagcacttgtccacgtcttttctcatatcatggtagtcactaacatatataaggtatgtgctattggcccagcttttagaaaatgcagtcatttttctaaataaaaaggaagtactgcacccagcagtgttacacctctatatggtacaagtgaccacagtaactacagagtgacactctgtagttactgtggtcacttgtaccatatagaggtgtaacacttgtcaagaagcgttatgtgcagtacttaatgtttgtaagacttacaaaaaaagatttaaagtggcagcttcactcgacatttggtgagagaagtacaaaggttgcagtgctgagctgtgggcggtttctggggatgtcccagggtggaactccacatgctggtgcatatacgcccttgagctacttcaaatgtgggtgtttcagtaaccacgttccatgcctgaggatttagcagagaggaacactgcgtctttaaatgagaaagtatacaattctttttccttctacagcatgtcagcatctcaagttcatttttcaacctacagtataacaatttgtaataaagcctccaggagctcatgacgtgaagcactgttctgtcctcaagtactcaaatatttctgatactgctgagtcagactgtcagaaaaagctagcactaactcgtgtttggagctctatccatattttactgatctctttaagtatttgttcctgccactgtgtactgtggagttgactcggtgttctgtcccagtgcggtgcctcctcttgacttccccactgctctctgtggtgagaaatttgccttgttcaataattactgtaccctcgcatgactgttacagctttctgtgcagagatgactgtccaagtgccacatgcctacgattgaaatgaaaactctattgttacctctgagttgtgttccacggaaaatgctatccagcagatcatttaggaaaaataattctatttttagcttttcatttctcagctgtccttttttcttgtttgatttttgacagcaatggagaatgggttatataaagactgcctgctaatatgaacagaaatgcatttgtaattcatgaaaataaatgtacatcttctatcttcacattcatgttaagattcagtgttgctttcctctggatcagcgtgtctgaatggacagtcaggttcaggttgtgctgaacacagaaatgctcacaggcctcactttgccgcccaggcactggcccagcacttggatttacataagatgagttagaaaggtacttctgtagggtcctttttacctctgctcggcagagaatcgatgctgtcatgttcctttattcacaatcttaggtctcaaatattctgtcaaaccctaacaaagaagccccgacatctcaggttggattccctggttctctctaaagagggcctgcccttgtgccccagaggtgctgctgggcacagccaagagttgggaagggccgccccacagtacgcagtcctcaccacccagcccagggtgctcacgctcaccactcctgtggctgaggaaggatagctggctcatcctcggaaaacagacccacatctctattcttgccctgaaatacgcgcttttcacttgcgtgctcagagctgccgtctgaaggtccacacagcattgacgggacacagaaatgtgactgttaccggataacactgattagtcagttttcatttataaaaaagcattgacagttttattactcttgtttctttttaaatggaaagttactattataaggttaatttgcagtcctcttctaaatagaaaaccatatccttggctactaacatctggagactgtgagctccttcccattccccttcctggtactgtggagtcagattggcatgaaaccactaacttcattctagaatcattgtagccataagttgtgtgctttttattaatcatgccaaacataatgtaactgggcagagaatggtcctaaccaaggtacctatgaaaagcgctagctatcatgtgtagtagatgcatcattttggctcttcttacatttgtaaaaatgtacagattaggtcatcttaattcatattagtgacacggaacagcacctccactatttgtatgttcaaataagctttcagactaatagcttttttggtgtctaaaatgtaagcaaaaaattcctgctgaaacattccagtcctttcatttagtataaaagaaatactgaacaagccagtgggatggaattgaaagaactaatcatgaggactctgtcctgacacaggtcctcaaagctagcagagatacgcagacattgtggcatctgggtagaagaatactgtattgtgtgtgcagtgcacagtgtgtggtgtgtgcacactcattccttctgctcttgggcacaggcagtgggtgtagaggtaaccagtagctttgagaagctacatgtagctcaccagtggttttctctaaggaatcacaaaggtaaactacccaaccacatgccacgtaatatttcagccattcagaggaaactgttttctctttatttgcttatatgttaatatggtttttaaattggtaacttttatatagtatggtaacagtatgttaatacacacatacatatgcacacatgctttgggtccttccataatacttttatatttgtaaatcaatgttttggagcaatcccaagtttaagggaaatatttttgtaaatgtaatggttttgaaaatctgagcaatccttttgcttatacatttttaaagcatttgtgctttaaaattgttatgctggtgtttgaaacatgatactcctgtggtgcagatgagaagctataacagtgaatatgtggtttctcttacgtcatccaccttgacatgatgggtcagaaacaaatggaaatccagagcaagtcctccagggttgcaccaggtttacctaaagcttgttgccttttcttgtgctgtttatccgtgtagagcactcaagaaagttctgaaactgctttgtatctgctttgtactgttggtgccttcttggtattgtaccccaaaattctgcatagattatttagtataatggtaagttaaaaaatgttaaaggaagattttattaagaatctgaatgtttattcattatattgttacaatttaacattaacatttatttgtggtatttgtgatttggttaatctgtataaaaattgtaagtagaaaggtttatatttcatcttaattcttttgatgttgtaaacgtactttttaaaagatggattatttgaatgtttatggcacctgacttgtaaaaaaaaaaaactacaaaaaaatccttagaatcattaaattgtgtccctgtattaccaaaataacacagcaccgtgcatgtatagtttaattgcagtttcatctgtgaaaacgtgaaattgtctagtccttcgttatgttccccagatgtcttccagatttgctctgcatgtggtaacttgtgttagggctgtgagctgttcctcgagttgaatggggatgtcagtgctcctagggttctccaggtggttcttcagaccttcacctgtgggggggggggtaggcggtgcccacgcccatctcctcatcctcctgaacttctgcaaccccactgctgggcagacatcctgggcaaccccttttttcagagcaagaagtcataaagataggatttcttggacatttggttcttatcaatattgggcattatgtaatgacttatttacaaaacaaagatactggaaaatgttttggatgtggtgttatggaaagagcacaggccttggacccatccagctgggttcagaactaccccctgcttataactgcggctggctgtgggccagtcattctgcgtctctgctttcttcctctgcttcagactgtcagctgtaaagtggaagcaatattacttgccttgtatatggtaaagattataaaaatacatttcaactgttcagcatagtacttcaaagcaagtactcagtaaatagcaagtctttttaaatgctgctttatttcactaaattttgttgtgaggtgtcactaaaatgcctgcaaacaaacgtaactgctaatctgagaggaaaccctcttactaatcagagaagaaaccctcctgtcagaaaccttcagggaagtgagctgatcacacctaaactgggagtttgcaatggggtatttgaagcactgtgggagtattccactggcccnctccctgagagacttaacagtcttccctgttgtccagattctgtataaggcaatcagaataatcatcttccttgttcagcagaggagcctggtcccattttccccactttgtgatgggcttctctcagcggtagctcagcagttccagatggcagtttggaccagcatctaggctggccagttcgctgtgtttacttagaaccaacacgttcagagctggcctggaccatctgaggggaacaggaaacacccctaggctgtggaagcaagtgcagacccccacccccggccctgaagccaagggggcagggtttgggagtggccaaagagaagcagtgcagggatgggttttcctagggacaggcttagcattcctgactctaggaagaaggagcagtgaggcggagaaacagtggaggggatggtggcattgggccccatggggccgagatggacacagggctcgttctcttgagtctggtgccaaggacagctgaagacgacatcattttcaggtggagaggagagagtggagggagatcatgccctgtgatgtgtcttttgcaggtgaaggtgggagacaaggtctctgctgacgatgaggcagagccaccgtgaaagttgtaataggaggactgcccgccgctggaagggcctgcagtgacgctaggacaccctctgcctgcatgtcacgttagctgggctgggcgaagtagaagaccaaggggaagaggtgcagtggggagaccaggtgggatgcaaccacaggaccagtggaggggctgtggcacgtgggcggagactgagtggctgggcatgtgttgtggctgagcatgtggtgtgggcagtggtcctagaccccgccatgtccggacaatgatatagagcgtctcagcatcgccagtctagactgtctatggagagcagaaagttgtctngggctgcctggggaactgtgaggccagctatatcaccgtcgctgatggtgacattacggtggtggcaggagcaaggagagagggaagaaggaccccgtccagctttagtcacaaaatacccaatggaagatgccagtgccaatcctgtgggtttccttgggacttcacactggctttcttatctgctccagatccattcagtagtcactgagttcctgccaaatactttgtagcgccagaagccaggagcggggtctgcagcagggcagtccccnttttcaggaaatgcctggagctgctggtccctgagagaaaggaaaacatctttcagccgtacgcaggccaagaaggccaatgtccagtagctttgtgattttttttatatttttttatttatttatttttgagatagagtcttgctctgtcgctcaggctggagtgcagtggcgtgatctccactcactgcaacttccgcctcctggggtcaagcagttctgcctcagcctcccgagtagctgggattacaggcacacgccaccacacccagctaatttttgtgtttttagtagagacggtttcaccatgtcggccaggctggtctcaaactcctgacctcagatgattcagcctcccaaagtgctgggattacaggtgtgagccactgcacccagcctgtgatgtttctgtggggttccacaaatgtgtgtgtgtgtaaaagctgatgattacagcaagaatgtgaacagtagcagttttccatttgaaggcaagttttgtctttatctgggtatcagaaggaccctctgggccattgtcgcttcctgtactcagagccaccctagtactacgggcacacacagaaaacagcagcctgcgtactttcaaaggaaaggcatctttaatcaccaatgcctggaaaaattattttgtttccctcttccttccgtcttgtttcctaacttcttaccaaagtttagagtctgagtttttcgtataataatgtcccacatccacacatcgggcctacagatgctctcccttgaatcgactggaaacatgacaccggttccatgctctggaactgtcacctgtgatgtgctgggctgtgtcccaagcacaggaatcccagcagtttcagctcgatgcagaaccaccatgctccagacacaggcttgggaaagacacgtcaaaattaaaatactaggtaagagaagcacctgattgggtagaagttggagaggaatcctggaattttgtggccagaaggagccactgccccttttgtttagtaagactagacagtaacagaagccagttgtcagctatgaaagtggtgggtgaagcaggggaggctcctctatggtgggaccctggacaagggaagccgaatgtgtgaagaaggggtgcgggggtgtgcggtgccctaggacactagggcaaaggtttcaaacctggaacaaggcactggaggaagatctgctgccagtcagcagtgcgggccctcgagttagcagtccgtgcgcagaggggccagttctgagaccagtttggagagtcaggcagtgacccattggccatgtcataattccttcagcctgcctcctctttaatcccagagagtgctctttcttcatacttcctttaaaatactaaattgttcccattccatggggagctggctaggctttacaggctaggaaatgtaggttttctgagatggaaccatctacacaaggaggaggaaggcactaagactacagatgagacccatgacagggctgagcatttggaagccaaccctggttgcttttcaagaattgctttgtggctgggtgcagtggttcacacctgtaattgcagcactttgggaggctgaggcaggtggattgcttgaacccaggagttcgagaccagcctgggcaacatatgggacaccccaccgcccccggctctgcaaaaaaattaaaaattagccaggcgtggtgtcatgagcctgtggtctcaactactcaggaggctgaggctggaggatcgcttgaacctgggaggtcaaggctccagtgaaccataattgtgccactgcactgcagcctgggcgacaatttgttttctaaattgcttttgaaagtctactgcattacatattccaaaaagcagtggttttcaaatacttttatcaccgatatccttttatgaaatgaaatcagtagaactttctctgctctgaataagcaagggtgggaacctgtctacctcccacagatagcataatgtgcctgccatagaggagccaaaaaatggtgatgggaactgagaggagagcaaatgtcacaaaagactgagcaattgagaaaacaaaacaagaccacagatgactgttaacgcctccacagtggaccaagaaaggacagagagctggcagcatgggcatcactgtctggtcggcagcaggaaggcctcgctagggaattgagtacagtcatctaactagtttaaaagtacaggaaggatgattaaggctattggagaggtcatacaaataggggaggggcaggcaatggctgataagacatgaatttgtaaggcgatgagtattgcagtcagcaaaacaaacgagactgctctcccaacacataactcagcagggaggccaggcattggtttaaccatttaatataaagaagttaaaattacaaatgcgctaagtgcctaaagaagaataagtgcaggaatgagagcagcatggactgccacagttttagaataagcactgtcactgctagattggaaacaaaaatccataaatttggcccggtgtggtggcggacgcctgtagtcccagctacttggaggctgaggcgtgagaatcgcttgaacccgggaggcggaggttgcagtgagccgagatggcgccactgcactccagcctgggcgtcagagtgagaactctgtatcaaaaaataaaaanaaaaaaaagtccataaatctgcaatgtctcagttaagaaagaaagactgggccaatgcagatttcaaaccggagaaagtcatactgtcagtgaaggccgcctgtggccggaaggcgccaggggattagcaccctggactcagtgttgctgggaaacagggccccaaggctgggagcacagtgtttaaagggcatctacccaagaagggagcacagggcaaggaggagctgcagggggncttggctgccaaagtgaattctgaggagagagctattgctgcctacgatatgcaggctgcacagaacacaagtggaatcagcaggcaggagaggcagctaacgacgcagcccgtttcttatttctgttttctcacaagcgatgaaagtggaaaagagggtgagcaggtggcccacacatgtgcctccagtgctgcggcccctccggggaccatcngccaggccccggggagggagccagccacagtgtgtccggctcttctctgaagggaagagagccttgaatagactgaagcgaagacggttctgcaaggacaaggcagaccgaaggcattggttttttttttcagataaggagaattagactcccaagtagacaccagagtcactgtttggttggtgggtgatagtggggtcacagtggctgcctgtgctcccccagggtgagcgtgactgtgctaacctgggtggggcagcatgcacacccctctggcagccctttgttgctcgctgatgacaagtttggatgatcccgccaaacagcttgctaagatgtagtccccagtgttggaggtggggcctgatgggaggtgctacccttgtgagataaggttgtgtaaaagcctgtggcacctccccacactgacgctctcacccctgctctggccatgtgccgcgcctgctcccacttccccttctgccaggagtaaaagcccccgagacctcccagaagccaagcagatgctagtgccatgcttcctctgcagcctgcagaactgtgagccaattaaacctcttttctctat

SEQ ID NO: 300102 - DNA, 11107 bp, Homo sapiens
  misc_feature (6159)..(6159): n is a, c, g, or t
  misc_feature (7097)..(7097): n is a, c, g, or t
  misc_feature (7372)..(7372): n is a, c, g, or t
  misc_feature (10065)..(10065): n is a, c, g, or t
  misc_feature (10303)..(10303): n is a, c, g, or t
  misc_feature (10518)..(10518): n is a, c, g, or t
acataatttctggagccctgtaccaacgtgtggccacatattctgtcaggaaccctgtgtgatcatggtctggatctgcaacacgggccaggccaaagtcacagatcttgagatcacaggtggtgttgagcagcaggcaggcaggcaatcggtccgagtggctgtcggctcttcagctctcccgctcggcgtcttccttcctcctcccggtcagcgtcggcggctgcaccggcggcggcgcagtccctgcgggaggggcgacaagagctgagcggcggccgccgagcgtcgagctcagcgcggcggaggcggcggcggcccggcagccaacatggcggcggcggcggcggcgggcgcgggcccggagatggtccgcgggcaggtgttcgacgtggggccgcgctacaccaacctctcgtacatcggcgagggcgcctacggcatggtgtgctctgcttatgataatgtcaacaaagttcgagtagctatcaagaaaatcagcccctttgagcaccagacctactgccagagaaccctgagggagataaaaatcttactgcgcttcagacatgagaacatcattggaatcaatgacattattcgagcaccaaccatcgagcaaatgaaagatgtatatatagtacaggacctcatggaaacagatctttacaagctcttgaagacacaacacctcagcaatgaccatatctgctattttctctaccagatcctcagagggttaaaatatatccattcagctaacgttctgcaccgtgacctcaagccttccaacctgctgctcaacaccacctgtgatctcaagatctgtgactttggcctggcccgtgttgcagatccagaccatgatcacacagggttcctgacagaatatgtggccacacgttggtacagggctccagaaattatgttgaattccaagggctacaccaagtccattgatatttggtctgtaggctgcattctggcagaaatgctttctaacaggcccatctttccagggaagcattatcttgaccagctgaaccacattttgggtattcttggatccccatcacaagaagacctgaattgtataataaatttaaaagctaggaactatttgctttctcttccacacaaaaataaggtgccatggaacaggctgttcccaaatgctgactccaaagctctggacttattggacaaaatgttgacattcaacccacacaagaggattgaagtagaacaggctctggcccacccatatctggagcagtattacgacccgagtgacgagcccatcgccgaagcaccattcaagttcgacatggaattggatgacttgcctaaggaaaagctcaaagaactaatttttgaagagactgctagattccagccaggatacagatcttaaatttgtcaggacaagggctcagaggactggacgtgctcagacatcggtgttcttcttcccagttcttgacccctggtcctgtctccagcccgtcttggcttatccactttgactcctttgagccgtttggaggggcggtttctggtagttgtggcttttatgctttcaaagaatttcttcagtccagagaattcctcctggcagccctgtgtgtgtcacccattggtgacctgcggcagtatgtacttcagtgcacctactgcttactgttgctttagtcactaattgctttctggtttgaaagatgcagtggttcctccctctcctgaatccttttctacatgatgccctgctgaccatgcagccgcaccagagagagattcttccccaattggctctagtcactggcatctcactttatgatagggaaggctactacctagggcactttaagtcagtgacagccccttatttgcacttcaccttttgaccataactgtttccccagagcaggagcttgtggaaataccttggctgatgttgcagcctgcagcaagtgcttccgtctccggaatccttggggagcacttgtccacgtcttttctcatatcatggtagtcactaacatatataaggtatgtgctattggcccagcttttagaaaatgcagtcatttttctaaataaaaaggaagtactgcacccagcagtgtcactctgtagttactgtggtcacttgtaccatatagaggtgtaacacttgtcaagaagcgttatgtgcagtacttaatgtttgtaagacttacaaatgcagtgctgagctgtgggcggtttctggggatgtcccagggtggaactccacatgctggtgcatatacgcccttgagctacttcaaatgtgggtgtttcagtaaccacgttccatgcctgaggatttagcagagaggaacactgcgtctttaaatgagaaagtatacaattctttttccttctacagcatgtcagcatctcaagttcatttttcaacctacagtataacaatttgtaataaagcctccaggagctcatgacgtgaagcactgttctgtcctcaagtactcaaatatttctgatactgctgagtcagactgtcagaaaaagctagcactaactcgtgtttggagctctatccatattttactgatctctttaagtatttgttcctgccactgtgtactgtggagttgactcggtgttctgtcccagtgcggtgcctcctcttgacttccccactgctctctgtggtgagaaatttgccttgttcaataattactgtaccctcgcatgactgttacagctttctgtgcagagatgactgtccaagtgccacatgcctacgattgaaatgaaaactctattgttacctctgagttgtgttccacggaaaatgctatccagcagatcatttaggaaaaataattctatttttagcttttcatttctcagctgtccttttttcttgtttgatttttgacagcaatggagaatgggttatataaagactgcctgctaatatgaacagaaatgcatttgtaattcatgaaaataaatgtacatcttctatcttcacattcatgttaagattcagtgttgctttcctctggatcagcgtgtctgaatggacagtcaggttcaggttgtgctgaacacagaaatgctcacaggcctcactttgccgcccaggcactggcccagcacttggatttacataagatgagttagaaaggtacttctgtagggtcctttttacctctgctcggcagagaatcgatgctgtcatgttcctttattcacaatcttaggtctcaaatattctgtcaaaccctaacaaagaagccccgacatctcaggttggattccctggttctctctaaagagggcctgcccttgtgccccagaggtgctgctgggcacagccaagagttgggaagggccgccccacagtacgcagtcctcaccacccagcccagggtgctcacgctcaccactcctgtggctgaggaaggatagctggctcatcctcggaaaacagacccacatctctattcttgccctgaaatacgcgcttttcacttgcgtgctcagagctgccgtctgaaggtccacacagcattgacgggacacagaaatgtgactgttaccggataacactgattagtcagttttcatttataaaaaagcattgacagttttattactcttgtttctttttaaatggaaagttactattataaggttaatttgcagtcctcttctaaatagaaaaccatatccttggctactaacatctggagactgtgagctccttcccattccccttcctggtactgtggagtcagattggcatgaaaccactaacttcattctagaatcattgtagccataagttgtgtgctttttattaatcatgccaaacataatgtaactgggcagagaatggtcctaaccaaggtacctatgaaaagcgctagctatcatgtgtagtagatgcatcattttggctcttcttacatttgtaaaaatgtacagattaggtcatcttaattcatattagtgacacggaacagcacctccactatttgtatgttcaaataagctttcagactaatagcttttttggtgtctaaaatgtaagcaaaaaattcctgctgaaacattccagtcctttcatttagtataaaagaaatactgaacaagccagtgggatggaattgaaagaactaatcatgaggactctgtcctgacacaggtcctcaaagctagcagagatacgcagacattgtggcatctgggtagaagaatactgtattgtgtgtgcagtgcacagtgtgtggtgtgtgcacactcattccttctgctcttgggcacaggcagtgggtgtagaggtaaccagtagctttgagaagctacatgtagctcaccagtggttttctctaaggaatcacaaaggtaaactacccaaccacatgccacgtaatatttcagccattcagaggaaactgttttctctttatttgcttatatgttaatatggtttttaaattggtaacttttatatagtatggtaacagtatgttaatacacacatacatatgcacacatgctttgggtccttccataatacttttatatttgtaaatcaatgttttggagcaatcccaagtttaagggaaatatttttgtaaatgtaatggttttgaaaatctgagcaatccttttgcttatacatttttaaagcatttgtgctttaaaattgttatgctggtgtttgaaacatgatactcctgtggtgcagatgagaagctataacagtgaatatgtggtttctcttacgtcatccaccttgacatgatgggtcagaaacaaatggaaatccagagcaagtcctccagggttgcaccaggtttacctaaagcttgttgccttttcttgtgctgtttatccgtgtagagcactcaagaaagttctgaaactgctttgtatctgctttgtactgttggtgccttcttggtattgtaccccaaaattctgcatagattatttagtataatggtaagttaaaaaatgttaaaggaagattttattaagaatctgaatgtttattcattatattgttacaatttaacattaacatttatttgtggtatttgtgatttggttaatctgtataaaaattgtaagtagaaaggtttatatttcatcttaattcttttgatgttgtaaacgtactttttaaaagatggattatttgaatgtttatggcacctgacttgtaaaaaaaaaaaactacaaaaaaatccttagaatcattaaattgtgtccctgtattaccaaaataacacagcaccgtgcatgtatagtttaattgcagtttcatctgtgaaaacgtgaaattgtctagtccttcgttatgttccccagatgtcttccagatttgctctgcatgtggtaacttgtgttagggctgtgagctgttcctcgagttgaatggggatgtcagtgctcctagggttctccaggtggttcttcagaccttcacctgtgggggggggggtaggcggtgcccacgcccatctcctcatcctcctgaacttctgcaaccccactgctgggcagacatcctgggcaaccccttttttcagagcaagaagtcataaagataggatttcttggacatttggttcttatcaatattgggcattatgtaatgacttatttacaaaacaaagatactggaaaatgttttggatgtggtgttatggaaagagcacaggccttggacccatccagctgggttcagaactaccccctgcttataactgcggctggctgtgggccagtcattctgcgtctctgctttcttcctctgcttcagactgtcagctgtaaagtggaagcaatattacttgccttgtatatggtaaagattataaaaatacatttcaactgttcagcatagtacttcaaagcaagtactcagtaaatagcaagtctttttaaatgctgctttatttcactaaattttgttgtgaggtgtcactaaaatgcctgcaaacaaacgtaactgctaatctgagaggaaaccctcttactaatcagagaagaaaccctcctgtcagaaaccttcagggaagtgagctgatcacacctaaactgggagtttgcaatggggtatttgaagcactgtgggagtattccactggcccnctccctgagagacttaacagtcttccctgttgtccagattctgtataaggcaatcagaataatcatcttccttgttcagcagaggagcctggtcccattttccccactttgtgatgggcttctctcagcggtagctcagcagttccagatggcagtttggaccagcatctaggctggccagttcgctgtgtttacttagaaccaacacgttcagagctggcctggaccatctgaggggaacaggaaacacccctaggctgtggaagcaagtgcagacccccacccccggccctgaagccaagggggcagggtttgggagtggccaaagagaagcagtgcagggatgggttttcctagggacaggcttagcattcctgactctaggaagaaggagcagtgaggcggagaaacagtggaggggatggtggcattgggccccatggggccgagatggacacagggctcgttctcttgagtctggtgccaaggacagctgaagacgacatcattttcaggtggagaggagagagtggagggagatcatgccctgtgatgtgtcttttgcaggtgaaggtgggagacaaggtctctgctgacgatgaggcagagccaccgtgaaagttgtaataggaggactgcccgccgctggaagggcctgcagtgacgctaggacaccctctgcctgcatgtcacgttagctgggctgggcgaagtagaagaccaaggggaagaggtgcagtggggagaccaggtgggatgcaaccacaggaccagtggaggggctgtggcacgtgggcggagactgagtggctgggcatgtgttgtggctgagcatgtggtgtgggcagtggtcctagaccccgccatgtccggacaatgatatagagcgtctcagcatcgccagtctagactgtctatggagagcagaaagttgtctngggctgcctggggaactgtgaggccagctatatcaccgtcgctgatggtgacattacggtggtggcaggagcaaggagagagggaagaaggaccccgtccagctttagtcacaaaatacccaatggaagatgccagtgccaatcctgtgggtttccttgggacttcacactggctttcttatctgctccagatccattcagtagtcactgagttcctgccaaatactttgtagcgccagaagccaggagcggggtctgcagcagggcagtccccnttttcaggaaatgcctggagctgctggtccctgagagaaaggaaaacatctttcagccgtacgcaggccaagaaggccaatgtccagtagctttgtgattttttttatatttttttatttatttatttttgagatagagtcttgctctgtcgctcaggctggagtgcagtggcgtgatctccactcactgcaacttccgcctcctggggtcaagcagttctgcctcagcctcccgagtagctgggattacaggcacacgccaccacacccagctaatttttgtgtttttagtagagacggtttcaccatgtcggccaggctggtctcaaactcctgacctcagatgattcagcctcccaaagtgctgggattacaggtgtgagccactgcacccagcctgtgatgtttctgtggggttccacaaatgtgtgtgtgtgtaaaagctgatgattacagcaagaatgtgaacagtagcagttttccatttgaaggcaagttttgtctttatctgggtatcagaaggaccctctgggccattgtcgcttcctgtactcagagccaccctagtactacgggcacacacagaaaacagcagcctgcgtactttcaaaggaaaggcatctttaatcaccaatgcctggaaaaattattttgtttccctcttccttccgtcttgtttcctaacttcttaccaaagtttagagtctgagtttttcgtataataatgtcccacatccacacatcgggcctacagatgctctcccttgaatcgactggaaacatgacaccggttccatgctctggaactgtcacctgtgatgtgctgggctgtgtcccaagcacaggaatcccagcagtttcagctcgatgcagaaccaccatgctccagacacaggcttgggaaagacacgtcaaaattaaaatactaggtaagagaagcacctgattgggtagaagttggagaggaatcctggaattttgtggccagaaggagccactgccccttttgtttagtaagactagacagtaacagaagccagttgtcagctatgaaagtggtgggtgaagcaggggaggctcctctatggtgggaccctggacaagggaagccgaatgtgtgaagaaggggtgcgggggtgtgcggtgccctaggacactagggcaaaggtttcaaacctggaacaaggcactggaggaagatctgctgccagtcagcagtgcgggccctcgagttagcagtccgtgcgcagaggggccagttctgagaccagtttggagagtcaggcagtgacccattggccatgtcataattccttcagcctgcctcctctttaatcccagagagtgctctttcttcatacttcctttaaaatactaaattgttcccattccatggggagctggctaggctttacaggctaggaaatgtaggttttctgagatggaaccatctacacaaggaggaggaaggcactaagactacagatgagacccatgacagggctgagcatttggaagccaaccctggttgcttttcaagaattgctttgtggctgggtgcagtggttcacacctgtaattgcagcactttgggaggctgaggcaggtggattgcttgaacccaggagttcgagaccagcctgggcaacatatgggacaccccaccgcccccggctctgcaaaaaaattaaaaattagccaggcgtggtgtcatgagcctgtggtctcaactactcaggaggctgaggctggaggatcgcttgaacctgggaggtcaaggctccagtgaaccataattgtgccactgcactgcagcctgggcgacaatttgttttctaaattgcttttgaaagtctactgcattacatattccaaaaagcagtggttttcaaatacttttatcaccgatatccttttatgaaatgaaatcagtagaactttctctgctctgaataagcaagggtgggaacctgtctacctcccacagatagcataatgtgcctgccatagaggagccaaaaaatggtgatgggaactgagaggagagcaaatgtcacaaaagactgagcaattgagaaaacaaaacaagaccacagatgactgttaacgcctccacagtggaccaagaaaggacagagagctggcagcatgggcatcactgtctggtcggcagcaggaaggcctcgctagggaattgagtacagtcatctaactagtttaaaagtacaggaaggatgattaaggctattggagaggtcatacaaataggggaggggcaggcaatggctgataagacatgaatttgtaaggcgatgagtattgcagtcagcaaaacaaacgagactgctctcccaacacataactcagcagggaggccaggcattggtttaaccatttaatataaagaagttaaaattacaaatgcgctaagtgcctaaagaagaataagtgcaggaatgagagcagcatggactgccacagttttagaataagcactgtcactgctagattggaaacaaaaatccataaatttggcccggtgtggtggcggacgcctgtagtcccagctacttggaggctgaggcgtgagaatcgcttgaacccgggaggcggaggttgcagtgagccgagatggcgccactgcactccagcctgggcgtcagagtgagaactctgtatcaaaaaataaaaanaaaaaaaagtccataaatctgcaatgtctcagttaagaaagaaagactgggccaatgcagatttcaaaccggagaaagtcatactgtcagtgaaggccgcctgtggccggaaggcgccaggggattagcaccctggactcagtgttgctgggaaacagggccccaaggctgggagcacagtgtttaaagggcatctacccaagaagggagcacagggcaaggaggagctgcagggggncttggctgccaaagtgaattctgaggagagagctattgctgcctacgatatgcaggctgcacagaacacaagtggaatcagcaggcaggagaggcagctaacgacgcagcccgtttcttatttctgttttctcacaagcgatgaaagtggaaaagagggtgagcaggtggcccacacatgtgcctccagtgctgcggcccctccggggaccatcngccaggccccggggagggagccagccacagtgtgtccggctcttctctgaagggaagagagccttgaatagactgaagcgaagacggttctgcaaggacaaggcagaccgaaggcattggttttttttttcagataaggagaattagactcccaagtagacaccagagtcactgtttggttggtgggtgatagtggggtcacagtggctgcctgtgctcccccagggtgagcgtgactgtgctaacctgggtggggcagcatgcacacccctctggcagccctttgttgctcgctgatgacaagtttggatgatcccgccaaacagcttgctaagatgtagtccccagtgttggaggtggggcctgatgggaggtgctacccttgtgagataaggttgtgtaaaagcctgtggcacctccccacactgacgctctcacccctgctctggccatgtgccgcgcctgctcccacttccccttctgccaggagtaaaagcccccgagacctcccagaagccaagcagatgctagtgccatgcttcctctgcagcctgcagaactgtgagccaattaaacctcttttctctat

SEQ ID NO: 300103 - DNA, 5699 bp, Homo sapiens
  misc_feature (5557)..(5557): n is a, c, g, or t
acataatttctggagccctgtaccaacgtgtggccacatattctgtcaggaaccctgtgtgatcatggtctggatctgcaacacgggccaggccaaagtcacagatcttgagatcacaggtggtgttgagcagcaggcaggcaggcaatcggtccgagtggctgtcggctcttcagctctcccgctcggcgtcttccttcctcctcccggtcagcgtcggcggctgcaccggcggcggcgcagtccctgcgggaggggcgacaagagctgagcggcggccgccgagcgtcgagctcagcgcggcggaggcggcggcggcccggcagccaacatggcggcggcggcggcggcgggcgcgggcccggagatggtccgcgggcaggtgttcgacgtggggccgcgctacaccaacctctcgtacatcggcgagggcgcctacggcatggtgtgctctgcttatgataatgtcaacaaagttcgagtagctatcaagaaaatcagcccctttgagcaccagacctactgccagagaaccctgagggagataaaaatcttactgcgcttcagacatgagaacatcattggaatcaatgacattattcgagcaccaaccatcgagcaaatgaaagatgtatatatagtacaggacctcatggaaacagatctttacaagctcttgaagacacaacacctcagcaatgaccatatctgctattttctctaccagatcctcagagggttaaaatatatccattcagctaacgttctgcaccgtgacctcaagccttccaacctgctgctcaacaccacctgtgatctcaagatctgtgactttggcctggcccgtgttgcagatccagaccatgatcacacagggttcctgacagaatatgtggccacacgttggtacagggctccagaaattatgttgaattccaagggctacaccaagtccattgatatttggtctgtaggctgcattctggcagaaatgctttctaacaggcccatctttccagggaagcattatcttgaccagctgaaccacattttgggtattcttggatccccatcacaagaagacctgaattgtataataaatttaaaagctaggaactatttgctttctcttccacacaaaaataaggtgccatggaacaggctgttcccaaatgctgactccaaagctctggacttattggacaaaatgttgacattcaacccacacaagaggattgaagtagaacaggctctggcccacccatatctggagcagtattacgacccgagtgacgagcccatcgccgaagcaccattcaagttcgacatggaattggatgacttgcctaaggaaaagctcaaagaactaatttttgaagagactgctagattccagccaggatacagatcttaaatttgtcaggacaagggctcagaggactggacgtgctcagacatcggtgttcttcttcccagttcttgacccctggtcctgtctccagcccgtcttggcttatccactttgactcctttgagccgtttggaggggcggtttctggtagttgtggcttttatgctttcaaagaatttcttcagtccagagaattcctcctggcagccctgtgtgtgtcacccattggtgacctgcggcagtatgtacttcagtgcacctactgcttactgttgctttagtcactaattgctttctggtttgaaagatgcagtggttcctccctctcctgaatccttttctacatgatgccctgctgaccatgcagccgcaccagagagagattcttccccaattggctctagtcactggcatctcactttatgatagggaaggctactacctagggcactttaagtcagtgacagccccttatttgcacttcaccttttgaccataactgtttccccagagcaggagcttgtggaaataccttggctgatgttgcagcctgcagcaagtgcttccgtctccggaatccttggggagcacttgtccacgtcttttctcatatcatggtagtcactaacatatataaggtatgtgctattggcccagcttttagaaaatgcagtcatttttctaaataaaaaggaagtactgcacccagcagtgtcactctgtagttactgtggtcacttgtaccatatagaggtgtaacacttgtcaagaagcgttatgtgcagtacttaatgtttgtaagacttacaaaaaaagatttaaagtggcagcttcactcgacatttggtgagagaagtacaaaggttgcagtgctgagctgtgggcggtttctggggatgtcccagggtggaactccacatgctggtgcatatacgcccttgagctacttcaaatgtgggtgtttcagtaaccacgttccatgcctgaggatttagcagagaggaacactgcgtctttaaatgagaaagtatacaattctttttccttctacagcatgtcagcatctcaagttcatttttcaacctacagtataacaatttgtaataaagcctccaggagctcatgacgtgaagcactgttctgtcctcaagtactcaaatatttctgatactgctgagtcagactgtcagaaaaagctagcactaactcgtgtttggagctctatccatattttactgatctctttaagtatttgttcctgccactgtgtactgtggagttgactcggtgttctgtcccagtgcggtgcctcctcttgacttccccactgctctctgtggtgagaaatttgccttgttcaataattactgtaccctcgcatgactgttacagctttctgtgcagagatgactgtccaagtgccacatgcctacgattgaaatgaaaactctattgttacctctgagttgtgttccacggaaaatgctatccagcagatcatttaggaaaaataattctatttttagcttttcatttctcagctgtccttttttcttgtttgatttttgacagcaatggagaatgggttatataaagactgcctgctaatatgaacagaaatgcatttgtaattcatgaaaataaatgtacatcttctatcttcacattcatgttaagattcagtgttgctttcctctggatcagcgtgtctgaatggacagtcaggttcaggttgtgctgaacacagaaatgctcacaggcctcactttgccgcccaggcactggcccagcacttggatttacataagatgagttagaaaggtacttctgtagggtcctttttacctctgctcggcagagaatcgatgctgtcatgttcctttattcacaatcttaggtctcaaatattctgtcaaaccctaacaaagaagccccgacatctcaggttggattccctggttctctctaaagagggcctgcccttgtgccccagaggtgctgctgggcacagccaagagttgggaagggccgccccacagtacgcagtcctcaccacccagcccagggtgctcacgctcaccactcctgtggctgaggaaggatagctggctcatcctcggaaaacagacccacatctctattcttgccctgaaatacgcgcttttcacttgcgtgctcagagctgccgtctgaaggtccacacagcattgacgggacacagaaatgtgactgttaccggataacactgattagtcagttttcatttataaaaaagcattgacagttttattactcttgtttctttttaaatggaaagttactattataaggttaatttgcagtcctcttctaaatagaaaaccatatccttggctactaacatctggagactgtgagctccttcccattccccttcctggtactgtggagtcagattggcatgaaaccactaacttcattctagaatcattgtagccataagttgtgtgctttttattaatcatgccaaacataatgtaactgggcagagaatggtcctaaccaaggtacctatgaaaagcgctagctatcatgtgtagtagatgcatcattttggctcttcttacatttgtaaaaatgtacagattaggtcatcttaattcatattagtgacacggaacagcacctccactatttgtatgttcaaataagctttcagactaatagcttttttggtgtctaaaatgtaagcaaaaaattcctgctgaaacattccagtcctttcatttagtataaaagaaatactgaacaagccagtgggatggaattgaaagaactaatcatgaggactctgtcctgacacaggtcctcaaagctagcagagatacgcagacattgtggcatctgggtagaagaatactgtattgtgtgtgcagtgcacagtgtgtggtgtgtgcacactcattccttctgctcttgggcacaggcagtgggtgtagaggtaaccagtagctttgagaagctacatgtagctcaccagtggttttctctaaggaatcacaaaggtaaactacccaaccacatgccacgtaatatttcagccattcagaggaaactgttttctctttatttgcttatatgttaatatggtttttaaattggtaacttttatatagtatggtaacagtatgttaatacacacatacatatgcacacatgctttgggtccttccataatacttttatatttgtaaatcaatgttttggagcaatcccaagtttaagggaaatatttttgtaaatgtaatggttttgaaaatctgagcaatccttttgcttatacatttttaaagcatttgtgctttaaaattgttatgctggtgtttgaaacatgatactcctgtggtgcagatgagaagctataacagtgaatatgtggtttctcttacgtcatccaccttgacatgatgggtcagaaacaaatggaaatccagagcaagtcctccagggttgcaccaggtttacctaaagcttgttgccttttcttgtgctgtttatccgtgtagagcactcaagaaagttctgaaactgctttgtatctgctttgtactgttggtgccttcttggtattgtaccccaaaattctgcatagattatttagtataatggtaagttaaaaaatgttaaaggaagattttattaagaatctgaatgtttattcattatattgttacaatttaacattaacatttatttgtggtatttgtgatttggttaatctgtataaaaattgtaagtagaaaggtttatatttcatcttaattcttttgatgttgtaaacgtactttttaaaagatggattatttgaatgtttatggcacctgacttgtaaaaaaaaaaaactacaaaaaaatccttagaatcattaaattgtgtccctgtattaccaaaataacacagcaccgtgcatgtatagtttaattgcagtttcatctgtgaaaacgtgaaattgtctagtccttcgttatgttccccagatgtcttccagatttgctctgcatgtggtaacttgtgttagggctgtgagctgttcctcgagttgaatggggatgtcagtgctcctagggttctccaggtggttcttcagaccttcacctggggagacgngcggtcgccttttccattgccatattgtctatgctgttctttacccactacctgatttgctaaaagactagtggtgatataaggtgcgggcactttattttaaagatttatttccctaacattagaattgaatccttggtga

SEQ ID NO: 300104 - DNA, 10766 bp, Homo sapiens
  misc_feature (5818)..(5818): n is a, c, g, or t
  misc_feature (6756)..(6756): n is a, c, g, or t
  misc_feature (7031)..(7031): n is a, c, g, or t
  misc_feature (9724)..(9724): n is a, c, g, or t
  misc_feature (9962)..(9962): n is a, c, g, or t
  misc_feature (10177)..(10177): n is a, c, g, or t
acataatttctggagccctgtaccaacgtgtggccacatattctgtcaggaaccctgtgtgatcatggtctggatctgcaacacgggccaggccaaagtcacagatcttgagatcacaggtggtgttgagcagcaggcaggcaggcaatcggtccgagtggctgtcggctcttcagctctcccgctcggcgtcttccttcctcctcccggtcagcgtcggcggctgcaccggcggcggcgcagtccctgcgggaggggcgacaagagctgagcggcggccgccgagcgtcgagctcagcgcggcggaggcggcggcggcccggcagccaacatggcggcggcggcggcggcgggcgcgggcccggagatggtccgcgggcaggtgttcgacgtggggccgcgctacaccaacctctcgtacatcggcgagggcgcctacggcatggtgtgctctgcttatgataatgtcaacaaagttcgagtagctatcaagaaaatcagcccctttgagcaccagacctactgccagagaaccctgagggagataaaaatcttactgcgcttcagacatgagaacatcattggaatcaatgacattattcgagcaccaaccatcgagcaaatgaaagatgtatatatagtacaggacctcatggaaacagatctttacaagctcttgaagacacaacacctcagcaatgaccatatctgctattttctctaccagatcctcagagggttaaaatatatccattcagctaacgttctgcaccgtgacctcaagccttccaacctgctgctcaacaccacctgtgatctcaagatctgtgactttggcctggcccgtgttgcagatccagaccatgatcacacagggttcctgacagaatatgtggccacacgttggtacagggctccagaaattatgttgaattccaagggctacaccaagtccattgatatttggtctgtaggctgcattctggcagaaatgctttctaacaggcccatctttccagggaagcattatcttgaccagctgaaccacattttgggtattcttggatccccatcacaagaagacctgaattgtataataaatttaaaagctaggaactatttgctttctcttccacacaaaaataaggtgccatggaacaggctgttcccaaatgctgactccaaagctctggacttattggacaaaatgttgacattcaacccacacaagaggattgaagtagaacaggctctggcccacccatatctggagcagtattacgacccgagtgacgagcccatcgccgaagcaccattcaagttcgacatggaattggatgacttgcctaaggaaaagctcaaagaactaatttttgaagagactgctagattccagccaggatacagatcttaaatttgtcaggacaagggctcagaggactggacgtgctcagacatcggtgttcttcttcccagttcttgacccctggtcctgtctccagcccgtcttggcttatccactttgactcctttgagccgtttggaggggcggtttctggtagttgtggcttttatgctttcaaagaatttcttcagtccagagaattcctcctggcagccctgtgtgtgtcacccattggtgacctgcggcagtatgtacttcagtgcacctactgcttactgttgctttagtcactaattgctttctggtttgaaagatgcagtggttcctccctctcctgaatccttttctacatgatgccctgctgaccatgcagccgcaccagagagagattcttccccaattggctctagtcactggcatctcactttatgatagggaaggctactacctagggcactttaagtcagtgacagccccttatttgcacttcaccttttgaccataactgtttccccagagcaggagcttgtggaaataccttggctgatgttgcagcctgcagcaagtgcttccgtctccggaatccttggggagcacttgtccacgtcttttctcatatcatggtagtcactaacatatataaggtatgtgctattggcccagcttttagaaaatgcagtcatttttctaaataaaaaggaagtactgcacccagcagtgtcactctgtagttactgtggtcacttgtaccatatagaggtgtaacacttgtcaagaagcgttatgtgcagtacttaatgtttgtaagacttacaaaaaaagatttaaagtggcagcttcactcgacatttggtgagagaagtacaaaggttgcagtgctgagctgtgggcggtttctggggatgtcccaggtgcggtgcctcctcttgacttccccactgctctctgtggtgagaaatttgccttgttcaataattactgtaccctcgcatgactgttacagctttctgtgcagagatgactgtccaagtgccacatgcctacgattgaaatgaaaactctattgttacctctgagttgtgttccacggaaaatgctatccagcagatcatttaggaaaaataattctatttttagcttttcatttctcagctgtccttttttcttgtttgatttttgacagcaatggagaatgggttatataaagactgcctgctaatatgaacagaaatgcatttgtaattcatgaaaataaatgtacatcttctatcttcacattcatgttaagattcagtgttgctttcctctggatcagcgtgtctgaatggacagtcaggttcaggttgtgctgaacacagaaatgctcacaggcctcactttgccgcccaggcactggcccagcacttggatttacataagatgagttagaaaggtacttctgtagggtcctttttacctctgctcggcagagaatcgatgctgtcatgttcctttattcacaatcttaggtctcaaatattctgtcaaaccctaacaaagaagccccgacatctcaggttggattccctggttctctctaaagagggcctgcccttgtgccccagaggtgctgctgggcacagccaagagttgggaagggccgccccacagtacgcagtcctcaccacccagcccagggtgctcacgctcaccactcctgtggctgaggaaggatagctggctcatcctcggaaaacagacccacatctctattcttgccctgaaatacgcgcttttcacttgcgtgctcagagctgccgtctgaaggtccacacagcattgacgggacacagaaatgtgactgttaccggataacactgattagtcagttttcatttataaaaaagcattgacagttttattactcttgtttctttttaaatggaaagttactattataaggttaatttgcagtcctcttctaaatagaaaaccatatccttggctactaacatctggagactgtgagctccttcccattccccttcctggtactgtggagtcagattggcatgaaaccactaacttcattctagaatcattgtagccataagttgtgtgctttttattaatcatgccaaacataatgtaactgggcagagaatggtcctaaccaaggtacctatgaaaagcgctagctatcatgtgtagtagatgcatcattttggctcttcttacatttgtaaaaatgtacagattaggtcatcttaattcatattagtgacacggaacagcacctccactatttgtatgttcaaataagctttcagactaatagcttttttggtgtctaaaatgtaagcaaaaaattcctgctgaaacattccagtcctttcatttagtataaaagaaatactgaacaagccagtgggatggaattgaaagaactaatcatgaggactctgtcctgacacaggtcctcaaagctagcagagatacgcagacattgtggcatctgggtagaagaatactgtattgtgtgtgcagtgcacagtgtgtggtgtgtgcacactcattccttctgctcttgggcacaggcagtgggtgtagaggtaaccagtagctttgagaagctacatgtagctcaccagtggttttctctaaggaatcacaaaggtaaactacccaaccacatgccacgtaatatttcagccattcagaggaaactgttttctctttatttgcttatatgttaatatggtttttaaattggtaacttttatatagtatggtaacagtatgttaatacacacatacatatgcacacatgctttgggtccttccataatacttttatatttgtaaatcaatgttttggagcaatcccaagtttaagggaaatatttttgtaaatgtaatggttttgaaaatctgagcaatccttttgcttatacatttttaaagcatttgtgctttaaaattgttatgctggtgtttgaaacatgatactcctgtggtgcagatgagaagctataacagtgaatatgtggtttctcttacgtcatccaccttgacatgatgggtcagaaacaaatggaaatccagagcaagtcctccagggttgcaccaggtttacctaaagcttgttgccttttcttgtgctgtttatccgtgtagagcactcaagaaagttctgaaactgctttgtatctgctttgtactgttggtgccttcttggtattgtaccccaaaattctgcatagattatttagtataatggtaagttaaaaaatgttaaaggaagattttattaagaatctgaatgtttattcattatattgttacaatttaacattaacatttatttgtggtatttgtgatttggttaatctgtataaaaattgtaagtagaaaggtttatatttcatcttaattcttttgatgttgtaaacgtactttttaaaagatggattatttgaatgtttatggcacctgacttgtaaaaaaaaaaaactacaaaaaaatccttagaatcattaaattgtgtccctgtattaccaaaataacacagcaccgtgcatgtatagtttaattgcagtttcatctgtgaaaacgtgaaattgtctagtccttcgttatgttccccagatgtcttccagatttgctctgcatgtggtaacttgtgttagggctgtgagctgttcctcgagttgaatggggatgtcagtgctcctagggttctccaggtggttcttcagaccttcacctgtgggggggggggtaggcggtgcccacgcccatctcctcatcctcctgaacttctgcaaccccactgctgggcagacatcctgggcaaccccttttttcagagcaagaagtcataaagataggatttcttggacatttggttcttatcaatattgggcattatgtaatgacttatttacaaaacaaagatactggaaaatgttttggatgtggtgttatggaaagagcacaggccttggacccatccagctgggttcagaactaccccctgcttataactgcggctggctgtgggccagtcattctgcgtctctgctttcttcctctgcttcagactgtcagctgtaaagtggaagcaatattacttgccttgtatatggtaaagattataaaaatacatttcaactgttcagcatagtacttcaaagcaagtactcagtaaatagcaagtctttttaaatgctgctttatttcactaaattttgttgtgaggtgtcactaaaatgcctgcaaacaaacgtaactgctaatctgagaggaaaccctcttactaatcagagaagaaaccctcctgtcagaaaccttcagggaagtgagctgatcacacctaaactgggagtttgcaatggggtatttgaagcactgtgggagtattccactggcccnctccctgagagacttaacagtcttccctgttgtccagattctgtataaggcaatcagaataatcatcttccttgttcagcagaggagcctggtcccattttccccactttgtgatgggcttctctcagcggtagctcagcagttccagatggcagtttggaccagcatctaggctggccagttcgctgtgtttacttagaaccaacacgttcagagctggcctggaccatctgaggggaacaggaaacacccctaggctgtggaagcaagtgcagacccccacccccggccctgaagccaagggggcagggtttgggagtggccaaagagaagcagtgcagggatgggttttcctagggacaggcttagcattcctgactctaggaagaaggagcagtgaggcggagaaacagtggaggggatggtggcattgggccccatggggccgagatggacacagggctcgttctcttgagtctggtgccaaggacagctgaagacgacatcattttcaggtggagaggagagagtggagggagatcatgccctgtgatgtgtcttttgcaggtgaaggtgggagacaaggtctctgctgacgatgaggcagagccaccgtgaaagttgtaataggaggactgcccgccgctggaagggcctgcagtgacgctaggacaccctctgcctgcatgtcacgttagctgggctgggcgaagtagaagaccaaggggaagaggtgcagtggggagaccaggtgggatgcaaccacaggaccagtggaggggctgtggcacgtgggcggagactgagtggctgggcatgtgttgtggctgagcatgtggtgtgggcagtggtcctagaccccgccatgtccggacaatgatatagagcgtctcagcatcgccagtctagactgtctatggagagcagaaagttgtctngggctgcctggggaactgtgaggccagctatatcaccgtcgctgatggtgacattacggtggtggcaggagcaaggagagagggaagaaggaccccgtccagctttagtcacaaaatacccaatggaagatgccagtgccaatcctgtgggtttccttgggacttcacactggctttcttatctgctccagatccattcagtagtcactgagttcctgccaaatactttgtagcgccagaagccaggagcggggtctgcagcagggcagtccccnttttcaggaaatgcctggagctgctggtccctgagagaaaggaaaacatctttcagccgtacgcaggccaagaaggccaatgtccagtagctttgtgattttttttatatttttttatttatttatttttgagatagagtcttgctctgtcgctcaggctggagtgcagtggcgtgatctccactcactgcaacttccgcctcctggggtcaagcagttctgcctcagcctcccgagtagctgggattacaggcacacgccaccacacccagctaatttttgtgtttttagtagagacggtttcaccatgtcggccaggctggtctcaaactcctgacctcagatgattcagcctcccaaagtgctgggattacaggtgtgagccactgcacccagcctgtgatgtttctgtggggttccacaaatgtgtgtgtgtgtaaaagctgatgattacagcaagaatgtgaacagtagcagttttccatttgaaggcaagttttgtctttatctgggtatcagaaggaccctctgggccattgtcgcttcctgtactcagagccaccctagtactacgggcacacacagaaaacagcagcctgcgtactttcaaaggaaaggcatctttaatcaccaatgcctggaaaaattattttgtttccctcttccttccgtcttgtttcctaacttcttaccaaagtttagagtctgagtttttcgtataataatgtcccacatccacacatcgggcctacagatgctctcccttgaatcgactggaaacatgacaccggttccatgctctggaactgtcacctgtgatgtgctgggctgtgtcccaagcacaggaatcccagcagtttcagctcgatgcagaaccaccatgctccagacacaggcttgggaaagacacgtcaaaattaaaatactaggtaagagaagcacctgattgggtagaagttggagaggaatcctggaattttgtggccagaaggagccactgccccttttgtttagtaagactagacagtaacagaagccagttgtcagctatgaaagtggtgggtgaagcaggggaggctcctctatggtgggaccctggacaagggaagccgaatgtgtgaagaaggggtgcgggggtgtgcggtgccctaggacactagggcaaaggtttcaaacctggaacaaggcactggaggaagatctgctgccagtcagcagtgcgggccctcgagttagcagtccgtgcgcagaggggccagttctgagaccagtttggagagtcaggcagtgacccattggccatgtcataattccttcagcctgcctcctctttaatcccagagagtgctctttcttcatacttcctttaaaatactaaattgttcccattccatggggagctggctaggctttacaggctaggaaatgtaggttttctgagatggaaccatctacacaaggaggaggaaggcactaagactacagatgagacccatgacagggctgagcatttggaagccaaccctggttgcttttcaagaattgctttgtggctgggtgcagtggttcacacctgtaattgcagcactttgggaggctgaggcaggtggattgcttgaacccaggagttcgagaccagcctgggcaacatatgggacaccccaccgcccccggctctgcaaaaaaattaaaaattagccaggcgtggtgtcatgagcctgtggtctcaactactcaggaggctgaggctggaggatcgcttgaacctgggaggtcaaggctccagtgaaccataattgtgccactgcactgcagcctgggcgacaatttgttttctaaattgcttttgaaagtctactgcattacatattccaaaaagcagtggttttcaaatacttttatcaccgatatccttttatgaaatgaaatcagtagaactttctctgctctgaataagcaagggtgggaacctgtctacctcccacagatagcataatgtgcctgccatagaggagccaaaaaatggtgatgggaactgagaggagagcaaatgtcacaaaagactgagcaattgagaaaacaaaacaagaccacagatgactgttaacgcctccacagtggaccaagaaaggacagagagctggcagcatgggcatcactgtctggtcggcagcaggaaggcctcgctagggaattgagtacagtcatctaactagtttaaaagtacaggaaggatgattaaggctattggagaggtcatacaaataggggaggggcaggcaatggctgataagacatgaatttgtaaggcgatgagtattgcagtcagcaaaacaaacgagactgctctcccaacacataactcagcagggaggccaggcattggtttaaccatttaatataaagaagttaaaattacaaatgcgctaagtgcctaaagaagaataagtgcaggaatgagagcagcatggactgccacagttttagaataagcactgtcactgctagattggaaacaaaaatccataaatttggcccggtgtggtggcggacgcctgtagtcccagctacttggaggctgaggcgtgagaatcgcttgaacccgggaggcggaggttgcagtgagccgagatggcgccactgcactccagcctgggcgtcagagtgagaactctgtatcaaaaaataaaaanaaaaaaaagtccataaatctgcaatgtctcagttaagaaagaaagactgggccaatgcagatttcaaaccggagaaagtcatactgtcagtgaaggccgcctgtggccggaaggcgccaggggattagcaccctggactcagtgttgctgggaaacagggccccaaggctgggagcacagtgtttaaagggcatctacccaagaagggagcacagggcaaggaggagctgcagggggncttggctgccaaagtgaattctgaggagagagctattgctgcctacgatatgcaggctgcacagaacacaagtggaatcagcaggcaggagaggcagctaacgacgcagcccgtttcttatttctgttttctcacaagcgatgaaagtggaaaagagggtgagcaggtggcccacacatgtgcctccagtgctgcggcccctccggggaccatcngccaggccccggggagggagccagccacagtgtgtccggctcttctctgaagggaagagagccttgaatagactgaagcgaagacggttctgcaaggacaaggcagaccgaaggcattggttttttttttcagataaggagaattagactcccaagtagacaccagagtcactgtttggttggtgggtgatagtggggtcacagtggctgcctgtgctcccccagggtgagcgtgactgtgctaacctgggtggggcagcatgcacacccctctggcagccctttgttgctcgctgatgacaagtttggatgatcccgccaaacagcttgctaagatgtagtccccagtgttggaggtggggcctgatgggaggtgctacccttgtgagataaggttgtgtaaaagcctgtggcacctccccacactgacgctctcacccctgctctggccatgtgccgcgcctgctcccacttccccttctgccaggagtaaaagcccccgagacctcccagaagccaagcagatgctagtgccatgcttcctctgcagcctgcagaactgtgagccaattaaacctcttttctctat

SEQ ID NO: 300105 - DNA, 11017 bp, Homo sapiens
  misc_feature (6069)..(6069): n is a, c, g, or t
  misc_feature (7007)..(7007): n is a, c, g, or t
  misc_feature (7282)..(7282): n is a, c, g, or t
  misc_feature (9975)..(9975): n is a, c, g, or t
  misc_feature (10213)..(10213): n is a, c, g, or t
  misc_feature (10428)..(10428): n is a, c, g, or t
gcgcccctccctccgcccgcccgccggcccgcccgtcagtctggcaggcaggcaggcaatcggtccgagtggctgtcggctcttcagctctcccgctcggcgtcttccttcctcctcccggtcagcgtcggcggctgcaccggcggcggcgcagtccctgcgggaggggcgacaagagctgagcggcggccgccgagcgtcgagctcagcgcggcggaggcggcggcggcccggcagccaacatggcggcggcggcggcggcgggcgcgggcccggagatggtccgcgggcaggtgttcgacgtggggccgcgctacaccaacctctcgtacatcggcgagggcgcctacggcatggtgtgctctgcttatgataatgtcaacaaagttcgagtagctatcaagaaaatcagcccctttgagcaccagacctactgccagagaaccctgagggagataaaaatcttactgcgcttcagacatgagaacatcattggaatcaatgacattattcgagcaccaaccatcgagcaaatgaaagatgtatatatagtacaggacctcatggaaacagatctttacaagctcttgaagacacaacacctcagcaatgaccatatctgctattttctctaccagatcctcagaggctgctgctcaacaccacctgtgatctcaagatctgtgactttggcctggcccgtgttgcagatccagaccatgatcacacagggttcctgacagaatatgtggccacacgttggtacagggctccagaaattatgttgaattccaagggctacaccaagtccattgatatttggtctgtaggctgcattctggcagaaatgctttctaacaggcccatctttccagggaagcattatcttgaccagctgaaccacattttgggtattcttggatccccatcacaagaagacctgaattgtataataaatttaaaagctaggaactatttgctttctcttccacacaaaaataaggtgccatggaacaggctgttcccaaatgctgactccaaagctctggacttattggacaaaatgttgacattcaacccacacaagaggattgaagtagaacaggctctggcccacccatatctggagcagtattacgacccgagtgacgagcccatcgccgaagcaccattcaagttcgacatggaattggatgacttgcctaaggaaaagctcaaagaactaatttttgaagagactgctagattccagccaggatacagatcttaaatttgtcaggacaagggctcagaggactggacgtgctcagacatcggtgttcttcttcccagttcttgacccctggtcctgtctccagcccgtcttggcttatccactttgactcctttgagccgtttggaggggcggtttctggtagttgtggcttttatgctttcaaagaatttcttcagtccagagaattcctcctggcagccctgtgtgtgtcacccattggtgacctgcggcagtatgtacttcagtgcacctactgcttactgttgctttagtcactaattgctttctggtttgaaagatgcagtggttcctccctctcctgaatccttttctacatgatgccctgctgaccatgcagccgcaccagagagagattcttccccaattggctctagtcactggcatctcactttatgatagggaaggctactacctagggcactttaagtcagtgacagccccttatttgcacttcaccttttgaccataactgtttccccagagcaggagcttgtggaaataccttggctgatgttgcagcctgcagcaagtgcttccgtctccggaatccttggggagcacttgtccacgtcttttctcatatcatggtagtcactaacatatataaggtatgtgctattggcccagcttttagaaaatgcagtcatttttctaaataaaaaggaagtactgcacccagcagtgtcactctgtagttactgtggtcacttgtaccatatagaggtgtaacacttgtcaagaagcgttatgtgcagtacttaatgtttgtaagacttacaaaaaaagatttaaagtggcagcttcactcgacatttggtgagagaagtacaaaggttgcagtgctgagctgtgggcggtttctggggatgtcccagggtggaactccacatgctggtgcatatacgcccttgagctacttcaaatgtgggtgtttcagtaaccacgttccatgcctgaggatttagcagagaggaacactgcgtctttaaatgagaaagtatacaattctttttccttctacagcatgtcagcatctcaagttcatttttcaacctacagtataacaatttgtaataaagcctccaggagctcatgacgtgaagcactgttctgtcctcaagtactcaaatatttctgatactgctgagtcagactgtcagaaaaagctagcactaactcgtgtttggagctctatccatattttactgatctctttaagtatttgttcctgccactgtgtactgtggagttgactcggtgttctgtcccagtgcggtgcctcctcttgacttccccactgctctctgtggtgagaaatttgccttgttcaataattactgtaccctcgcatgactgttacagctttctgtgcagagatgactgtccaagtgccacatgcctacgattgaaatgaaaactctattgttacctctgagttgtgttccacggaaaatgctatccagcagatcatttaggaaaaataattctatttttagcttttcatttctcagctgtccttttttcttgtttgatttttgacagcaatggagaatgggttatataaagactgcctgctaatatgaacagaaatgcatttgtaattcatgaaaataaatgtacatcttctatcttcacattcatgttaagattcagtgttgctttcctctggatcagcgtgtctgaatggacagtcaggttcaggttgtgctgaacacagaaatgctcacaggcctcactttgccgcccaggcactggcccagcacttggatttacataagatgagttagaaaggtacttctgtagggtcctttttacctctgctcggcagagaatcgatgctgtcatgttcctttattcacaatcttaggtctcaaatattctgtcaaaccctaacaaagaagccccgacatctcaggttggattccctggttctctctaaagagggcctgcccttgtgccccagaggtgctgctgggcacagccaagagttgggaagggccgccccacagtacgcagtcctcaccacccagcccagggtgctcacgctcaccactcctgtggctgaggaaggatagctggctcatcctcggaaaacagacccacatctctattcttgccctgaaatacgcgcttttcacttgcgtgctcagagctgccgtctgaaggtccacacagcattgacgggacacagaaatgtgactgttaccggataacactgattagtcagttttcatttataaaaaagcattgacagttttattactcttgtttctttttaaatggaaagttactattataaggttaatttgcagtcctcttctaaatagaaaaccatatccttggctactaacatctggagactgtgagctccttcccattccccttcctggtactgtggagtcagattggcatgaaaccactaacttcattctagaatcattgtagccataagttgtgtgctttttattaatcatgccaaacataatgtaactgggcagagaatggtcctaaccaaggtacctatgaaaagcgctagctatcatgtgtagtagatgcatcattttggctcttcttacatttgtaaaaatgtacagattaggtcatcttaattcatattagtgacacggaacagcacctccactatttgtatgttcaaataagctttcagactaatagcttttttggtgtctaaaatgtaagcaaaaaattcctgctgaaacattccagtcctttcatttagtataaaagaaatactgaacaagccagtgggatggaattgaaagaactaatcatgaggactctgtcctgacacaggtcctcaaagctagcagagatacgcagacattgtggcatctgggtagaagaatactgtattgtgtgtgcagtgcacagtgtgtggtgtgtgcacactcattccttctgctcttgggcacaggcagtgggtgtagaggtaaccagtagctttgagaagctacatgtagctcaccagtggttttctctaaggaatcacaaaggtaaactacccaaccacatgccacgtaatatttcagccattcagaggaaactgttttctctttatttgcttatatgttaatatggtttttaaattggtaacttttatatagtatggtaacagtatgttaatacacacatacatatgcacacatgctttgggtccttccataatacttttatatttgtaaatcaatgttttggagcaatcccaagtttaagggaaatatttttgtaaatgtaatggttttgaaaatctgagcaatccttttgcttatacatttttaaagcatttgtgctttaaaattgttatgctggtgtttgaaacatgatactcctgtggtgcagatgagaagctataacagtgaatatgtggtttctcttacgtcatccaccttgacatgatgggtcagaaacaaatggaaatccagagcaagtcctccagggttgcaccaggtttacctaaagcttgttgccttttcttgtgctgtttatccgtgtagagcactcaagaaagttctgaaactgctttgtatctgctttgtactgttggtgccttcttggtattgtaccccaaaattctgcatagattatttagtataatggtaagttaaaaaatgttaaaggaagattttattaagaatctgaatgtttattcattatattgttacaatttaacattaacatttatttgtggtatttgtgatttggttaatctgtataaaaattgtaagtagaaaggtttatatttcatcttaattcttttgatgttgtaaacgtactttttaaaagatggattatttgaatgtttatggcacctgacttgtaaaaaaaaaaaactacaaaaaaatccttagaatcattaaattgtgtccctgtattaccaaaataacacagcaccgtgcatgtatagtttaattgcagtttcatctgtgaaaacgtgaaattgtctagtccttcgttatgttccccagatgtcttccagatttgctctgcatgtggtaacttgtgttagggctgtgagctgttcctcgagttgaatggggatgtcagtgctcctagggttctccaggtggttcttcagaccttcacctgtgggggggggggtaggcggtgcccacgcccatctcctcatcctcctgaacttctgcaaccccactgctgggcagacatcctgggcaaccccttttttcagagcaagaagtcataaagataggatttcttggacatttggttcttatcaatattgggcattatgtaatgacttatttacaaaacaaagatactggaaaatgttttggatgtggtgttatggaaagagcacaggccttggacccatccagctgggttcagaactaccccctgcttataactgcggctggctgtgggccagtcattctgcgtctctgctttcttcctctgcttcagactgtcagctgtaaagtggaagcaatattacttgccttgtatatggtaaagattataaaaatacatttcaactgttcagcatagtacttcaaagcaagtactcagtaaatagcaagtctttttaaatgctgctttatttcactaaattttgttgtgaggtgtcactaaaatgcctgcaaacaaacgtaactgctaatctgagaggaaaccctcttactaatcagagaagaaaccctcctgtcagaaaccttcagggaagtgagctgatcacacctaaactgggagtttgcaatggggtatttgaagcactgtgggagtattccactggcccnctccctgagagacttaacagtcttccctgttgtccagattctgtataaggcaatcagaataatcatcttccttgttcagcagaggagcctggtcccattttccccactttgtgatgggcttctctcagcggtagctcagcagttccagatggcagtttggaccagcatctaggctggccagttcgctgtgtttacttagaaccaacacgttcagagctggcctggaccatctgaggggaacaggaaacacccctaggctgtggaagcaagtgcagacccccacccccggccctgaagccaagggggcagggtttgggagtggccaaagagaagcagtgcagggatgggttttcctagggacaggcttagcattcctgactctaggaagaaggagcagtgaggcggagaaacagtggaggggatggtggcattgggccccatggggccgagatggacacagggctcgttctcttgagtctggtgccaaggacagctgaagacgacatcattttcaggtggagaggagagagtggagggagatcatgccctgtgatgtgtcttttgcaggtgaaggtgggagacaaggtctctgctgacgatgaggcagagccaccgtgaaagttgtaataggaggactgcccgccgctggaagggcctgcagtgacgctaggacaccctctgcctgcatgtcacgttagctgggctgggcgaagtagaagaccaaggggaagaggtgcagtggggagaccaggtgggatgcaaccacaggaccagtggaggggctgtggcacgtgggcggagactgagtggctgggcatgtgttgtggctgagcatgtggtgtgggcagtggtcctagaccccgccatgtccggacaatgatatagagcgtctcagcatcgccagtctagactgtctatggagagcagaaagttgtctngggctgcctggggaactgtgaggccagctatatcaccgtcgctgatggtgacattacggtggtggcaggagcaaggagagagggaagaaggaccccgtccagctttagtcacaaaatacccaatggaagatgccagtgccaatcctgtgggtttccttgggacttcacactggctttcttatctgctccagatccattcagtagtcactgagttcctgccaaatactttgtagcgccagaagccaggagcggggtctgcagcagggcagtccccnttttcaggaaatgcctggagctgctggtccctgagagaaaggaaaacatctttcagccgtacgcaggccaagaaggccaatgtccagtagctttgtgattttttttatatttttttatttatttatttttgagatagagtcttgctctgtcgctcaggctggagtgcagtggcgtgatctccactcactgcaacttccgcctcctggggtcaagcagttctgcctcagcctcccgagtagctgggattacaggcacacgccaccacacccagctaatttttgtgtttttagtagagacggtttcaccatgtcggccaggctggtctcaaactcctgacctcagatgattcagcctcccaaagtgctgggattacaggtgtgagccactgcacccagcctgtgatgtttctgtggggttccacaaatgtgtgtgtgtgtaaaagctgatgattacagcaagaatgtgaacagtagcagttttccatttgaaggcaagttttgtctttatctgggtatcagaaggaccctctgggccattgtcgcttcctgtactcagagccaccctagtactacgggcacacacagaaaacagcagcctgcgtactttcaaaggaaaggcatctttaatcaccaatgcctggaaaaattattttgtttccctcttccttccgtcttgtttcctaacttcttaccaaagtttagagtctgagtttttcgtataataatgtcccacatccacacatcgggcctacagatgctctcccttgaatcgactggaaacatgacaccggttccatgctctggaactgtcacctgtgatgtgctgggctgtgtcccaagcacaggaatcccagcagtttcagctcgatgcagaaccaccatgctccagacacaggcttgggaaagacacgtcaaaattaaaatactaggtaagagaagcacctgattgggtagaagttggagaggaatcctggaattttgtggccagaaggagccactgccccttttgtttagtaagactagacagtaacagaagccagttgtcagctatgaaagtggtgggtgaagcaggggaggctcctctatggtgggaccctggacaagggaagccgaatgtgtgaagaaggggtgcgggggtgtgcggtgccctaggacactagggcaaaggtttcaaacctggaacaaggcactggaggaagatctgctgccagtcagcagtgcgggccctcgagttagcagtccgtgcgcagaggggccagttctgagaccagtttggagagtcaggcagtgacccattggccatgtcataattccttcagcctgcctcctctttaatcccagagagtgctctttcttcatacttcctttaaaatactaaattgttcccattccatggggagctggctaggctttacaggctaggaaatgtaggttttctgagatggaaccatctacacaaggaggaggaaggcactaagactacagatgagacccatgacagggctgagcatttggaagccaaccctggttgcttttcaagaattgctttgtggctgggtgcagtggttcacacctgtaattgcagcactttgggaggctgaggcaggtggattgcttgaacccaggagttcgagaccagcctgggcaacatatgggacaccccaccgcccccggctctgcaaaaaaattaaaaattagccaggcgtggtgtcatgagcctgtggtctcaactactcaggaggctgaggctggaggatcgcttgaacctgggaggtcaaggctccagtgaaccataattgtgccactgcactgcagcctgggcgacaatttgttttctaaattgcttttgaaagtctactgcattacatattccaaaaagcagtggttttcaaatacttttatcaccgatatccttttatgaaatgaaatcagtagaactttctctgctctgaataagcaagggtgggaacctgtctacctcccacagatagcataatgtgcctgccatagaggagccaaaaaatggtgatgggaactgagaggagagcaaatgtcacaaaagactgagcaattgagaaaacaaaacaagaccacagatgactgttaacgcctccacagtggaccaagaaaggacagagagctggcagcatgggcatcactgtctggtcggcagcaggaaggcctcgctagggaattgagtacagtcatctaactagtttaaaagtacaggaaggatgattaaggctattggagaggtcatacaaataggggaggggcaggcaatggctgataagacatgaatttgtaaggcgatgagtattgcagtcagcaaaacaaacgagactgctctcccaacacataactcagcagggaggccaggcattggtttaaccatttaatataaagaagttaaaattacaaatgcgctaagtgcctaaagaagaataagtgcaggaatgagagcagcatggactgccacagttttagaataagcactgtcactgctagattggaaacaaaaatccataaatttggcccggtgtggtggcggacgcctgtagtcccagctacttggaggctgaggcgtgagaatcgcttgaacccgggaggcggaggttgcagtgagccgagatggcgccactgcactccagcctgggcgtcagagtgagaactctgtatcaaaaaataaaaanaaaaaaaagtccataaatctgcaatgtctcagttaagaaagaaagactgggccaatgcagatttcaaaccggagaaagtcatactgtcagtgaaggccgcctgtggccggaaggcgccaggggattagcaccctggactcagtgttgctgggaaacagggccccaaggctgggagcacagtgtttaaagggcatctacccaagaagggagcacagggcaaggaggagctgcagggggncttggctgccaaagtgaattctgaggagagagctattgctgcctacgatatgcaggctgcacagaacacaagtggaatcagcaggcaggagaggcagctaacgacgcagcccgtttcttatttctgttttctcacaagcgatgaaagtggaaaagagggtgagcaggtggcccacacatgtgcctccagtgctgcggcccctccggggaccatcngccaggccccggggagggagccagccacagtgtgtccggctcttctctgaagggaagagagccttgaatagactgaagcgaagacggttctgcaaggacaaggcagaccgaaggcattggttttttttttcagataaggagaattagactcccaagtagacaccagagtcactgtttggttggtgggtgatagtggggtcacagtggctgcctgtgctcccccagggtgagcgtgactgtgctaacctgggtggggcagcatgcacacccctctggcagccctttgttgctcgctgatgacaagtttggatgatcccgccaaacagcttgctaagatgtagtccccagtgttggaggtggggcctgatgggaggtgctacccttgtgagataaggttgtgtaaaagcctgtggcacctccccacactgacgctctcacccctgctctggccatgtgccgcgcctgctcccacttccccttctgccaggagtaaaagcccccgagacctcccagaagccaagcagatgctagtgccatgcttcctctgcagcctgcagaactgtgagccaattaaacctcttttctctat

SEQ ID NO: 300106 - DNA, 11107 bp, Homo sapiens
  misc_feature (6159)..(6159): n is a, c, g, or t
  misc_feature (7097)..(7097): n is a, c, g, or t
  misc_feature (7372)..(7372): n is a, c, g, or t
  misc_feature (10065)..(10065): n is a, c, g, or t
  misc_feature (10303)..(10303): n is a, c, g, or t
  misc_feature (10518)..(10518): n is a, c, g, or t
acataatttctggagccctgtaccaacgtgtggccacatattctgtcaggaaccctgtgtgatcatggtctggatctgcaacacgggccaggccaaagtcacagatcttgagatcacaggtggtgttgagcagcaggcaggcaggcaatcggtccgagtggctgtcggctcttcagctctcccgctcggcgtcttccttcctcctcccggtcagcgtcggcggctgcaccggcggcggcgcagtccctgcgggaggggcgacaagagctgagcggcggccgccgagcgtcgagctcagcgcggcggaggcggcggcggcccggcagccaacatggcggcggcggcggcggcgggcgcgggcccggagatggtccgcgggcaggtgttcgacgtggggccgcgctacaccaacctctcgtacatcggcgagggcgcctacggcatggtgtgctctgcttatgataatgtcaacaaagttcgagtagctatcaagaaaatcagcccctttgagcaccagacctactgccagagaaccctgagggagataaaaatcttactgcgcttcagacatgagaacatcattggaatcaatgacattattcgagcaccaaccatcgagcaaatgaaagatgtatatatagtacaggacctcatggaaacagatctttacaagctcttgaagacacaacacctcagcaatgaccatatctgctattttctctaccagatcctcagagggttaaaatatatccattcagctaacgttctgcaccgtgacctcaagccttccaacctgctgctcaacaccacctgtgatctcaagatctgtgactttggcctggcccgtgttgcagatccagaccatgatcacacagggttcctgacagaatatgtggccacacgttggtacagggctccagaaattatgttgaattccaagggctacaccaagtccattgatatttggtctgtaggctgcattctggcagaaatgctttctaacaggcccatctttccagggaagcattatcttgaccagctgaaccacattttgggtattcttggatccccatcacaagaagacctgaattgtataataaatttaaaagctaggaactatttgctttctcttccacacaaaaataaggtgccatggaacaggctgttcccaaatgctgactccaaagctctggacttattggacaaaatgttgacattcaacccacacaagaggattgaagtagaacaggctctggcccacccatatctggagcagtattacgacccgagtgacgagcccatcgccgaagcaccattcaagttcgacatggaattggatgacttgcctaaggaaaagctcaaagaactaatttttgaagagactgctagattccagccaggatacagatcttaaatttgtcaggacaagggctcagaggactggacgtgctcagacatcggtgttcttcttcccagttcttgacccctggtcctgtctccagcccgtcttggcttatccactttgactcctttgagccgtttggaggggcggtttctggtagttgtggcttttatgctttcaaagaatttcttcagtccagagaattcctcctggcagccctgtgtgtgtcacccattggtgacctgcggcagtatgtacttcagtgcacctactgcttactgttgctttagtcactaattgctttctggtttgaaagatgcagtggttcctccctctcctgaatccttttctacatgatgccctgctgaccatgcagccgcaccagagagagattcttccccaattggctctagtcactggcatctcactttatgatagggaaggctactacctagggcactttaagtcagtgacagccccttatttgcacttcaccttttgaccataactgtttccccagagcaggagcttgtggaaataccttggctgatgttgcagcctgcagcaagtgcttccgtctccggaatccttggggagcacttgtccacgtcttttctcatatcatggtagtcactaacatatataaggtatgtgctattggcccagcttttagaaaatgcagtcatttttctaaataaaaaggaagtactgcacccagcagtgtcactctgtagttactgtggtcacttgtaccatatagaggtgtaacacttgtcaagaagcgttatgtgcagtacttaatgtttgtaagacttacaaaaaaagatttaaagtggcagcttcactcgacatttggtgagagaagtacaaaggttgcagtgctgagctgtgggcggtttctggggatgtcccagggtggaactccacatgctggtgcatatacgcccttgagctacttcaaatgtgggtgtttcagtaaccacgttccatgcctgaggatttagcagagaggaacactgcgtctttaaatgagaaagtatacaattctttttccttctacagcatgtcagcatctcaagttcatttttcaacctacagtataacaatttgtaataaagcctccaggagctcatgacgtgaagcactgttctgtcctcaagtactcaaatatttctgatactgctgagtcagactgtcagaaaaagctagcactaactcgtgtttggagctctatccatattttactgatctctttaagtatttgttcctgccactgtgtactgtggagttgactcggtgttctgtcccagtgcggtgcctcctcttgacttccccactgctctctgtggtgagaaatttgccttgttcaataattactgtaccctcgcatgactgttacagctttctgtgcagagatgactgtccaagtgccacatgcctacgattgaaatgaaaactctattgttacctctgagttgtgttccacggaaaatgctatccagcagatcatttaggaaaaataattctatttttagcttttcatttctcagctgtccttttttcttgtttgatttttgacagcaatggagaatgggttatataaagactgcctgctaatatgaacagaaatgcatttgtaattcatgtcctctggatcagcgtgtctgaatggacagtcaggttcaggttgtgctgaacacagaaatgctcacaggcctcactttgccgcccaggcactggcccagcacttggatttacataagatgagttagaaaggtacttctgtagggtcctttttacctctgctcggcagagaatcgatgctgtcatgttcctttattcacaatcttaggtctcaaatattctgtcaaaccctaacaaagaagccccgacatctcaggttggattccctggttctctctaaagagggcctgcccttgtgccccagaggtgctgctgggcacagccaagagttgggaagggccgccccacagtacgcagtcctcaccacccagcccagggtgctcacgctcaccactcctgtggctgaggaaggatagctggctcatcctcggaaaacagacccacatctctattcttgccctgaaatacgcgcttttcacttgcgtgctcagagctgccgtctgaaggtccacacagcattgacgggacacagaaatgtgactgttaccggataacactgattagtcagttttcatttataaaaaagcattgacagttttattactcttgtttctttttaaatggaaagttactattataaggttaatttgcagtcctcttctaaatagaaaaccatatccttggctactaacatctggagactgtgagctccttcccattccccttcctggtactgtggagtcagattggcatgaaaccactaacttcattctagaatcattgtagccataagttgtgtgctttttattaatcatgccaaacataatgtaactgggcagagaatggtcctaaccaaggtacctatgaaaagcgctagctatcatgtgtagtagatgcatcattttggctcttcttacatttgtaaaaatgtacagattaggtcatcttaattcatattagtgacacggaacagcacctccactatttgtatgttcaaataagctttcagactaatagcttttttggtgtctaaaatgtaagcaaaaaattcctgctgaaacattccagtcctttcatttagtataaaagaaatactgaacaagccagtgggatggaattgaaagaactaatcatgaggactctgtcctgacacaggtcctcaaagctagcagagatacgcagacattgtggcatctgggtagaagaatactgtattgtgtgtgcagtgcacagtgtgtggtgtgtgcacactcattccttctgctcttgggcacaggcagtgggtgtagaggtaaccagtagctttgagaagctacatgtagctcaccagtggttttctctaaggaatcacaaaggtaaactacccaaccacatgccacgtaatatttcagccattcagaggaaactgttttctctttatttgcttatatgttaatatggtttttaaattggtaacttttatatagtatggtaacagtatgttaatacacacatacatatgcacacatgctttgggtccttccataatacttttatatttgtaaatcaatgttttggagcaatcccaagtttaagggaaatatttttgtaaatgtaatggttttgaaaatctgagcaatccttttgcttatacatttttaaagcatttgtgctttaaaattgttatgctggtgtttgaaacatgatactcctgtggtgcagatgagaagctataacagtgaatatgtggtttctcttacgtcatccaccttgacatgatgggtcagaaacaaatggaaatccagagcaagtcctccagggttgcaccaggtttacctaaagcttgttgccttttcttgtgctgtttatccgtgtagagcactcaagaaagttctgaaactgctttgtatctgctttgtactgttggtgccttcttggtattgtaccccaaaattctgcatagattatttagtataatggtaagttaaaaaatgttaaaggaagattttattaagaatctgaatgtttattcattatattgttacaatttaacattaacatttatttgtggtatttgtgatttggttaatctgtataaaaattgtaagtagaaaggtttatatttcatcttaattcttttgatgttgtaaacgtactttttaaaagatggattatttgaatgtttatggcacctgacttgtaaaaaaaaaaaactacaaaaaaatccttagaatcattaaattgtgtccctgtattaccaaaataacacagcaccgtgcatgtatagtttaattgcagtttcatctgtgaaaacgtgaaattgtctagtccttcgttatgttccccagatgtcttccagatttgctctgcatgtggtaacttgtgttagggctgtgagctgttcctcgagttgaatggggatgtcagtgctcctagggttctccaggtggttcttcagaccttcacctgtgggggggggggtaggcggtgcccacgcccatctcctcatcctcctgaacttctgcaaccccactgctgggcagacatcctgggcaaccccttttttcagagcaagaagtcataaagataggatttcttggacatttggttcttatcaatattgggcattatgtaatgacttatttacaaaacaaagatactggaaaatgttttggatgtggtgttatggaaagagcacaggccttggacccatccagctgggttcagaactaccccctgcttataactgcggctggctgtgggccagtcattctgcgtctctgctttcttcctctgcttcagactgtcagctgtaaagtggaagcaatattacttgccttgtatatggtaaagattataaaaatacatttcaactgttcagcatagtacttcaaagcaagtactcagtaaatagcaagtctttttaaatgctgctttatttcactaaattttgttgtgaggtgtcactaaaatgcctgcaaacaaacgtaactgctaatctgagaggaaaccctcttactaatcagagaagaaaccctcctgtcagaaaccttcagggaagtgagctgatcacacctaaactgggagtttgcaatggggtatttgaagcactgtgggagtattccactggcccnctccctgagagacttaacagtcttccctgttgtccagattctgtataaggcaatcagaataatcatcttccttgttcagcagaggagcctggtcccattttccccactttgtgatgggcttctctcagcggtagctcagcagttccagatggcagtttggaccagcatctaggctggccagttcgctgtgtttacttagaaccaacacgttcagagctggcctggaccatctgaggggaacaggaaacacccctaggctgtggaagcaagtgcagacccccacccccggccctgaagccaagggggcagggtttgggagtggccaaagagaagcagtgcagggatgggttttcctagggacaggcttagcattcctgactctaggaagaaggagcagtgaggcggagaaacagtggaggggatggtggcattgggccccatggggccgagatggacacagggctcgttctcttgagtctggtgccaaggacagctgaagacgacatcattttcaggtggagaggagagagtggagggagatcatgccctgtgatgtgtcttttgcaggtgaaggtgggagacaaggtctctgctgacgatgaggcagagccaccgtgaaagttgtaataggaggactgcccgccgctggaagggcctgcagtgacgctaggacaccctctgcctgcatgtcacgttagctgggctgggcgaagtagaagaccaaggggaagaggtgcagtggggagaccaggtgggatgcaaccacaggaccagtggaggggctgtggcacgtgggcggagactgagtggctgggcatgtgttgtggctgagcatgtggtgtgggcagtggtcctagaccccgccatgtccggacaatgatatagagcgtctcagcatcgccagtctagactgtctatggagagcagaaagttgtctngggctgcctggggaactgtgaggccagctatatcaccgtcgctgatggtgacattacggtggtggcaggagcaaggagagagggaagaaggaccccgtccagctttagtcacaaaatacccaatggaagatgccagtgccaatcctgtgggtttccttgggacttcacactggctttcttatctgctccagatccattcagtagtcactgagttcctgccaaatactttgtagcgccagaagccaggagcggggtctgcagcagggcagtccccnttttcaggaaatgcctggagctgctggtccctgagagaaaggaaaacatctttcagccgtacgcaggccaagaaggccaatgtccagtagctttgtgattttttttatatttttttatttatttatttttgagatagagtcttgctctgtcgctcaggctggagtgcagtggcgtgatctccactcactgcaacttccgcctcctggggtcaagcagttctgcctcagcctcccgagtagctgggattacaggcacacgccaccacacccagctaatttttgtgtttttagtagagacggtttcaccatgtcggccaggctggtctcaaactcctgacctcagatgattcagcctcccaaagtgctgggattacaggtgtgagccactgcacccagcctgtgatgtttctgtggggttccacaaatgtgtgtgtgtgtaaaagctgatgattacagcaagaatgtgaacagtagcagttttccatttgaaggcaagttttgtctttatctgggtatcagaaggaccctctgggccattgtcgcttcctgtactcagagccaccctagtactacgggcacacacagaaaacagcagcctgcgtactttcaaaggaaaggcatctttaatcaccaatgcctggaaaaattattttgtttccctcttccttccgtcttgtttcctaacttcttaccaaagtttagagtctgagtttttcgtataataatgtcccacatccacacatcgggcctacagatgctctcccttgaatcgactggaaacatgacaccggttccatgctctggaactgtcacctgtgatgtgctgggctgtgtcccaagcacaggaatcccagcagtttcagctcgatgcagaaccaccatgctccagacacaggcttgggaaagacacgtcaaaattaaaatactaggtaagagaagcacctgattgggtagaagttggagaggaatcctggaattttgtggccagaaggagccactgccccttttgtttagtaagactagacagtaacagaagccagttgtcagctatgaaagtggtgggtgaagcaggggaggctcctctatggtgggaccctggacaagggaagccgaatgtgtgaagaaggggtgcgggggtgtgcggtgccctaggacactagggcaaaggtttcaaacctggaacaaggcactggaggaagatctgctgccagtcagcagtgcgggccctcgagttagcagtccgtgcgcagaggggccagttctgagaccagtttggagagtcaggcagtgacccattggccatgtcataattccttcagcctgcctcctctttaatcccagagagtgctctttcttcatacttcctttaaaatactaaattgttcccattccatggggagctggctaggctttacaggctaggaaatgtaggttttctgagatggaaccatctacacaaggaggaggaaggcactaagactacagatgagacccatgacagggctgagcatttggaagccaaccctggttgcttttcaagaattgctttgtggctgggtgcagtggttcacacctgtaattgcagcactttgggaggctgaggcaggtggattgcttgaacccaggagttcgagaccagcctgggcaacatatgggacaccccaccgcccccggctctgcaaaaaaattaaaaattagccaggcgtggtgtcatgagcctgtggtctcaactactcaggaggctgaggctggaggatcgcttgaacctgggaggtcaaggctccagtgaaccataattgtgccactgcactgcagcctgggcgacaatttgttttctaaattgcttttgaaagtctactgcattacatattccaaaaagcagtggttttcaaatacttttatcaccgatatccttttatgaaatgaaatcagtagaactttctctgctctgaataagcaagggtgggaacctgtctacctcccacagatagcataatgtgcctgccatagaggagccaaaaaatggtgatgggaactgagaggagagcaaatgtcacaaaagactgagcaattgagaaaacaaaacaagaccacagatgactgttaacgcctccacagtggaccaagaaaggacagagagctggcagcatgggcatcactgtctggtcggcagcaggaaggcctcgctagggaattgagtacagtcatctaactagtttaaaagtacaggaaggatgattaaggctattggagaggtcatacaaataggggaggggcaggcaatggctgataagacatgaatttgtaaggcgatgagtattgcagtcagcaaaacaaacgagactgctctcccaacacataactcagcagggaggccaggcattggtttaaccatttaatataaagaagttaaaattacaaatgcgctaagtgcctaaagaagaataagtgcaggaatgagagcagcatggactgccacagttttagaataagcactgtcactgctagattggaaacaaaaatccataaatttggcccggtgtggtggcggacgcctgtagtcccagctacttggaggctgaggcgtgagaatcgcttgaacccgggaggcggaggttgcagtgagccgagatggcgccactgcactccagcctgggcgtcagagtgagaactctgtatcaaaaaataaaaanaaaaaaaagtccataaatctgcaatgtctcagttaagaaagaaagactgggccaatgcagatttcaaaccggagaaagtcatactgtcagtgaaggccgcctgtggccggaaggcgccaggggattagcaccctggactcagtgttgctgggaaacagggccccaaggctgggagcacagtgtttaaagggcatctacccaagaagggagcacagggcaaggaggagctgcagggggncttggctgccaaagtgaattctgaggagagagctattgctgcctacgatatgcaggctgcacagaacacaagtggaatcagcaggcaggagaggcagctaacgacgcagcccgtttcttatttctgttttctcacaagcgatgaaagtggaaaagagggtgagcaggtggcccacacatgtgcctccagtgctgcggcccctccggggaccatcngccaggccccggggagggagccagccacagtgtgtccggctcttctctgaagggaagagagccttgaatagactgaagcgaagacggttctgcaaggacaaggcagaccgaaggcattggttttttttttcagataaggagaattagactcccaagtagacaccagagtcactgtttggttggtgggtgatagtggggtcacagtggctgcctgtgctcccccagggtgagcgtgactgtgctaacctgggtggggcagcatgcacacccctctggcagccctttgttgctcgctgatgacaagtttggatgatcccgccaaacagcttgctaagatgtagtccccagtgttggaggtggggcctgatgggaggtgctacccttgtgagataaggttgtgtaaaagcctgtggcacctccccacactgacgctctcacccctgctctggccatgtgccgcgcctgctcccacttccccttctgccaggagtaaaagcccccgagacctcccagaagccaagcagatgctagtgccatgcttcctctgcagcctgcagaactgtgagccaattaaacctcttttctctat

SEQ ID NO: 300107 - DNA, 10262 bp, Homo sapiens
  misc_feature (5314)..(5314): n is a, c, g, or t
  misc_feature (6252)..(6252): n is a, c, g, or t
  misc_feature (6527)..(6527): n is a, c, g, or t
  misc_feature (9220)..(9220): n is a, c, g, or t
  misc_feature (9458)..(9458): n is a, c, g, or t
  misc_feature (9673)..(9673): n is a, c, g, or t
tctcaaaaaaaaaaaaaaaaaaaaaaaaaagaaatgatcattgtcagaaaagacgcttcattaagtagtgccagtgtttttgtttgcggtctgcaattgtcagatggtcggtccctatgttcacagtctcgggaggcttggagatatagtcagcaccctttgtgctggctgctctctctgtagtcatgcttagctcagttgttttgtgggtaagttacttaaacaggaaattgaagtatttctgtgactacttctgctctcactactgcaaaacctttctctttatagctctggacttattggacaaaatgttgacattcaacccacacaagaggattgaagtagaacaggctctggcccacccatatctggagcagtattacgacccgagtgacgagcccatcgccgaagcaccattcaagttcgacatggaattggatgacttgcctaaggaaaagctcaaagaactaatttttgaagagactgctagattccagccaggatacagatcttaaatttgtcaggacaagggctcagaggactggacgtgctcagacatcggtgttcttcttcccagttcttgacccctggtcctgtctccagcccgtcttggcttatccactttgactcctttgagccgtttggaggggcggtttctggtagttgtggcttttatgctttcaaagaatttcttcagtccagagaattcctcctggcagccctgtgtgtgtcacccattggtgacctgcggcagtatgtacttcagtgcacctactgcttactgttgctttagtcactaattgctttctggtttgaaagatgcagtggttcctccctctcctgaatccttttctacatgatgccctgctgaccatgcagccgcaccagagagagattcttccccaattggctctagtcactggcatctcactttatgatagggaaggctactacctagggcactttaagtcagtgacagccccttatttgcacttcaccttttgaccataactgtttccccagagcaggagcttgtggaaataccttggctgatgttgcagcctgcagcaagtgcttccgtctccggaatccttggggagcacttgtccacgtcttttctcatatcatggtagtcactaacatatataaggtatgtgctattggcccagcttttagaaaatgcagtcatttttctaaataaaaaggaagtactgcacccagcagtgtcactctgtagttactgtggtcacttgtaccatatagaggtgtaacacttgtcaagaagcgttatgtgcagtacttaatgtttgtaagacttacaaaaaaagatttaaagtggcagcttcactcgacatttggtgagagaagtacaaaggttgcagtgctgagctgtgggcggtttctggggatgtcccagggtggaactccacatgctggtgcatatacgcccttgagctacttcaaatgtgggtgtttcagtaaccacgttccatgcctgaggatttagcagagaggaacactgcgtctttaaatgagaaagtatacaattctttttccttctacagcatgtcagcatctcaagttcatttttcaacctacagtataacaatttgtaataaagcctccaggagctcatgacgtgaagcactgttctgtcctcaagtactcaaatatttctgatactgctgagtcagactgtcagaaaaagctagcactaactcgtgtttggagctctatccatattttactgatctctttaagtatttgttcctgccactgtgtactgtggagttgactcggtgttctgtcccagtgcggtgcctcctcttgacttccccactgctctctgtggtgagaaatttgccttgttcaataattactgtaccctcgcatgactgttacagctttctgtgcagagatgactgtccaagtgccacatgcctacgattgaaatgaaaactctattgttacctctgagttgtgttccacggaaaatgctatccagcagatcatttaggaaaaataattctatttttagcttttcatttctcagctgtccttttttcttgtttgatttttgacagcaatggagaatgggttatataaagactgcctgctaatatgaacagaaatgcatttgtaattcatgaaaataaatgtacatcttctatcttcacattcatgttaagattcagtgttgctttcctctggatcagcgtgtctgaatggacagtcaggttcaggttgtgctgaacacagaaatgctcacaggcctcactttgccgcccaggcactggcccagcacttggatttacataagatgagttagaaaggtacttctgtagggtcctttttacctctgctcggcagagaatcgatgctgtcatgttcctttattcacaatcttaggtctcaaatattctgtcaaaccctaacaaagaagccccgacatctcaggttggattccctggttctctctaaagagggcctgcccttgtgccccagaggtgctgctgggcacagccaagagttgggaagggccgccccacagtacgcagtcctcaccacccagcccagggtgctcacgctcaccactcctgtggctgaggaaggatagctggctcatcctcggaaaacagacccacatctctattcttgccctgaaatacgcgcttttcacttgcgtgctcagagctgccgtctgaaggtccacacagcattgacgggacacagaaatgtgactgttaccggataacactgattagtcagttttcatttataaaaaagcattgacagttttattactcttgtttctttttaaatggaaagttactattataaggttaatttgcagtcctcttctaaatagaaaaccatatccttggctactaacatctggagactgtgagctccttcccattccccttcctggtactgtggagtcagattggcatgaaaccactaacttcattctagaatcattgtagccataagttgtgtgctttttattaatcatgccaaacataatgtaactgggcagagaatggtcctaaccaaggtacctatgaaaagcgctagctatcatgtgtagtagatgcatcattttggctcttcttacatttgtaaaaatgtacagattaggtcatcttaattcatattagtgacacggaacagcacctccactatttgtatgttcaaataagctttcagactaatagcttttttggtgtctaaaatgtaagcaaaaaattcctgctgaaacattccagtcctttcatttagtataaaagaaatactgaacaagccagtgggatggaattgaaagaactaatcatgaggactctgtcctgacacaggtcctcaaagctagcagagatacgcagacattgtggcatctgggtagaagaatactgtattgtgtgtgcagtgcacagtgtgtggtgtgtgcacactcattccttctgctcttgggcacaggcagtgggtgtagaggtaaccagtagctttgagaagctacatgtagctcaccagtggttttctctaaggaatcacaaaggtaaactacccaaccacatgccacgtaatatttcagccattcagaggaaactgttttctctttatttgcttatatgttaatatggtttttaaattggtaacttttatatagtatggtaacagtatgttaatacacacatacatatgcacacatgctttgggtccttccataatacttttatatttgtaaatcaatgttttggagcaatcccaagtttaagggaaatatttttgtaaatgtaatggttttgaaaatctgagcaatccttttgcttatacatttttaaagcatttgtgctttaaaattgttatgctggtgtttgaaacatgatactcctgtggtgcagatgagaagctataacagtgaatatgtggtttctcttacgtcatccaccttgacatgatgggtcagaaacaaatggaaatccagagcaagtcctccagggttgcaccaggtttacctaaagcttgttgccttttcttgtgctgtttatccgtgtagagcactcaagaaagttctgaaactgctttgtatctgctttgtactgttggtgccttcttggtattgtaccccaaaattctgcatagattatttagtataatggtaagttaaaaaatgttaaaggaagattttattaagaatctgaatgtttattcattatattgttacaatttaacattaacatttatttgtggtatttgtgatttggttaatctgtataaaaattgtaagtagaaaggtttatatttcatcttaattcttttgatgttgtaaacgtactttttaaaagatggattatttgaatgtttatggcacctgacttgtaaaaaaaaaaaactacaaaaaaatccttagaatcattaaattgtgtccctgtattaccaaaataacacagcaccgtgcatgtatagtttaattgcagtttcatctgtgaaaacgtgaaattgtctagtccttcgttatgttccccagatgtcttccagatttgctctgcatgtggtaacttgtgttagggctgtgagctgttcctcgagttgaatggggatgtcagtgctcctagggttctccaggtggttcttcagaccttcacctgtgggggggggggtaggcggtgcccacgcccatctcctcatcctcctgaacttctgcaaccccactgctgggcagacatcctgggcaaccccttttttcagagcaagaagtcataaagataggatttcttggacatttggttcttatcaatattgggcattatgtaatgacttatttacaaaacaaagatactggaaaatgttttggatgtggtgttatggaaagagcacaggccttggacccatccagctgggttcagaactaccccctgcttataactgcggctggctgtgggccagtcattctgcgtctctgctttcttcctctgcttcagactgtcagctgtaaagtggaagcaatattacttgccttgtatatggtaaagattataaaaatacatttcaactgttcagcatagtacttcaaagcaagtactcagtaaatagcaagtctttttaaatgctgctttatttcactaaattttgttgtgaggtgtcactaaaatgcctgcaaacaaacgtaactgctaatctgagaggaaaccctcttactaatcagagaagaaaccctcctgtcagaaaccttcagggaagtgagctgatcacacctaaactgggagtttgcaatggggtatttgaagcactgtgggagtattccactggcccnctccctgagagacttaacagtcttccctgttgtccagattctgtataaggcaatcagaataatcatcttccttgttcagcagaggagcctggtcccattttccccactttgtgatgggcttctctcagcggtagctcagcagttccagatggcagtttggaccagcatctaggctggccagttcgctgtgtttacttagaaccaacacgttcagagctggcctggaccatctgaggggaacaggaaacacccctaggctgtggaagcaagtgcagacccccacccccggccctgaagccaagggggcagggtttgggagtggccaaagagaagcagtgcagggatgggttttcctagggacaggcttagcattcctgactctaggaagaaggagcagtgaggcggagaaacagtggaggggatggtggcattgggccccatggggccgagatggacacagggctcgttctcttgagtctggtgccaaggacagctgaagacgacatcattttcaggtggagaggagagagtggagggagatcatgccctgtgatgtgtcttttgcaggtgaaggtgggagacaaggtctctgctgacgatgaggcagagccaccgtgaaagttgtaataggaggactgcccgccgctggaagggcctgcagtgacgctaggacaccctctgcctgcatgtcacgttagctgggctgggcgaagtagaagaccaaggggaagaggtgcagtggggagaccaggtgggatgcaaccacaggaccagtggaggggctgtggcacgtgggcggagactgagtggctgggcatgtgttgtggctgagcatgtggtgtgggcagtggtcctagaccccgccatgtccggacaatgatatagagcgtctcagcatcgccagtctagactgtctatggagagcagaaagttgtctngggctgcctggggaactgtgaggccagctatatcaccgtcgctgatggtgacattacggtggtggcaggagcaaggagagagggaagaaggaccccgtccagctttagtcacaaaatacccaatggaagatgccagtgccaatcctgtgggtttccttgggacttcacactggctttcttatctgctccagatccattcagtagtcactgagttcctgccaaatactttgtagcgccagaagccaggagcggggtctgcagcagggcagtccccnttttcaggaaatgcctggagctgctggtccctgagagaaaggaaaacatctttcagccgtacgcaggccaagaaggccaatgtccagtagctttgtgattttttttatatttttttatttatttatttttgagatagagtcttgctctgtcgctcaggctggagtgcagtggcgtgatctccactcactgcaacttccgcctcctggggtcaagcagttctgcctcagcctcccgagtagctgggattacaggcacacgccaccacacccagctaatttttgtgtttttagtagagacggtttcaccatgtcggccaggctggtctcaaactcctgacctcagatgattcagcctcccaaagtgctgggattacaggtgtgagccactgcacccagcctgtgatgtttctgtggggttccacaaatgtgtgtgtgtgtaaaagctgatgattacagcaagaatgtgaacagtagcagttttccatttgaaggcaagttttgtctttatctgggtatcagaaggaccctctgggccattgtcgcttcctgtactcagagccaccctagtactacgggcacacacagaaaacagcagcctgcgtactttcaaaggaaaggcatctttaatcaccaatgcctggaaaaattattttgtttccctcttccttccgtcttgtttcctaacttcttaccaaagtttagagtctgagtttttcgtataataatgtcccacatccacacatcgggcctacagatgctctcccttgaatcgactggaaacatgacaccggttccatgctctggaactgtcacctgtgatgtgctgggctgtgtcccaagcacaggaatcccagcagtttcagctcgatgcagaaccaccatgctccagacacaggcttgggaaagacacgtcaaaattaaaatactaggtaagagaagcacctgattgggtagaagttggagaggaatcctggaattttgtggccagaaggagccactgccccttttgtttagtaagactagacagtaacagaagccagttgtcagctatgaaagtggtgggtgaagcaggggaggctcctctatggtgggaccctggacaagggaagccgaatgtgtgaagaaggggtgcgggggtgtgcggtgccctaggacactagggcaaaggtttcaaacctggaacaaggcactggaggaagatctgctgccagtcagcagtgcgggccctcgagttagcagtccgtgcgcagaggggccagttctgagaccagtttggagagtcaggcagtgacccattggccatgtcataattccttcagcctgcctcctctttaatcccagagagtgctctttcttcatacttcctttaaaatactaaattgttcccattccatggggagctggctaggctttacaggctaggaaatgtaggttttctgagatggaaccatctacacaaggaggaggaaggcactaagactacagatgagacccatgacagggctgagcatttggaagccaaccctggttgcttttcaagaattgctttgtggctgggtgcagtggttcacacctgtaattgcagcactttgggaggctgaggcaggtggattgcttgaacccaggagttcgagaccagcctgggcaacatatgggacaccccaccgcccccggctctgcaaaaaaattaaaaattagccaggcgtggtgtcatgagcctgtggtctcaactactcaggaggctgaggctggaggatcgcttgaacctgggaggtcaaggctccagtgaaccataattgtgccactgcactgcagcctgggcgacaatttgttttctaaattgcttttgaaagtctactgcattacatattccaaaaagcagtggttttcaaatacttttatcaccgatatccttttatgaaatgaaatcagtagaactttctctgctctgaataagcaagggtgggaacctgtctacctcccacagatagcataatgtgcctgccatagaggagccaaaaaatggtgatgggaactgagaggagagcaaatgtcacaaaagactgagcaattgagaaaacaaaacaagaccacagatgactgttaacgcctccacagtggaccaagaaaggacagagagctggcagcatgggcatcactgtctggtcggcagcaggaaggcctcgctagggaattgagtacagtcatctaactagtttaaaagtacaggaaggatgattaaggctattggagaggtcatacaaataggggaggggcaggcaatggctgataagacatgaatttgtaaggcgatgagtattgcagtcagcaaaacaaacgagactgctctcccaacacataactcagcagggaggccaggcattggtttaaccatttaatataaagaagttaaaattacaaatgcgctaagtgcctaaagaagaataagtgcaggaatgagagcagcatggactgccacagttttagaataagcactgtcactgctagattggaaacaaaaatccataaatttggcccggtgtggtggcggacgcctgtagtcccagctacttggaggctgaggcgtgagaatcgcttgaacccgggaggcggaggttgcagtgagccgagatggcgccactgcactccagcctgggcgtcagagtgagaactctgtatcaaaaaataaaaanaaaaaaaagtccataaatctgcaatgtctcagttaagaaagaaagactgggccaatgcagatttcaaaccggagaaagtcatactgtcagtgaaggccgcctgtggccggaaggcgccaggggattagcaccctggactcagtgttgctgggaaacagggccccaaggctgggagcacagtgtttaaagggcatctacccaagaagggagcacagggcaaggaggagctgcagggggncttggctgccaaagtgaattctgaggagagagctattgctgcctacgatatgcaggctgcacagaacacaagtggaatcagcaggcaggagaggcagctaacgacgcagcccgtttcttatttctgttttctcacaagcgatgaaagtggaaaagagggtgagcaggtggcccacacatgtgcctccagtgctgcggcccctccggggaccatcngccaggccccggggagggagccagccacagtgtgtccggctcttctctgaagggaagagagccttgaatagactgaagcgaagacggttctgcaaggacaaggcagaccgaaggcattggttttttttttcagataaggagaattagactcccaagtagacaccagagtcactgtttggttggtgggtgatagtggggtcacagtggctgcctgtgctcccccagggtgagcgtgactgtgctaacctgggtggggcagcatgcacacccctctggcagccctttgttgctcgctgatgacaagtttggatgatcccgccaaacagcttgctaagatgtagtccccagtgttggaggtggggcctgatgggaggtgctacccttgtgagataaggttgtgtaaaagcctgtggcacctccccacactgacgctctcacccctgctctggccatgtgccgcgcctgctcccacttccccttctgccaggagtaaaagcccccgagacctcccagaagccaagcagatgctagtgccatgcttcctctgcagcctgcagaactgtgagccaattaaacctcttttctctat

SEQ ID NO: 300108 - DNA, 10022 bp, Homo sapiens
  misc_feature (8)..(8): n is a, c, g, or t
  misc_feature (15)..(15): n is a, c, g, or t
  misc_feature (17)..(17): n is a, c, g, or t
  misc_feature (45)..(45): n is a, c, g, or t
  misc_feature (5074)..(5074): n is a, c, g, or t
  misc_feature (6012)..(6012): n is a, c, g, or t
  misc_feature (6287)..(6287): n is a, c, g, or t
  misc_feature (8980)..(8980): n is a, c, g, or t
  misc_feature (9218)..(9218): n is a, c, g, or t
  misc_feature (9433)..(9433): n is a, c, g, or t
tcatagangatcccncntaaatggctgtcccaaatgctgactccnaagctctggacttattggacaaaatgttgacattcaacccacacaagaggattgaagtagaacaggctctggcccacccatatctggagcagtattacgacccgagtgacgagcccatcgccgaagcaccattcaagttcgacatggaattggatgacttgcctaaggaaaagctcaaagaactaatttttgaagagactgctagattccagccaggatacagatcttaaatttgtcaggacaagggctcagaggactggacgtgctcagacatcggtgttcttcttcccagttcttgacccctggtcctgtctccagcccgtcttggcttatccactttgactcctttgagccgtttggaggggcggtttctggtagttgtggcttttatgctttcaaagaatttcttcagtccagagaattcctcctggcagccctgtgtgtgtcacccattggtgacctgcggcagtatgtacttcagtgcacctactgcttactgttgctttagtcactaattgctttctggtttgaaagatgcagtggttcctccctctcctgaatccttttctacatgatgccctgctgaccatgcagccgcaccagagagagattcttccccaattggctctagtcactggcatctcactttatgatagggaaggctactacctagggcactttaagtcagtgacagccccttatttgcacttcaccttttgaccataactgtttccccagagcaggagcttgtggaaataccttggctgatgttgcagcctgcagcaagtgcttccgtctccggaatccttggggagcacttgtccacgtcttttctcatatcatggtagtcactaacatatataaggtatgtgctattggcccagcttttagaaaatgcagtcatttttctaaataaaaaggaagtactgcacccagcagtgtcactctgtagttactgtggtcacttgtaccatatagaggtgtaacacttgtcaagaagcgttatgtgcagtacttaatgtttgtaagacttacaaaaaaagatttaaagtggcagcttcactcgacatttggtgagagaagtacaaaggttgcagtgctgagctgtgggcggtttctggggatgtcccagggtggaactccacatgctggtgcatatacgcccttgagctacttcaaatgtgggtgtttcagtaaccacgttccatgcctgaggatttagcagagaggaacactgcgtctttaaatgagaaagtatacaattctttttccttctacagcatgtcagcatctcaagttcatttttcaacctacagtataacaatttgtaataaagcctccaggagctcatgacgtgaagcactgttctgtcctcaagtactcaaatatttctgatactgctgagtcagactgtcagaaaaagctagcactaactcgtgtttggagctctatccatattttactgatctctttaagtatttgttcctgccactgtgtactgtggagttgactcggtgttctgtcccagtgcggtgcctcctcttgacttccccactgctctctgtggtgagaaatttgccttgttcaataattactgtaccctcgcatgactgttacagctttctgtgcagagatgactgtccaagtgccacatgcctacgattgaaatgaaaactctattgttacctctgagttgtgttccacggaaaatgctatccagcagatcatttaggaaaaataattctatttttagcttttcatttctcagctgtccttttttcttgtttgatttttgacagcaatggagaatgggttatataaagactgcctgctaatatgaacagaaatgcatttgtaattcatgaaaataaatgtacatcttctatcttcacattcatgttaagattcagtgttgctttcctctggatcagcgtgtctgaatggacagtcaggttcaggttgtgctgaacacagaaatgctcacaggcctcactttgccgcccaggcactggcccagcacttggatttacataagatgagttagaaaggtacttctgtagggtcctttttacctctgctcggcagagaatcgatgctgtcatgttcctttattcacaatcttaggtctcaaatattctgtcaaaccctaacaaagaagccccgacatctcaggttggattccctggttctctctaaagagggcctgcccttgtgccccagaggtgctgctgggcacagccaagagttgggaagggccgccccacagtacgcagtcctcaccacccagcccagggtgctcacgctcaccactcctgtggctgaggaaggatagctggctcatcctcggaaaacagacccacatctctattcttgccctgaaatacgcgcttttcacttgcgtgctcagagctgccgtctgaaggtccacacagcattgacgggacacagaaatgtgactgttaccggataacactgattagtcagttttcatttataaaaaagcattgacagttttattactcttgtttctttttaaatggaaagttactattataaggttaatttgcagtcctcttctaaatagaaaaccatatccttggctactaacatctggagactgtgagctccttcccattccccttcctggtactgtggagtcagattggcatgaaaccactaacttcattctagaatcattgtagccataagttgtgtgctttttattaatcatgccaaacataatgtaactgggcagagaatggtcctaaccaaggtacctatgaaaagcgctagctatcatgtgtagtagatgcatcattttggctcttcttacatttgtaaaaatgtacagattaggtcatcttaattcatattagtgacacggaacagcacctccactatttgtatgttcaaataagctttcagactaatagcttttttggtgtctaaaatgtaagcaaaaaattcctgctgaaacattccagtcctttcatttagtataaaagaaatactgaacaagccagtgggatggaattgaaagaactaatcatgaggactctgtcctgacacaggtcctcaaagctagcagagatacgcagacattgtggcatctgggtagaagaatactgtattgtgtgtgcagtgcacagtgtgtggtgtgtgcacactcattccttctgctcttgggcacaggcagtgggtgtagaggtaaccagtagctttgagaagctacatgtagctcaccagtggttttctctaaggaatcacaaaggtaaactacccaaccacatgccacgtaatatttcagccattcagaggaaactgttttctctttatttgcttatatgttaatatggtttttaaattggtaacttttatatagtatggtaacagtatgttaatacacacatacatatgcacacatgctttgggtccttccataatacttttatatttgtaaatcaatgttttggagcaatcccaagtttaagggaaatatttttgtaaatgtaatggttttgaaaatctgagcaatccttttgcttatacatttttaaagcatttgtgctttaaaattgttatgctggtgtttgaaacatgatactcctgtggtgcagatgagaagctataacagtgaatatgtggtttctcttacgtcatccaccttgacatgatgggtcagaaacaaatggaaatccagagcaagtcctccagggttgcaccaggtttacctaaagcttgttgccttttcttgtgctgtttatccgtgtagagcactcaagaaagttctgaaactgctttgtatctgctttgtactgttggtgccttcttggtattgtaccccaaaattctgcatagattatttagtataatggtaagttaaaaaatgttaaaggaagattttattaagaatctgaatgtttattcattatattgttacaatttaacattaacatttatttgtggtatttgtgatttggttaatctgtataaaaattgtaagtagaaaggtttatatttcatcttaattcttttgatgttgtaaacgtactttttaaaagatggattatttgaatgtttatggcacctgacttgtaaaaaaaaaaaactacaaaaaaatccttagaatcattaaattgtgtccctgtattaccaaaataacacagcaccgtgcatgtatagtttaattgcagtttcatctgtgaaaacgtgaaattgtctagtccttcgttatgttccccagatgtcttccagatttgctctgcatgtggtaacttgtgttagggctgtgagctgttcctcgagttgaatggggatgtcagtgctcctagggttctccaggtggttcttcagaccttcacctgtgggggggggggtaggcggtgcccacgcccatctcctcatcctcctgaacttctgcaaccccactgctgggcagacatcctgggcaaccccttttttcagagcaagaagtcataaagataggatttcttggacatttggttcttatcaatattgggcattatgtaatgacttatttacaaaacaaagatactggaaaatgttttggatgtggtgttatggaaagagcacaggccttggacccatccagctgggttcagaactaccccctgcttataactgcggctggctgtgggccagtcattctgcgtctctgctttcttcctctgcttcagactgtcagctgtaaagtggaagcaatattacttgccttgtatatggtaaagattataaaaatacatttcaactgttcagcatagtacttcaaagcaagtactcagtaaatagcaagtctttttaaatgctgctttatttcactaaattttgttgtgaggtgtcactaaaatgcctgcaaacaaacgtaactgctaatctgagaggaaaccctcttactaatcagagaagaaaccctcctgtcagaaaccttcagggaagtgagctgatcacacctaaactgggagtttgcaatggggtatttgaagcactgtgggagtattccactggcccnctccctgagagacttaacagtcttccctgttgtccagattctgtataaggcaatcagaataatcatcttccttgttcagcagaggagcctggtcccattttccccactttgtgatgggcttctctcagcggtagctcagcagttccagatggcagtttggaccagcatctaggctggccagttcgctgtgtttacttagaaccaacacgttcagagctggcctggaccatctgaggggaacaggaaacacccctaggctgtggaagcaagtgcagacccccacccccggccctgaagccaagggggcagggtttgggagtggccaaagagaagcagtgcagggatgggttttcctagggacaggcttagcattcctgactctaggaagaaggagcagtgaggcggagaaacagtggaggggatggtggcattgggccccatggggccgagatggacacagggctcgttctcttgagtctggtgccaaggacagctgaagacgacatcattttcaggtggagaggagagagtggagggagatcatgccctgtgatgtgtcttttgcaggtgaaggtgggagacaaggtctctgctgacgatgaggcagagccaccgtgaaagttgtaataggaggactgcccgccgctggaagggcctgcagtgacgctaggacaccctctgcctgcatgtcacgttagctgggctgggcgaagtagaagaccaaggggaagaggtgcagtggggagaccaggtgggatgcaaccacaggaccagtggaggggctgtggcacgtgggcggagactgagtggctgggcatgtgttgtggctgagcatgtggtgtgggcagtggtcctagaccccgccatgtccggacaatgatatagagcgtctcagcatcgccagtctagactgtctatggagagcagaaagttgtctngggctgcctggggaactgtgaggccagctatatcaccgtcgctgatggtgacattacggtggtggcaggagcaaggagagagggaagaaggaccccgtccagctttagtcacaaaatacccaatggaagatgccagtgccaatcctgtgggtttccttgggacttcacactggctttcttatctgctccagatccattcagtagtcactgagttcctgccaaatactttgtagcgccagaagccaggagcggggtctgcagcagggcagtccccnttttcaggaaatgcctggagctgctggtccctgagagaaaggaaaacatctttcagccgtacgcaggccaagaaggccaatgtccagtagctttgtgattttttttatatttttttatttatttatttttgagatagagtcttgctctgtcgctcaggctggagtgcagtggcgtgatctccactcactgcaacttccgcctcctggggtcaagcagttctgcctcagcctcccgagtagctgggattacaggcacacgccaccacacccagctaatttttgtgtttttagtagagacggtttcaccatgtcggccaggctggtctcaaactcctgacctcagatgattcagcctcccaaagtgctgggattacaggtgtgagccactgcacccagcctgtgatgtttctgtggggttccacaaatgtgtgtgtgtgtaaaagctgatgattacagcaagaatgtgaacagtagcagttttccatttgaaggcaagttttgtctttatctgggtatcagaaggaccctctgggccattgtcgcttcctgtactcagagccaccctagtactacgggcacacacagaaaacagcagcctgcgtactttcaaaggaaaggcatctttaatcaccaatgcctggaaaaattattttgtttccctcttccttccgtcttgtttcctaacttcttaccaaagtttagagtctgagtttttcgtataataatgtcccacatccacacatcgggcctacagatgctctcccttgaatcgactggaaacatgacaccggttccatgctctggaactgtcacctgtgatgtgctgggctgtgtcccaagcacaggaatcccagcagtttcagctcgatgcagaaccaccatgctccagacacaggcttgggaaagacacgtcaaaattaaaatactaggtaagagaagcacctgattgggtagaagttggagaggaatcctggaattttgtggccagaaggagccactgccccttttgtttagtaagactagacagtaacagaagccagttgtcagctatgaaagtggtgggtgaagcaggggaggctcctctatggtgggaccctggacaagggaagccgaatgtgtgaagaaggggtgcgggggtgtgcggtgccctaggacactagggcaaaggtttcaaacctggaacaaggcactggaggaagatctgctgccagtcagcagtgcgggccctcgagttagcagtccgtgcgcagaggggccagttctgagaccagtttggagagtcaggcagtgacccattggccatgtcataattccttcagcctgcctcctctttaatcccagagagtgctctttcttcatacttcctttaaaatactaaattgttcccattccatggggagctggctaggctttacaggctaggaaatgtaggttttctgagatggaaccatctacacaaggaggaggaaggcactaagactacagatgagacccatgacagggctgagcatttggaagccaaccctggttgcttttcaagaattgctttgtggctgggtgcagtggttcacacctgtaattgcagcactttgggaggctgaggcaggtggattgcttgaacccaggagttcgagaccagcctgggcaacatatgggacaccccaccgcccccggctctgcaaaaaaattaaaaattagccaggcgtggtgtcatgagcctgtggtctcaactactcaggaggctgaggctggaggatcgcttgaacctgggaggtcaaggctccagtgaaccataattgtgccactgcactgcagcctgggcgacaatttgttttctaaattgcttttgaaagtctactgcattacatattccaaaaagcagtggttttcaaatacttttatcaccgatatccttttatgaaatgaaatcagtagaactttctctgctctgaataagcaagggtgggaacctgtctacctcccacagatagcataatgtgcctgccatagaggagccaaaaaatggtgatgggaactgagaggagagcaaatgtcacaaaagactgagcaattgagaaaacaaaacaagaccacagatgactgttaacgcctccacagtggaccaagaaaggacagagagctggcagcatgggcatcactgtctggtcggcagcaggaaggcctcgctagggaattgagtacagtcatctaactagtttaaaagtacaggaaggatgattaaggctattggagaggtcatacaaataggggaggggcaggcaatggctgataagacatgaatttgtaaggcgatgagtattgcagtcagcaaaacaaacgagactgctctcccaacacataactcagcagggaggccaggcattggtttaaccatttaatataaagaagttaaaattacaaatgcgctaagtgcctaaagaagaataagtgcaggaatgagagcagcatggactgccacagttttagaataagcactgtcactgctagattggaaacaaaaatccataaatttggcccggtgtggtggcggacgcctgtagtcccagctacttggaggctgaggcgtgagaatcgcttgaacccgggaggcggaggttgcagtgagccgagatggcgccactgcactccagcctgggcgtcagagtgagaactctgtatcaaaaaataaaaanaaaaaaaagtccataaatctgcaatgtctcagttaagaaagaaagactgggccaatgcagatttcaaaccggagaaagtcatactgtcagtgaaggccgcctgtggccggaaggcgccaggggattagcaccctggactcagtgttgctgggaaacagggccccaaggctgggagcacagtgtttaaagggcatctacccaagaagggagcacagggcaaggaggagctgcagggggncttggctgccaaagtgaattctgaggagagagctattgctgcctacgatatgcaggctgcacagaacacaagtggaatcagcaggcaggagaggcagctaacgacgcagcccgtttcttatttctgttttctcacaagcgatgaaagtggaaaagagggtgagcaggtggcccacacatgtgcctccagtgctgcggcccctccggggaccatcngccaggccccggggagggagccagccacagtgtgtccggctcttctctgaagggaagagagccttgaatagactgaagcgaagacggttctgcaaggacaaggcagaccgaaggcattggttttttttttcagataaggagaattagactcccaagtagacaccagagtcactgtttggttggtgggtgatagtggggtcacagtggctgcctgtgctcccccagggtgagcgtgactgtgctaacctgggtggggcagcatgcacacccctctggcagccctttgttgctcgctgatgacaagtttggatgatcccgccaaacagcttgctaagatgtagtccccagtgttggaggtggggcctgatgggaggtgctacccttgtgagataaggttgtgtaaaagcctgtggcacctccccacactgacgctctcacccctgctctggccatgtgccgcgcctgctcccacttccccttctgccaggagtaaaagcccccgagacctcccagaagccaagcagatgctagtgccatgcttcctctgcagcctgcagaactgtgagccaattaaacctcttttctctat

SEQ ID NO: 300109 - DNA, 9972 bp, Homo sapiens
  misc_feature (5024)..(5024): n is a, c, g, or t
  misc_feature (5962)..(5962): n is a, c, g, or t
  misc_feature (6237)..(6237): n is a, c, g, or t
  misc_feature (8930)..(8930): n is a, c, g, or t
  misc_feature (9168)..(9168): n is a, c, g, or t
  misc_feature (9383)..(9383): n is a, c, g, or t
agtcctgttgtaaattcagaatctgagcagtggtcattttatgaatcagtaaattactgccttacccataacaactttgactgttaaatgttttgttttcttttaaagcccatcgccgaagcaccattcaagttcgacatggaattggatgacttgcctaaggaaaagctcaaagaactaatttttgaagagactgctagattccagccaggatacagatcttaaatttgtcaggacaagggctcagaggactggacgtgctcagacatcggtgttcttcttcccagttcttgacccctggtcctgtctccagcccgtcttggcttatccactttgactcctttgagccgtttggaggggcggtttctggtagttgtggcttttatgctttcaaagaatttcttcagtccagagaattcctcctggcagccctgtgtgtgtcacccattggtgacctgcggcagtatgtacttcagtgcacctactgcttactgttgctttagtcactaattgctttctggtttgaaagatgcagtggttcctccctctcctgaatccttttctacatgatgccctgctgaccatgcagccgcaccagagagagattcttccccaattggctctagtcactggcatctcactttatgatagggaaggctactacctagggcactttaagtcagtgacagccccttatttgcacttcaccttttgaccataactgtttccccagagcaggagcttgtggaaataccttggctgatgttgcagcctgcagcaagtgcttccgtctccggaatccttggggagcacttgtccacgtcttttctcatatcatggtagtcactaacatatataaggtatgtgctattggcccagcttttagaaaatgcagtcatttttctaaataaaaaggaagtactgcacccagcagtgtcactctgtagttactgtggtcacttgtaccatatagaggtgtaacacttgtcaagaagcgttatgtgcagtacttaatgtttgtaagacttacaaaaaaagatttaaagtggcagcttcactcgacatttggtgagagaagtacaaaggttgcagtgctgagctgtgggcggtttctggggatgtcccagggtggaactccacatgctggtgcatatacgcccttgagctacttcaaatgtgggtgtttcagtaaccacgttccatgcctgaggatttagcagagaggaacactgcgtctttaaatgagaaagtatacaattctttttccttctacagcatgtcagcatctcaagttcatttttcaacctacagtataacaatttgtaataaagcctccaggagctcatgacgtgaagcactgttctgtcctcaagtactcaaatatttctgatactgctgagtcagactgtcagaaaaagctagcactaactcgtgtttggagctctatccatattttactgatctctttaagtatttgttcctgccactgtgtactgtggagttgactcggtgttctgtcccagtgcggtgcctcctcttgacttccccactgctctctgtggtgagaaatttgccttgttcaataattactgtaccctcgcatgactgttacagctttctgtgcagagatgactgtccaagtgccacatgcctacgattgaaatgaaaactctattgttacctctgagttgtgttccacggaaaatgctatccagcagatcatttaggaaaaataattctatttttagcttttcatttctcagctgtccttttttcttgtttgatttttgacagcaatggagaatgggttatataaagactgcctgctaatatgaacagaaatgcatttgtaattcatgaaaataaatgtacatcttctatcttcacattcatgttaagattcagtgttgctttcctctggatcagcgtgtctgaatggacagtcaggttcaggttgtgctgaacacagaaatgctcacaggcctcactttgccgcccaggcactggcccagcacttggatttacataagatgagttagaaaggtacttctgtagggtcctttttacctctgctcggcagagaatcgatgctgtcatgttcctttattcacaatcttaggtctcaaatattctgtcaaaccctaacaaagaagccccgacatctcaggttggattccctggttctctctaaagagggcctgcccttgtgccccagaggtgctgctgggcacagccaagagttgggaagggccgccccacagtacgcagtcctcaccacccagcccagggtgctcacgctcaccactcctgtggctgaggaaggatagctggctcatcctcggaaaacagacccacatctctattcttgccctgaaatacgcgcttttcacttgcgtgctcagagctgccgtctgaaggtccacacagcattgacgggacacagaaatgtgactgttaccggataacactgattagtcagttttcatttataaaaaagcattgacagttttattactcttgtttctttttaaatggaaagttactattataaggttaatttgcagtcctcttctaaatagaaaaccatatccttggctactaacatctggagactgtgagctccttcccattccccttcctggtactgtggagtcagattggcatgaaaccactaacttcattctagaatcattgtagccataagttgtgtgctttttattaatcatgccaaacataatgtaactgggcagagaatggtcctaaccaaggtacctatgaaaagcgctagctatcatgtgtagtagatgcatcattttggctcttcttacatttgtaaaaatgtacagattaggtcatcttaattcatattagtgacacggaacagcacctccactatttgtatgttcaaataagctttcagactaatagcttttttggtgtctaaaatgtaagcaaaaaattcctgctgaaacattccagtcctttcatttagtataaaagaaatactgaacaagccagtgggatggaattgaaagaactaatcatgaggactctgtcctgacacaggtcctcaaagctagcagagatacgcagacattgtggcatctgggtagaagaatactgtattgtgtgtgcagtgcacagtgtgtggtgtgtgcacactcattccttctgctcttgggcacaggcagtgggtgtagaggtaaccagtagctttgagaagctacatgtagctcaccagtggttttctctaaggaatcacaaaggtaaactacccaaccacatgccacgtaatatttcagccattcagaggaaactgttttctctttatttgcttatatgttaatatggtttttaaattggtaacttttatatagtatggtaacagtatgttaatacacacatacatatgcacacatgctttgggtccttccataatacttttatatttgtaaatcaatgttttggagcaatcccaagtttaagggaaatatttttgtaaatgtaatggttttgaaaatctgagcaatccttttgcttatacatttttaaagcatttgtgctttaaaattgttatgctggtgtttgaaacatgatactcctgtggtgcagatgagaagctataacagtgaatatgtggtttctcttacgtcatccaccttgacatgatgggtcagaaacaaatggaaatccagagcaagtcctccagggttgcaccaggtttacctaaagcttgttgccttttcttgtgctgtttatccgtgtagagcactcaagaaagttctgaaactgctttgtatctgctttgtactgttggtgccttcttggtattgtaccccaaaattctgcatagattatttagtataatggtaagttaaaaaatgttaaaggaagattttattaagaatctgaatgtttattcattatattgttacaatttaacattaacatttatttgtggtatttgtgatttggttaatctgtataaaaattgtaagtagaaaggtttatatttcatcttaattcttttgatgttgtaaacgtactttttaaaagatggattatttgaatgtttatggcacctgacttgtaaaaaaaaaaaactacaaaaaaatccttagaatcattaaattgtgtccctgtattaccaaaataacacagcaccgtgcatgtatagtttaattgcagtttcatctgtgaaaacgtgaaattgtctagtccttcgttatgttccccagatgtcttccagatttgctctgcatgtggtaacttgtgttagggctgtgagctgttcctcgagttgaatggggatgtcagtgctcctagggttctccaggtggttcttcagaccttcacctgtgggggggggggtaggcggtgcccacgcccatctcctcatcctcctgaacttctgcaaccccactgctgggcagacatcctgggcaaccccttttttcagagcaagaagtcataaagataggatttcttggacatttggttcttatcaatattgggcattatgtaatgacttatttacaaaacaaagatactggaaaatgttttggatgtggtgttatggaaagagcacaggccttggacccatccagctgggttcagaactaccccctgcttataactgcggctggctgtgggccagtcattctgcgtctctgctttcttcctctgcttcagactgtcagctgtaaagtggaagcaatattacttgccttgtatatggtaaagattataaaaatacatttcaactgttcagcatagtacttcaaagcaagtactcagtaaatagcaagtctttttaaatgctgctttatttcactaaattttgttgtgaggtgtcactaaaatgcctgcaaacaaacgtaactgctaatctgagaggaaaccctcttactaatcagagaagaaaccctcctgtcagaaaccttcagggaagtgagctgatcacacctaaactgggagtttgcaatggggtatttgaagcactgtgggagtattccactggcccnctccctgagagacttaacagtcttccctgttgtccagattctgtataaggcaatcagaataatcatcttccttgttcagcagaggagcctggtcccattttccccactttgtgatgggcttctctcagcggtagctcagcagttccagatggcagtttggaccagcatctaggctggccagttcgctgtgtttacttagaaccaacacgttcagagctggcctggaccatctgaggggaacaggaaacacccctaggctgtggaagcaagtgcagacccccacccccggccctgaagccaagggggcagggtttgggagtggccaaagagaagcagtgcagggatgggttttcctagggacaggcttagcattcctgactctaggaagaaggagcagtgaggcggagaaacagtggaggggatggtggcattgggccccatggggccgagatggacacagggctcgttctcttgagtctggtgccaaggacagctgaagacgacatcattttcaggtggagaggagagagtggagggagatcatgccctgtgatgtgtcttttgcaggtgaaggtgggagacaaggtctctgctgacgatgaggcagagccaccgtgaaagttgtaataggaggactgcccgccgctggaagggcctgcagtgacgctaggacaccctctgcctgcatgtcacgttagctgggctgggcgaagtagaagaccaaggggaagaggtgcagtggggagaccaggtgggatgcaaccacaggaccagtggaggggctgtggcacgtgggcggagactgagtggctgggcatgtgttgtggctgagcatgtggtgtgggcagtggtcctagaccccgccatgtccggacaatgatatagagcgtctcagcatcgccagtctagactgtctatggagagcagaaagttgtctngggctgcctggggaactgtgaggccagctatatcaccgtcgctgatggtgacattacggtggtggcaggagcaaggagagagggaagaaggaccccgtccagctttagtcacaaaatacccaatggaagatgccagtgccaatcctgtgggtttccttgggacttcacactggctttcttatctgctccagatccattcagtagtcactgagttcctgccaaatactttgtagcgccagaagccaggagcggggtctgcagcagggcagtccccnttttcaggaaatgcctggagctgctggtccctgagagaaaggaaaacatctttcagccgtacgcaggccaagaaggccaatgtccagtagctttgtgattttttttatatttttttatttatttatttttgagatagagtcttgctctgtcgctcaggctggagtgcagtggcgtgatctccactcactgcaacttccgcctcctggggtcaagcagttctgcctcagcctcccgagtagctgggattacaggcacacgccaccacacccagctaatttttgtgtttttagtagagacggtttcaccatgtcggccaggctggtctcaaactcctgacctcagatgattcagcctcccaaagtgctgggattacaggtgtgagccactgcacccagcctgtgatgtttctgtggggttccacaaatgtgtgtgtgtgtaaaagctgatgattacagcaagaatgtgaacagtagcagttttccatttgaaggcaagttttgtctttatctgggtatcagaaggaccctctgggccattgtcgcttcctgtactcagagccaccctagtactacgggcacacacagaaaacagcagcctgcgtactttcaaaggaaaggcatctttaatcaccaatgcctggaaaaattattttgtttccctcttccttccgtcttgtttcctaacttcttaccaaagtttagagtctgagtttttcgtataataatgtcccacatccacacatcgggcctacagatgctctcccttgaatcgactggaaacatgacaccggttccatgctctggaactgtcacctgtgatgtgctgggctgtgtcccaagcacaggaatcccagcagtttcagctcgatgcagaaccaccatgctccagacacaggcttgggaaagacacgtcaaaattaaaatactaggtaagagaagcacctgattgggtagaagttggagaggaatcctggaattttgtggccagaaggagccactgccccttttgtttagtaagactagacagtaacagaagccagttgtcagctatgaaagtggtgggtgaagcaggggaggctcctctatggtgggaccctggacaagggaagccgaatgtgtgaagaaggggtgcgggggtgtgcggtgccctaggacactagggcaaaggtttcaaacctggaacaaggcactggaggaagatctgctgccagtcagcagtgcgggccctcgagttagcagtccgtgcgcagaggggccagttctgagaccagtttggagagtcaggcagtgacccattggccatgtcataattccttcagcctgcctcctctttaatcccagagagtgctctttcttcatacttcctttaaaatactaaattgttcccattccatggggagctggctaggctttacaggctaggaaatgtaggttttctgagatggaaccatctacacaaggaggaggaaggcactaagactacagatgagacccatgacagggctgagcatttggaagccaaccctggttgcttttcaagaattgctttgtggctgggtgcagtggttcacacctgtaattgcagcactttgggaggctgaggcaggtggattgcttgaacccaggagttcgagaccagcctgggcaacatatgggacaccccaccgcccccggctctgcaaaaaaattaaaaattagccaggcgtggtgtcatgagcctgtggtctcaactactcaggaggctgaggctggaggatcgcttgaacctgggaggtcaaggctccagtgaaccataattgtgccactgcactgcagcctgggcgacaatttgttttctaaattgcttttgaaagtctactgcattacatattccaaaaagcagtggttttcaaatacttttatcaccgatatccttttatgaaatgaaatcagtagaactttctctgctctgaataagcaagggtgggaacctgtctacctcccacagatagcataatgtgcctgccatagaggagccaaaaaatggtgatgggaactgagaggagagcaaatgtcacaaaagactgagcaattgagaaaacaaaacaagaccacagatgactgttaacgcctccacagtggaccaagaaaggacagagagctggcagcatgggcatcactgtctggtcggcagcaggaaggcctcgctagggaattgagtacagtcatctaactagtttaaaagtacaggaaggatgattaaggctattggagaggtcatacaaataggggaggggcaggcaatggctgataagacatgaatttgtaaggcgatgagtattgcagtcagcaaaacaaacgagactgctctcccaacacataactcagcagggaggccaggcattggtttaaccatttaatataaagaagttaaaattacaaatgcgctaagtgcctaaagaagaataagtgcaggaatgagagcagcatggactgccacagttttagaataagcactgtcactgctagattggaaacaaaaatccataaatttggcccggtgtggtggcggacgcctgtagtcccagctacttggaggctgaggcgtgagaatcgcttgaacccgggaggcggaggttgcagtgagccgagatggcgccactgcactccagcctgggcgtcagagtgagaactctgtatcaaaaaataaaaanaaaaaaaagtccataaatctgcaatgtctcagttaagaaagaaagactgggccaatgcagatttcaaaccggagaaagtcatactgtcagtgaaggccgcctgtggccggaaggcgccaggggattagcaccctggactcagtgttgctgggaaacagggccccaaggctgggagcacagtgtttaaagggcatctacccaagaagggagcacagggcaaggaggagctgcagggggncttggctgccaaagtgaattctgaggagagagctattgctgcctacgatatgcaggctgcacagaacacaagtggaatcagcaggcaggagaggcagctaacgacgcagcccgtttcttatttctgttttctcacaagcgatgaaagtggaaaagagggtgagcaggtggcccacacatgtgcctccagtgctgcggcccctccggggaccatcngccaggccccggggagggagccagccacagtgtgtccggctcttctctgaagggaagagagccttgaatagactgaagcgaagacggttctgcaaggacaaggcagaccgaaggcattggttttttttttcagataaggagaattagactcccaagtagacaccagagtcactgtttggttggtgggtgatagtggggtcacagtggctgcctgtgctcccccagggtgagcgtgactgtgctaacctgggtggggcagcatgcacacccctctggcagccctttgttgctcgctgatgacaagtttggatgatcccgccaaacagcttgctaagatgtagtccccagtgttggaggtggggcctgatgggaggtgctacccttgtgagataaggttgtgtaaaagcctgtggcacctccccacactgacgctctcacccctgctctggccatgtgccgcgcctgctcccacttccccttctgccaggagtaaaagcccccgagacctcccagaagccaagcagatgctagtgccatgcttcctctgcagcctgcagaactgtgagccaattaaacctcttttctctat

SEQ ID NO: 300110 - DNA, 9811 bp, Homo sapiens
  misc_feature (4863)..(4863): n is a, c, g, or t
  misc_feature (5801)..(5801): n is a, c, g, or t
  misc_feature (6076)..(6076): n is a, c, g, or t
  misc_feature (8769)..(8769): n is a, c, g, or t
  misc_feature (9007)..(9007): n is a, c, g, or t
  misc_feature (9222)..(9222): n is a, c, g, or t
gttatggatgctgatgatgatgctgttttcacatggctcactcttaactcagtggtctgtggtgtttctataggacaagggctcagaggactggacgtgctcagacatcggtgttcttcttcccagttcttgacccctggtcctgtctccagcccgtcttggcttatccactttgactcctttgagccgtttggaggggcggtttctggtagttgtggcttttatgctttcaaagaatttcttcagtccagagaattcctcctggcagccctgtgtgtgtcacccattggtgacctgcggcagtatgtacttcagtgcacctactgcttactgttgctttagtcactaattgctttctggtttgaaagatgcagtggttcctccctctcctgaatccttttctacatgatgccctgctgaccatgcagccgcaccagagagagattcttccccaattggctctagtcactggcatctcactttatgatagggaaggctactacctagggcactttaagtcagtgacagccccttatttgcacttcaccttttgaccataactgtttccccagagcaggagcttgtggaaataccttggctgatgttgcagcctgcagcaagtgcttccgtctccggaatccttggggagcacttgtccacgtcttttctcatatcatggtagtcactaacatatataaggtatgtgctattggcccagcttttagaaaatgcagtcatttttctaaataaaaaggaagtactgcacccagcagtgtcactctgtagttactgtggtcacttgtaccatatagaggtgtaacacttgtcaagaagcgttatgtgcagtacttaatgtttgtaagacttacaaaaaaagatttaaagtggcagcttcactcgacatttggtgagagaagtacaaaggttgcagtgctgagctgtgggcggtttctggggatgtcccagggtggaactccacatgctggtgcatatacgcccttgagctacttcaaatgtgggtgtttcagtaaccacgttccatgcctgaggatttagcagagaggaacactgcgtctttaaatgagaaagtatacaattctttttccttctacagcatgtcagcatctcaagttcatttttcaacctacagtataacaatttgtaataaagcctccaggagctcatgacgtgaagcactgttctgtcctcaagtactcaaatatttctgatactgctgagtcagactgtcagaaaaagctagcactaactcgtgtttggagctctatccatattttactgatctctttaagtatttgttcctgccactgtgtactgtggagttgactcggtgttctgtcccagtgcggtgcctcctcttgacttccccactgctctctgtggtgagaaatttgccttgttcaataattactgtaccctcgcatgactgttacagctttctgtgcagagatgactgtccaagtgccacatgcctacgattgaaatgaaaactctattgttacctctgagttgtgttccacggaaaatgctatccagcagatcatttaggaaaaataattctatttttagcttttcatttctcagctgtccttttttcttgtttgatttttgacagcaatggagaatgggttatataaagactgcctgctaatatgaacagaaatgcatttgtaattcatgaaaataaatgtacatcttctatcttcacattcatgttaagattcagtgttgctttcctctggatcagcgtgtctgaatggacagtcaggttcaggttgtgctgaacacagaaatgctcacaggcctcactttgccgcccaggcactggcccagcacttggatttacataagatgagttagaaaggtacttctgtagggtcctttttacctctgctcggcagagaatcgatgctgtcatgttcctttattcacaatcttaggtctcaaatattctgtcaaaccctaacaaagaagccccgacatctcaggttggattccctggttctctctaaagagggcctgcccttgtgccccagaggtgctgctgggcacagccaagagttgggaagggccgccccacagtacgcagtcctcaccacccagcccagggtgctcacgctcaccactcctgtggctgaggaaggatagctggctcatcctcggaaaacagacccacatctctattcttgccctgaaatacgcgcttttcacttgcgtgctcagagctgccgtctgaaggtccacacagcattgacgggacacagaaatgtgactgttaccggataacactgattagtcagttttcatttataaaaaagcattgacagttttattactcttgtttctttttaaatggaaagttactattataaggttaatttgcagtcctcttctaaatagaaaaccatatccttggctactaacatctggagactgtgagctccttcccattccccttcctggtactgtggagtcagattggcatgaaaccactaacttcattctagaatcattgtagccataagttgtgtgctttttattaatcatgccaaacataatgtaactgggcagagaatggtcctaaccaaggtacctatgaaaagcgctagctatcatgtgtagtagatgcatcattttggctcttcttacatttgtaaaaatgtacagattaggtcatcttaattcatattagtgacacggaacagcacctccactatttgtatgttcaaataagctttcagactaatagcttttttggtgtctaaaatgtaagcaaaaaattcctgctgaaacattccagtcctttcatttagtataaaagaaatactgaacaagccagtgggatggaattgaaagaactaatcatgaggactctgtcctgacacaggtcctcaaagctagcagagatacgcagacattgtggcatctgggtagaagaatactgtattgtgtgtgcagtgcacagtgtgtggtgtgtgcacactcattccttctgctcttgggcacaggcagtgggtgtagaggtaaccagtagctttgagaagctacatgtagctcaccagtggttttctctaaggaatcacaaaggtaaactacccaaccacatgccacgtaatatttcagccattcagaggaaactgttttctctttatttgcttatatgttaatatggtttttaaattggtaacttttatatagtatggtaacagtatgttaatacacacatacatatgcacacatgctttgggtccttccataatacttttatatttgtaaatcaatgttttggagcaatcccaagtttaagggaaatatttttgtaaatgtaatggttttgaaaatctgagcaatccttttgcttatacatttttaaagcatttgtgctttaaaattgttatgctggtgtttgaaacatgatactcctgtggtgcagatgagaagctataacagtgaatatgtggtttctcttacgtcatccaccttgacatgatgggtcagaaacaaatggaaatccagagcaagtcctccagggttgcaccaggtttacctaaagcttgttgccttttcttgtgctgtttatccgtgtagagcactcaagaaagttctgaaactgctttgtatctgctttgtactgttggtgccttcttggtattgtaccccaaaattctgcatagattatttagtataatggtaagttaaaaaatgttaaaggaagattttattaagaatctgaatgtttattcattatattgttacaatttaacattaacatttatttgtggtatttgtgatttggttaatctgtataaaaattgtaagtagaaaggtttatatttcatcttaattcttttgatgttgtaaacgtactttttaaaagatggattatttgaatgtttatggcacctgacttgtaaaaaaaaaaaactacaaaaaaatccttagaatcattaaattgtgtccctgtattaccaaaataacacagcaccgtgcatgtatagtttaattgcagtttcatctgtgaaaacgtgaaattgtctagtccttcgttatgttccccagatgtcttccagatttgctctgcatgtggtaacttgtgttagggctgtgagctgttcctcgagttgaatggggatgtcagtgctcctagggttctccaggtggttcttcagaccttcacctgtgggggggggggtaggcggtgcccacgcccatctcctcatcctcctgaacttctgcaaccccactgctgggcagacatcctgggcaaccccttttttcagagcaagaagtcataaagataggatttcttggacatttggttcttatcaatattgggcattatgtaatgacttatttacaaaacaaagatactggaaaatgttttggatgtggtgttatggaaagagcacaggccttggacccatccagctgggttcagaactaccccctgcttataactgcggctggctgtgggccagtcattctgcgtctctgctttcttcctctgcttcagactgtcagctgtaaagtggaagcaatattacttgccttgtatatggtaaagattataaaaatacatttcaactgttcagcatagtacttcaaagcaagtactcagtaaatagcaagtctttttaaatgctgctttatttcactaaattttgttgtgaggtgtcactaaaatgcctgcaaacaaacgtaactgctaatctgagaggaaaccctcttactaatcagagaagaaaccctcctgtcagaaaccttcagggaagtgagctgatcacacctaaactgggagtttgcaatggggtatttgaagcactgtgggagtattccactggcccnctccctgagagacttaacagtcttccctgttgtccagattctgtataaggcaatcagaataatcatcttccttgttcagcagaggagcctggtcccattttccccactttgtgatgggcttctctcagcggtagctcagcagttccagatggcagtttggaccagcatctaggctggccagttcgctgtgtttacttagaaccaacacgttcagagctggcctggaccatctgaggggaacaggaaacacccctaggctgtggaagcaagtgcagacccccacccccggccctgaagccaagggggcagggtttgggagtggccaaagagaagcagtgcagggatgggttttcctagggacaggcttagcattcctgactctaggaagaaggagcagtgaggcggagaaacagtggaggggatggtggcattgggccccatggggccgagatggacacagggctcgttctcttgagtctggtgccaaggacagctgaagacgacatcattttcaggtggagaggagagagtggagggagatcatgccctgtgatgtgtcttttgcaggtgaaggtgggagacaaggtctctgctgacgatgaggcagagccaccgtgaaagttgtaataggaggactgcccgccgctggaagggcctgcagtgacgctaggacaccctctgcctgcatgtcacgttagctgggctgggcgaagtagaagaccaaggggaagaggtgcagtggggagaccaggtgggatgcaaccacaggaccagtggaggggctgtggcacgtgggcggagactgagtggctgggcatgtgttgtggctgagcatgtggtgtgggcagtggtcctagaccccgccatgtccggacaatgatatagagcgtctcagcatcgccagtctagactgtctatggagagcagaaagttgtctngggctgcctggggaactgtgaggccagctatatcaccgtcgctgatggtgacattacggtggtggcaggagcaaggagagagggaagaaggaccccgtccagctttagtcacaaaatacccaatggaagatgccagtgccaatcctgtgggtttccttgggacttcacactggctttcttatctgctccagatccattcagtagtcactgagttcctgccaaatactttgtagcgccagaagccaggagcggggtctgcagcagggcagtccccnttttcaggaaatgcctggagctgctggtccctgagagaaaggaaaacatctttcagccgtacgcaggccaagaaggccaatgtccagtagctttgtgattttttttatatttttttatttatttatttttgagatagagtcttgctctgtcgctcaggctggagtgcagtggcgtgatctccactcactgcaacttccgcctcctggggtcaagcagttctgcctcagcctcccgagtagctgggattacaggcacacgccaccacacccagctaatttttgtgtttttagtagagacggtttcaccatgtcggccaggctggtctcaaactcctgacctcagatgattcagcctcccaaagtgctgggattacaggtgtgagccactgcacccagcctgtgatgtttctgtggggttccacaaatgtgtgtgtgtgtaaaagctgatgattacagcaagaatgtgaacagtagcagttttccatttgaaggcaagttttgtctttatctgggtatcagaaggaccctctgggccattgtcgcttcctgtactcagagccaccctagtactacgggcacacacagaaaacagcagcctgcgtactttcaaaggaaaggcatctttaatcaccaatgcctggaaaaattattttgtttccctcttccttccgtcttgtttcctaacttcttaccaaagtttagagtctgagtttttcgtataataatgtcccacatccacacatcgggcctacagatgctctcccttgaatcgactggaaacatgacaccggttccatgctctggaactgtcacctgtgatgtgctgggctgtgtcccaagcacaggaatcccagcagtttcagctcgatgcagaaccaccatgctccagacacaggcttgggaaagacacgtcaaaattaaaatactaggtaagagaagcacctgattgggtagaagttggagaggaatcctggaattttgtggccagaaggagccactgccccttttgtttagtaagactagacagtaacagaagccagttgtcagctatgaaagtggtgggtgaagcaggggaggctcctctatggtgggaccctggacaagggaagccgaatgtgtgaagaaggggtgcgggggtgtgcggtgccctaggacactagggcaaaggtttcaaacctggaacaaggcactggaggaagatctgctgccagtcagcagtgcgggccctcgagttagcagtccgtgcgcagaggggccagttctgagaccagtttggagagtcaggcagtgacccattggccatgtcataattccttcagcctgcctcctctttaatcccagagagtgctctttcttcatacttcctttaaaatactaaattgttcccattccatggggagctggctaggctttacaggctaggaaatgtaggttttctgagatggaaccatctacacaaggaggaggaaggcactaagactacagatgagacccatgacagggctgagcatttggaagccaaccctggttgcttttcaagaattgctttgtggctgggtgcagtggttcacacctgtaattgcagcactttgggaggctgaggcaggtggattgcttgaacccaggagttcgagaccagcctgggcaacatatgggacaccccaccgcccccggctctgcaaaaaaattaaaaattagccaggcgtggtgtcatgagcctgtggtctcaactactcaggaggctgaggctggaggatcgcttgaacctgggaggtcaaggctccagtgaaccataattgtgccactgcactgcagcctgggcgacaatttgttttctaaattgcttttgaaagtctactgcattacatattccaaaaagcagtggttttcaaatacttttatcaccgatatccttttatgaaatgaaatcagtagaactttctctgctctgaataagcaagggtgggaacctgtctacctcccacagatagcataatgtgcctgccatagaggagccaaaaaatggtgatgggaactgagaggagagcaaatgtcacaaaagactgagcaattgagaaaacaaaacaagaccacagatgactgttaacgcctccacagtggaccaagaaaggacagagagctggcagcatgggcatcactgtctggtcggcagcaggaaggcctcgctagggaattgagtacagtcatctaactagtttaaaagtacaggaaggatgattaaggctattggagaggtcatacaaataggggaggggcaggcaatggctgataagacatgaatttgtaaggcgatgagtattgcagtcagcaaaacaaacgagactgctctcccaacacataactcagcagggaggccaggcattggtttaaccatttaatataaagaagttaaaattacaaatgcgctaagtgcctaaagaagaataagtgcaggaatgagagcagcatggactgccacagttttagaataagcactgtcactgctagattggaaacaaaaatccataaatttggcccggtgtggtggcggacgcctgtagtcccagctacttggaggctgaggcgtgagaatcgcttgaacccgggaggcggaggttgcagtgagccgagatggcgccactgcactccagcctgggcgtcagagtgagaactctgtatcaaaaaataaaaanaaaaaaaagtccataaatctgcaatgtctcagttaagaaagaaagactgggccaatgcagatttcaaaccggagaaagtcatactgtcagtgaaggccgcctgtggccggaaggcgccaggggattagcaccctggactcagtgttgctgggaaacagggccccaaggctgggagcacagtgtttaaagggcatctacccaagaagggagcacagggcaaggaggagctgcagggggncttggctgccaaagtgaattctgaggagagagctattgctgcctacgatatgcaggctgcacagaacacaagtggaatcagcaggcaggagaggcagctaacgacgcagcccgtttcttatttctgttttctcacaagcgatgaaagtggaaaagagggtgagcaggtggcccacacatgtgcctccagtgctgcggcccctccggggaccatcngccaggccccggggagggagccagccacagtgtgtccggctcttctctgaagggaagagagccttgaatagactgaagcgaagacggttctgcaaggacaaggcagaccgaaggcattggttttttttttcagataaggagaattagactcccaagtagacaccagagtcactgtttggttggtgggtgatagtggggtcacagtggctgcctgtgctcccccagggtgagcgtgactgtgctaacctgggtggggcagcatgcacacccctctggcagccctttgttgctcgctgatgacaagtttggatgatcccgccaaacagcttgctaagatgtagtccccagtgttggaggtggggcctgatgggaggtgctacccttgtgagataaggttgtgtaaaagcctgtggcacctccccacactgacgctctcacccctgctctggccatgtgccgcgcctgctcccacttccccttctgccaggagtaaaagcccccgagacctcccagaagccaagcagatgctagtgccatgcttcctctgcagcctgcagaactgtgagccaattaaacctcttttctctat

SEQ ID NO: 300111 - DNA, 10195 bp, Homo sapiens
  misc_feature (5247)..(5247): n is a, c, g, or t
  misc_feature (6185)..(6185): n is a, c, g, or t
  misc_feature (6460)..(6460): n is a, c, g, or t
  misc_feature (9153)..(9153): n is a, c, g, or t
  misc_feature (9391)..(9391): n is a, c, g, or t
  misc_feature (9606)..(9606): n is a, c, g, or t
gcgcccctccctccgcccgcccgccggcccgcccgtcagtctggcaggcaggcaggcaatcggtccgagtggctgtcggctcttcagctctcccgctcggcgtcttccttcctcctcccggtcagcgtcggcggctgcaccggcggcggcgcagtccctgcgggaggggcgacaagagctgagcggcggccgccgagcgtcgagctcagcgcggcggaggcggcggcggcccggcagccaacatggcggcggcggcggcggcgggcgcgggcccggagatggtccgcgggcaggtgttcgacgtggggccgcgctacaccaacctctcgtacatcggcgagggcgcctacggcatggtgtgctctgcttatgataatgtcaacaaagttcgagtagctatcaagaaaatcagcccctttgagcaccagacctactgccagagaaccctgagggagataaaaatcttactgcgcttcagacatgagaacatcattggaatcaatgacattattcgagcaccaaccatcgagcaaatgaaagatgtatatatagtacaggacctcatggaaacagatctttacaagctcttgaagacacaacacctcagcaatgaccatatctgctattttctctaccagatcctcagagggttaaaatatatccattcagctaacgttctgcaccgtgacctcaagccttccaacctactgcttactgttgctttagtcactaattgctttctggtttgaaagatgcagtggttcctccctctcctgaatccttttctacatgatgccctgctgaccatgcagccgcaccagagagagattcttccccaattggctctagtcactggcatctcactttatgatagggaaggctactacctagggcactttaagtcagtgacagccccttatttgcacttcaccttttgaccataactgtttccccagagcaggagcttgtggaaataccttggctgatgttgcagcctgcagcaagtgcttccgtctccggaatccttggggagcacttgtccacgtcttttctcatatcatggtagtcactaacatatataaggtatgtgctattggcccagcttttagaaaatgcagtcatttttctaaataaaaaggaagtactgcacccagcagtgtcactctgtagttactgtggtcacttgtaccatatagaggtgtaacacttgtcaagaagcgttatgtgcagtacttaatgtttgtaagacttacaaaaaaagatttaaagtggcagcttcactcgacatttggtgagagaagtacaaaggttgcagtgctgagctgtgggcggtttctggggatgtcccagggtggaactccacatgctggtgcatatacgcccttgagctacttcaaatgtgggtgtttcagtaaccacgttccatgcctgaggatttagcagagaggaacactgcgtctttaaatgagaaagtatacaattctttttccttctacagcatgtcagcatctcaagttcatttttcaacctacagtataacaatttgtaataaagcctccaggagctcatgacgtgaagcactgttctgtcctcaagtactcaaatatttctgatactgctgagtcagactgtcagaaaaagctagcactaactcgtgtttggagctctatccatattttactgatctctttaagtatttgttcctgccactgtgtactgtggagttgactcggtgttctgtcccagtgcggtgcctcctcttgacttccccactgctctctgtggtgagaaatttgccttgttcaataattactgtaccctcgcatgactgttacagctttctgtgcagagatgactgtccaagtgccacatgcctacgattgaaatgaaaactctattgttacctctgagttgtgttccacggaaaatgctatccagcagatcatttaggaaaaataattctatttttagcttttcatttctcagctgtccttttttcttgtttgatttttgacagcaatggagaatgggttatataaagactgcctgctaatatgaacagaaatgcatttgtaattcatgaaaataaatgtacatcttctatcttcacattcatgttaagattcagtgttgctttcctctggatcagcgtgtctgaatggacagtcaggttcaggttgtgctgaacacagaaatgctcacaggcctcactttgccgcccaggcactggcccagcacttggatttacataagatgagttagaaaggtacttctgtagggtcctttttacctctgctcggcagagaatcgatgctgtcatgttcctttattcacaatcttaggtctcaaatattctgtcaaaccctaacaaagaagccccgacatctcaggttggattccctggttctctctaaagagggcctgcccttgtgccccagaggtgctgctgggcacagccaagagttgggaagggccgccccacagtacgcagtcctcaccacccagcccagggtgctcacgctcaccactcctgtggctgaggaaggatagctggctcatcctcggaaaacagacccacatctctattcttgccctgaaatacgcgcttttcacttgcgtgctcagagctgccgtctgaaggtccacacagcattgacgggacacagaaatgtgactgttaccggataacactgattagtcagttttcatttataaaaaagcattgacagttttattactcttgtttctttttaaatggaaagttactattataaggttaatttgcagtcctcttctaaatagaaaaccatatccttggctactaacatctggagactgtgagctccttcccattccccttcctggtactgtggagtcagattggcatgaaaccactaacttcattctagaatcattgtagccataagttgtgtgctttttattaatcatgccaaacataatgtaactgggcagagaatggtcctaaccaaggtacctatgaaaagcgctagctatcatgtgtagtagatgcatcattttggctcttcttacatttgtaaaaatgtacagattaggtcatcttaattcatattagtgacacggaacagcacctccactatttgtatgttcaaataagctttcagactaatagcttttttggtgtctaaaatgtaagcaaaaaattcctgctgaaacattccagtcctttcatttagtataaaagaaatactgaacaagccagtgggatggaattgaaagaactaatcatgaggactctgtcctgacacaggtcctcaaagctagcagagatacgcagacattgtggcatctgggtagaagaatactgtattgtgtgtgcagtgcacagtgtgtggtgtgtgcacactcattccttctgctcttgggcacaggcagtgggtgtagaggtaaccagtagctttgagaagctacatgtagctcaccagtggttttctctaaggaatcacaaaggtaaactacccaaccacatgccacgtaatatttcagccattcagaggaaactgttttctctttatttgcttatatgttaatatggtttttaaattggtaacttttatatagtatggtaacagtatgttaatacacacatacatatgcacacatgctttgggtccttccataatacttttatatttgtaaatcaatgttttggagcaatcccaagtttaagggaaatatttttgtaaatgtaatggttttgaaaatctgagcaatccttttgcttatacatttttaaagcatttgtgctttaaaattgttatgctggtgtttgaaacatgatactcctgtggtgcagatgagaagctataacagtgaatatgtggtttctcttacgtcatccaccttgacatgatgggtcagaaacaaatggaaatccagagcaagtcctccagggttgcaccaggtttacctaaagcttgttgccttttcttgtgctgtttatccgtgtagagcactcaagaaagttctgaaactgctttgtatctgctttgtactgttggtgccttcttggtattgtaccccaaaattctgcatagattatttagtataatggtaagttaaaaaatgttaaaggaagattttattaagaatctgaatgtttattcattatattgttacaatttaacattaacatttatttgtggtatttgtgatttggttaatctgtataaaaattgtaagtagaaaggtttatatttcatcttaattcttttgatgttgtaaacgtactttttaaaagatggattatttgaatgtttatggcacctgacttgtaaaaaaaaaaaactacaaaaaaatccttagaatcattaaattgtgtccctgtattaccaaaataacacagcaccgtgcatgtatagtttaattgcagtttcatctgtgaaaacgtgaaattgtctagtccttcgttatgttccccagatgtcttccagatttgctctgcatgtggtaacttgtgttagggctgtgagctgttcctcgagttgaatggggatgtcagtgctcctagggttctccaggtggttcttcagaccttcacctgtgggggggggggtaggcggtgcccacgcccatctcctcatcctcctgaacttctgcaaccccactgctgggcagacatcctgggcaaccccttttttcagagcaagaagtcataaagataggatttcttggacatttggttcttatcaatattgggcattatgtaatgacttatttacaaaacaaagatactggaaaatgttttggatgtggtgttatggaaagagcacaggccttggacccatccagctgggttcagaactaccccctgcttataactgcggctggctgtgggccagtcattctgcgtctctgctttcttcctctgcttcagactgtcagctgtaaagtggaagcaatattacttgccttgtatatggtaaagattataaaaatacatttcaactgttcagcatagtacttcaaagcaagtactcagtaaatagcaagtctttttaaatgctgctttatttcactaaattttgttgtgaggtgtcactaaaatgcctgcaaacaaacgtaactgctaatctgagaggaaaccctcttactaatcagagaagaaaccctcctgtcagaaaccttcagggaagtgagctgatcacacctaaactgggagtttgcaatggggtatttgaagcactgtgggagtattccactggcccnctccctgagagacttaacagtcttccctgttgtccagattctgtataaggcaatcagaataatcatcttccttgttcagcagaggagcctggtcccattttccccactttgtgatgggcttctctcagcggtagctcagcagttccagatggcagtttggaccagcatctaggctggccagttcgctgtgtttacttagaaccaacacgttcagagctggcctggaccatctgaggggaacaggaaacacccctaggctgtggaagcaagtgcagacccccacccccggccctgaagccaagggggcagggtttgggagtggccaaagagaagcagtgcagggatgggttttcctagggacaggcttagcattcctgactctaggaagaaggagcagtgaggcggagaaacagtggaggggatggtggcattgggccccatggggccgagatggacacagggctcgttctcttgagtctggtgccaaggacagctgaagacgacatcattttcaggtggagaggagagagtggagggagatcatgccctgtgatgtgtcttttgcaggtgaaggtgggagacaaggtctctgctgacgatgaggcagagccaccgtgaaagttgtaataggaggactgcccgccgctggaagggcctgcagtgacgctaggacaccctctgcctgcatgtcacgttagctgggctgggcgaagtagaagaccaaggggaagaggtgcagtggggagaccaggtgggatgcaaccacaggaccagtggaggggctgtggcacgtgggcggagactgagtggctgggcatgtgttgtggctgagcatgtggtgtgggcagtggtcctagaccccgccatgtccggacaatgatatagagcgtctcagcatcgccagtctagactgtctatggagagcagaaagttgtctngggctgcctggggaactgtgaggccagctatatcaccgtcgctgatggtgacattacggtggtggcaggagcaaggagagagggaagaaggaccccgtccagctttagtcacaaaatacccaatggaagatgccagtgccaatcctgtgggtttccttgggacttcacactggctttcttatctgctccagatccattcagtagtcactgagttcctgccaaatactttgtagcgccagaagccaggagcggggtctgcagcagggcagtccccnttttcaggaaatgcctggagctgctggtccctgagagaaaggaaaacatctttcagccgtacgcaggccaagaaggccaatgtccagtagctttgtgattttttttatatttttttatttatttatttttgagatagagtcttgctctgtcgctcaggctggagtgcagtggcgtgatctccactcactgcaacttccgcctcctggggtcaagcagttctgcctcagcctcccgagtagctgggattacaggcacacgccaccacacccagctaatttttgtgtttttagtagagacggtttcaccatgtcggccaggctggtctcaaactcctgacctcagatgattcagcctcccaaagtgctgggattacaggtgtgagccactgcacccagcctgtgatgtttctgtggggttccacaaatgtgtgtgtgtgtaaaagctgatgattacagcaagaatgtgaacagtagcagttttccatttgaaggcaagttttgtctttatctgggtatcagaaggaccctctgggccattgtcgcttcctgtactcagagccaccctagtactacgggcacacacagaaaacagcagcctgcgtactttcaaaggaaaggcatctttaatcaccaatgcctggaaaaattattttgtttccctcttccttccgtcttgtttcctaacttcttaccaaagtttagagtctgagtttttcgtataataatgtcccacatccacacatcgggcctacagatgctctcccttgaatcgactggaaacatgacaccggttccatgctctggaactgtcacctgtgatgtgctgggctgtgtcccaagcacaggaatcccagcagtttcagctcgatgcagaaccaccatgctccagacacaggcttgggaaagacacgtcaaaattaaaatactaggtaagagaagcacctgattgggtagaagttggagaggaatcctggaattttgtggccagaaggagccactgccccttttgtttagtaagactagacagtaacagaagccagttgtcagctatgaaagtggtgggtgaagcaggggaggctcctctatggtgggaccctggacaagggaagccgaatgtgtgaagaaggggtgcgggggtgtgcggtgccctaggacactagggcaaaggtttcaaacctggaacaaggcactggaggaagatctgctgccagtcagcagtgcgggccctcgagttagcagtccgtgcgcagaggggccagttctgagaccagtttggagagtcaggcagtgacccattggccatgtcataattccttcagcctgcctcctctttaatcccagagagtgctctttcttcatacttcctttaaaatactaaattgttcccattccatggggagctggctaggctttacaggctaggaaatgtaggttttctgagatggaaccatctacacaaggaggaggaaggcactaagactacagatgagacccatgacagggctgagcatttggaagccaaccctggttgcttttcaagaattgctttgtggctgggtgcagtggttcacacctgtaattgcagcactttgggaggctgaggcaggtggattgcttgaacccaggagttcgagaccagcctgggcaacatatgggacaccccaccgcccccggctctgcaaaaaaattaaaaattagccaggcgtggtgtcatgagcctgtggtctcaactactcaggaggctgaggctggaggatcgcttgaacctgggaggtcaaggctccagtgaaccataattgtgccactgcactgcagcctgggcgacaatttgttttctaaattgcttttgaaagtctactgcattacatattccaaaaagcagtggttttcaaatacttttatcaccgatatccttttatgaaatgaaatcagtagaactttctctgctctgaataagcaagggtgggaacctgtctacctcccacagatagcataatgtgcctgccatagaggagccaaaaaatggtgatgggaactgagaggagagcaaatgtcacaaaagactgagcaattgagaaaacaaaacaagaccacagatgactgttaacgcctccacagtggaccaagaaaggacagagagctggcagcatgggcatcactgtctggtcggcagcaggaaggcctcgctagggaattgagtacagtcatctaactagtttaaaagtacaggaaggatgattaaggctattggagaggtcatacaaataggggaggggcaggcaatggctgataagacatgaatttgtaaggcgatgagtattgcagtcagcaaaacaaacgagactgctctcccaacacataactcagcagggaggccaggcattggtttaaccatttaatataaagaagttaaaattacaaatgcgctaagtgcctaaagaagaataagtgcaggaatgagagcagcatggactgccacagttttagaataagcactgtcactgctagattggaaacaaaaatccataaatttggcccggtgtggtggcggacgcctgtagtcccagctacttggaggctgaggcgtgagaatcgcttgaacccgggaggcggaggttgcagtgagccgagatggcgccactgcactccagcctgggcgtcagagtgagaactctgtatcaaaaaataaaaanaaaaaaaagtccataaatctgcaatgtctcagttaagaaagaaagactgggccaatgcagatttcaaaccggagaaagtcatactgtcagtgaaggccgcctgtggccggaaggcgccaggggattagcaccctggactcagtgttgctgggaaacagggccccaaggctgggagcacagtgtttaaagggcatctacccaagaagggagcacagggcaaggaggagctgcagggggncttggctgccaaagtgaattctgaggagagagctattgctgcctacgatatgcaggctgcacagaacacaagtggaatcagcaggcaggagaggcagctaacgacgcagcccgtttcttatttctgttttctcacaagcgatgaaagtggaaaagagggtgagcaggtggcccacacatgtgcctccagtgctgcggcccctccggggaccatcngccaggccccggggagggagccagccacagtgtgtccggctcttctctgaagggaagagagccttgaatagactgaagcgaagacggttctgcaaggacaaggcagaccgaaggcattggttttttttttcagataaggagaattagactcccaagtagacaccagagtcactgtttggttggtgggtgatagtggggtcacagtggctgcctgtgctcccccagggtgagcgtgactgtgctaacctgggtggggcagcatgcacacccctctggcagccctttgttgctcgctgatgacaagtttggatgatcccgccaaacagcttgctaagatgtagtccccagtgttggaggtggggcctgatgggaggtgctacccttgtgagataaggttgtgtaaaagcctgtggcacctccccacactgacgctctcacccctgctctggccatgtgccgcgcctgctcccacttccccttctgccaggagtaaaagcccccgagacctcccagaagccaagcagatgctagtgccatgcttcctctgcagcctgcagaactgtgagccaattaaacctcttttctctat

SEQ ID NO: 300112 - DNA, 9272 bp, Homo sapiens
  misc_feature (4324)..(4324): n is a, c, g, or t
  misc_feature (5262)..(5262): n is a, c, g, or t
  misc_feature (5537)..(5537): n is a, c, g, or t
  misc_feature (8230)..(8230): n is a, c, g, or t
  misc_feature (8468)..(8468): n is a, c, g, or t
  misc_feature (8683)..(8683): n is a, c, g, or t
atgagccgctccgattatcctatagatcagtagagcaggagcttgtggaaataccttggctgatgttgcagcctgcagcaagtgcttccgtctccggaatccttggggagcacttgtccacgtcttttctcatatcatggtagtcactaacatatataaggtatgtgctattggcccagcttttagaaaatgcagtcatttttctaaataaaaaggaagtactgcacccagcagtgtcactctgtagttactgtggtcacttgtaccatatagaggtgtaacacttgtcaagaagcgttatgtgcagtacttaatgtttgtaagacttacaaaaaaagatttaaagtggcagcttcactcgacatttggtgagagaagtacaaaggttgcagtgctgagctgtgggcggtttctggggatgtcccagggtggaactccacatgctggtgcatatacgcccttgagctacttcaaatgtgggtgtttcagtaaccacgttccatgcctgaggatttagcagagaggaacactgcgtctttaaatgagaaagtatacaattctttttccttctacagcatgtcagcatctcaagttcatttttcaacctacagtataacaatttgtaataaagcctccaggagctcatgacgtgaagcactgttctgtcctcaagtactcaaatatttctgatactgctgagtcagactgtcagaaaaagctagcactaactcgtgtttggagctctatccatattttactgatctctttaagtatttgttcctgccactgtgtactgtggagttgactcggtgttctgtcccagtgcggtgcctcctcttgacttccccactgctctctgtggtgagaaatttgccttgttcaataattactgtaccctcgcatgactgttacagctttctgtgcagagatgactgtccaagtgccacatgcctacgattgaaatgaaaactctattgttacctctgagttgtgttccacggaaaatgctatccagcagatcatttaggaaaaataattctatttttagcttttcatttctcagctgtccttttttcttgtttgatttttgacagcaatggagaatgggttatataaagactgcctgctaatatgaacagaaatgcatttgtaattcatgaaaataaatgtacatcttctatcttcacattcatgttaagattcagtgttgctttcctctggatcagcgtgtctgaatggacagtcaggttcaggttgtgctgaacacagaaatgctcacaggcctcactttgccgcccaggcactggcccagcacttggatttacataagatgagttagaaaggtacttctgtagggtcctttttacctctgctcggcagagaatcgatgctgtcatgttcctttattcacaatcttaggtctcaaatattctgtcaaaccctaacaaagaagccccgacatctcaggttggattccctggttctctctaaagagggcctgcccttgtgccccagaggtgctgctgggcacagccaagagttgggaagggccgccccacagtacgcagtcctcaccacccagcccagggtgctcacgctcaccactcctgtggctgaggaaggatagctggctcatcctcggaaaacagacccacatctctattcttgccctgaaatacgcgcttttcacttgcgtgctcagagctgccgtctgaaggtccacacagcattgacgggacacagaaatgtgactgttaccggataacactgattagtcagttttcatttataaaaaagcattgacagttttattactcttgtttctttttaaatggaaagttactattataaggttaatttgcagtcctcttctaaatagaaaaccatatccttggctactaacatctggagactgtgagctccttcccattccccttcctggtactgtggagtcagattggcatgaaaccactaacttcattctagaatcattgtagccataagttgtgtgctttttattaatcatgccaaacataatgtaactgggcagagaatggtcctaaccaaggtacctatgaaaagcgctagctatcatgtgtagtagatgcatcattttggctcttcttacatttgtaaaaatgtacagattaggtcatcttaattcatattagtgacacggaacagcacctccactatttgtatgttcaaataagctttcagactaatagcttttttggtgtctaaaatgtaagcaaaaaattcctgctgaaacattccagtcctttcatttagtataaaagaaatactgaacaagccagtgggatggaattgaaagaactaatcatgaggactctgtcctgacacaggtcctcaaagctagcagagatacgcagacattgtggcatctgggtagaagaatactgtattgtgtgtgcagtgcacagtgtgtggtgtgtgcacactcattccttctgctcttgggcacaggcagtgggtgtagaggtaaccagtagctttgagaagctacatgtagctcaccagtggttttctctaaggaatcacaaaggtaaactacccaaccacatgccacgtaatatttcagccattcagaggaaactgttttctctttatttgcttatatgttaatatggtttttaaattggtaacttttatatagtatggtaacagtatgttaatacacacatacatatgcacacatgctttgggtccttccataatacttttatatttgtaaatcaatgttttggagcaatcccaagtttaagggaaatatttttgtaaatgtaatggttttgaaaatctgagcaatccttttgcttatacatttttaaagcatttgtgctttaaaattgttatgctggtgtttgaaacatgatactcctgtggtgcagatgagaagctataacagtgaatatgtggtttctcttacgtcatccaccttgacatgatgggtcagaaacaaatggaaatccagagcaagtcctccagggttgcaccaggtttacctaaagcttgttgccttttcttgtgctgtttatccgtgtagagcactcaagaaagttctgaaactgctttgtatctgctttgtactgttggtgccttcttggtattgtaccccaaaattctgcatagattatttagtataatggtaagttaaaaaatgttaaaggaagattttattaagaatctgaatgtttattcattatattgttacaatttaacattaacatttatttgtggtatttgtgatttggttaatctgtataaaaattgtaagtagaaaggtttatatttcatcttaattcttttgatgttgtaaacgtactttttaaaagatggattatttgaatgtttatggcacctgacttgtaaaaaaaaaaaactacaaaaaaatccttagaatcattaaattgtgtccctgtattaccaaaataacacagcaccgtgcatgtatagtttaattgcagtttcatctgtgaaaacgtgaaattgtctagtccttcgttatgttccccagatgtcttccagatttgctctgcatgtggtaacttgtgttagggctgtgagctgttcctcgagttgaatggggatgtcagtgctcctagggttctccaggtggttcttcagaccttcacctgtgggggggggggtaggcggtgcccacgcccatctcctcatcctcctgaacttctgcaaccccactgctgggcagacatcctgggcaaccccttttttcagagcaagaagtcataaagataggatttcttggacatttggttcttatcaatattgggcattatgtaatgacttatttacaaaacaaagatactggaaaatgttttggatgtggtgttatggaaagagcacaggccttggacccatccagctgggttcagaactaccccctgcttataactgcggctggctgtgggccagtcattctgcgtctctgctttcttcctctgcttcagactgtcagctgtaaagtggaagcaatattacttgccttgtatatggtaaagattataaaaatacatttcaactgttcagcatagtacttcaaagcaagtactcagtaaatagcaagtctttttaaatgctgctttatttcactaaattttgttgtgaggtgtcactaaaatgcctgcaaacaaacgtaactgctaatctgagaggaaaccctcttactaatcagagaagaaaccctcctgtcagaaaccttcagggaagtgagctgatcacacctaaactgggagtttgcaatggggtatttgaagcactgtgggagtattccactggcccnctccctgagagacttaacagtcttccctgttgtccagattctgtataaggcaatcagaataatcatcttccttgttcagcagaggagcctggtcccattttccccactttgtgatgggcttctctcagcggtagctcagcagttccagatggcagtttggaccagcatctaggctggccagttcgctgtgtttacttagaaccaacacgttcagagctggcctggaccatctgaggggaacaggaaacacccctaggctgtggaagcaagtgcagacccccacccccggccctgaagccaagggggcagggtttgggagtggccaaagagaagcagtgcagggatgggttttcctagggacaggcttagcattcctgactctaggaagaaggagcagtgaggcggagaaacagtggaggggatggtggcattgggccccatggggccgagatggacacagggctcgttctcttgagtctggtgccaaggacagctgaagacgacatcattttcaggtggagaggagagagtggagggagatcatgccctgtgatgtgtcttttgcaggtgaaggtgggagacaaggtctctgctgacgatgaggcagagccaccgtgaaagttgtaataggaggactgcccgccgctggaagggcctgcagtgacgctaggacaccctctgcctgcatgtcacgttagctgggctgggcgaagtagaagaccaaggggaagaggtgcagtggggagaccaggtgggatgcaaccacaggaccagtggaggggctgtggcacgtgggcggagactgagtggctgggcatgtgttgtggctgagcatgtggtgtgggcagtggtcctagaccccgccatgtccggacaatgatatagagcgtctcagcatcgccagtctagactgtctatggagagcagaaagttgtctngggctgcctggggaactgtgaggccagctatatcaccgtcgctgatggtgacattacggtggtggcaggagcaaggagagagggaagaaggaccccgtccagctttagtcacaaaatacccaatggaagatgccagtgccaatcctgtgggtttccttgggacttcacactggctttcttatctgctccagatccattcagtagtcactgagttcctgccaaatactttgtagcgccagaagccaggagcggggtctgcagcagggcagtccccnttttcaggaaatgcctggagctgctggtccctgagagaaaggaaaacatctttcagccgtacgcaggccaagaaggccaatgtccagtagctttgtgattttttttatatttttttatttatttatttttgagatagagtcttgctctgtcgctcaggctggagtgcagtggcgtgatctccactcactgcaacttccgcctcctggggtcaagcagttctgcctcagcctcccgagtagctgggattacaggcacacgccaccacacccagctaatttttgtgtttttagtagagacggtttcaccatgtcggccaggctggtctcaaactcctgacctcagatgattcagcctcccaaagtgctgggattacaggtgtgagccactgcacccagcctgtgatgtttctgtggggttccacaaatgtgtgtgtgtgtaaaagctgatgattacagcaagaatgtgaacagtagcagttttccatttgaaggcaagttttgtctttatctgggtatcagaaggaccctctgggccattgtcgcttcctgtactcagagccaccctagtactacgggcacacacagaaaacagcagcctgcgtactttcaaaggaaaggcatctttaatcaccaatgcctggaaaaattattttgtttccctcttccttccgtcttgtttcctaacttcttaccaaagtttagagtctgagtttttcgtataataatgtcccacatccacacatcgggcctacagatgctctcccttgaatcgactggaaacatgacaccggttccatgctctggaactgtcacctgtgatgtgctgggctgtgtcccaagcacaggaatcccagcagtttcagctcgatgcagaaccaccatgctccagacacaggcttgggaaagacacgtcaaaattaaaatactaggtaagagaagcacctgattgggtagaagttggagaggaatcctggaattttgtggccagaaggagccactgccccttttgtttagtaagactagacagtaacagaagccagttgtcagctatgaaagtggtgggtgaagcaggggaggctcctctatggtgggaccctggacaagggaagccgaatgtgtgaagaaggggtgcgggggtgtgcggtgccctaggacactagggcaaaggtttcaaacctggaacaaggcactggaggaagatctgctgccagtcagcagtgcgggccctcgagttagcagtccgtgcgcagaggggccagttctgagaccagtttggagagtcaggcagtgacccattggccatgtcataattccttcagcctgcctcctctttaatcccagagagtgctctttcttcatacttcctttaaaatactaaattgttcccattccatggggagctggctaggctttacaggctaggaaatgtaggttttctgagatggaaccatctacacaaggaggaggaaggcactaagactacagatgagacccatgacagggctgagcatttggaagccaaccctggttgcttttcaagaattgctttgtggctgggtgcagtggttcacacctgtaattgcagcactttgggaggctgaggcaggtggattgcttgaacccaggagttcgagaccagcctgggcaacatatgggacaccccaccgcccccggctctgcaaaaaaattaaaaattagccaggcgtggtgtcatgagcctgtggtctcaactactcaggaggctgaggctggaggatcgcttgaacctgggaggtcaaggctccagtgaaccataattgtgccactgcactgcagcctgggcgacaatttgttttctaaattgcttttgaaagtctactgcattacatattccaaaaagcagtggttttcaaatacttttatcaccgatatccttttatgaaatgaaatcagtagaactttctctgctctgaataagcaagggtgggaacctgtctacctcccacagatagcataatgtgcctgccatagaggagccaaaaaatggtgatgggaactgagaggagagcaaatgtcacaaaagactgagcaattgagaaaacaaaacaagaccacagatgactgttaacgcctccacagtggaccaagaaaggacagagagctggcagcatgggcatcactgtctggtcggcagcaggaaggcctcgctagggaattgagtacagtcatctaactagtttaaaagtacaggaaggatgattaaggctattggagaggtcatacaaataggggaggggcaggcaatggctgataagacatgaatttgtaaggcgatgagtattgcagtcagcaaaacaaacgagactgctctcccaacacataactcagcagggaggccaggcattggtttaaccatttaatataaagaagttaaaattacaaatgcgctaagtgcctaaagaagaataagtgcaggaatgagagcagcatggactgccacagttttagaataagcactgtcactgctagattggaaacaaaaatccataaatttggcccggtgtggtggcggacgcctgtagtcccagctacttggaggctgaggcgtgagaatcgcttgaacccgggaggcggaggttgcagtgagccgagatggcgccactgcactccagcctgggcgtcagagtgagaactctgtatcaaaaaataaaaanaaaaaaaagtccataaatctgcaatgtctcagttaagaaagaaagactgggccaatgcagatttcaaaccggagaaagtcatactgtcagtgaaggccgcctgtggccggaaggcgccaggggattagcaccctggactcagtgttgctgggaaacagggccccaaggctgggagcacagtgtttaaagggcatctacccaagaagggagcacagggcaaggaggagctgcagggggncttggctgccaaagtgaattctgaggagagagctattgctgcctacgatatgcaggctgcacagaacacaagtggaatcagcaggcaggagaggcagctaacgacgcagcccgtttcttatttctgttttctcacaagcgatgaaagtggaaaagagggtgagcaggtggcccacacatgtgcctccagtgctgcggcccctccggggaccatcngccaggccccggggagggagccagccacagtgtgtccggctcttctctgaagggaagagagccttgaatagactgaagcgaagacggttctgcaaggacaaggcagaccgaaggcattggttttttttttcagataaggagaattagactcccaagtagacaccagagtcactgtttggttggtgggtgatagtggggtcacagtggctgcctgtgctcccccagggtgagcgtgactgtgctaacctgggtggggcagcatgcacacccctctggcagccctttgttgctcgctgatgacaagtttggatgatcccgccaaacagcttgctaagatgtagtccccagtgttggaggtggggcctgatgggaggtgctacccttgtgagataaggttgtgtaaaagcctgtggcacctccccacactgacgctctcacccctgctctggccatgtgccgcgcctgctcccacttccccttctgccaggagtaaaagcccccgagacctcccagaagccaagcagatgctagtgccatgcttcctctgcagcctgcagaactgtgagccaattaaacctcttttctctat

SEQ ID NO: 300113 - DNA, 8729 bp, Homo sapiens
  misc_feature (3)..(3): n is a, c, g, or t
  misc_feature (5)..(5): n is a, c, g, or t
  misc_feature (3781)..(3781): n is a, c, g, or t
  misc_feature (4719)..(4719): n is a, c, g, or t
  misc_feature (4994)..(4994): n is a, c, g, or t
  misc_feature (7687)..(7687): n is a, c, g, or t
  misc_feature (7925)..(7925): n is a, c, g, or t
  misc_feature (8140)..(8140): n is a, c, g, or t
gcngncgcctactactactaaattcgcggccgcgtcgacgcatctcaagttcatttttcaacctacagtataacaatttgtaataaagcctccaggagctcatgacgtgaagcactgttctgtcctcaagtactcaaatatttctgatactgctgagtcagactgtcagaaaaagctagcactaactcgtgtttggagctctatccatattttactgatctctttaagtatttgttcctgccactgtgtactgtggagttgactcggtgttctgtcccagtgcggtgcctcctcttgacttccccactgctctctgtggtgagaaatttgccttgttcaataattactgtaccctcgcatgactgttacagctttctgtgcagagatgactgtccaagtgccacatgcctacgattgaaatgaaaactctattgttacctctgagttgtgttccacggaaaatgctatccagcagatcatttaggaaaaataattctatttttagcttttcatttctcagctgtccttttttcttgtttgatttttgacagcaatggagaatgggttatataaagactgcctgctaatatgaacagaaatgcatttgtaattcatgaaaataaatgtacatcttctatcttcacattcatgttaagattcagtgttgctttcctctggatcagcgtgtctgaatggacagtcaggttcaggttgtgctgaacacagaaatgctcacaggcctcactttgccgcccaggcactggcccagcacttggatttacataagatgagttagaaaggtacttctgtagggtcctttttacctctgctcggcagagaatcgatgctgtcatgttcctttattcacaatcttaggtctcaaatattctgtcaaaccctaacaaagaagccccgacatctcaggttggattccctggttctctctaaagagggcctgcccttgtgccccagaggtgctgctgggcacagccaagagttgggaagggccgccccacagtacgcagtcctcaccacccagcccagggtgctcacgctcaccactcctgtggctgaggaaggatagctggctcatcctcggaaaacagacccacatctctattcttgccctgaaatacgcgcttttcacttgcgtgctcagagctgccgtctgaaggtccacacagcattgacgggacacagaaatgtgactgttaccggataacactgattagtcagttttcatttataaaaaagcattgacagttttattactcttgtttctttttaaatggaaagttactattataaggttaatttgcagtcctcttctaaatagaaaaccatatccttggctactaacatctggagactgtgagctccttcccattccccttcctggtactgtggagtcagattggcatgaaaccactaacttcattctagaatcattgtagccataagttgtgtgctttttattaatcatgccaaacataatgtaactgggcagagaatggtcctaaccaaggtacctatgaaaagcgctagctatcatgtgtagtagatgcatcattttggctcttcttacatttgtaaaaatgtacagattaggtcatcttaattcatattagtgacacggaacagcacctccactatttgtatgttcaaataagctttcagactaatagcttttttggtgtctaaaatgtaagcaaaaaattcctgctgaaacattccagtcctttcatttagtataaaagaaatactgaacaagccagtgggatggaattgaaagaactaatcatgaggactctgtcctgacacaggtcctcaaagctagcagagatacgcagacattgtggcatctgggtagaagaatactgtattgtgtgtgcagtgcacagtgtgtggtgtgtgcacactcattccttctgctcttgggcacaggcagtgggtgtagaggtaaccagtagctttgagaagctacatgtagctcaccagtggttttctctaaggaatcacaaaggtaaactacccaaccacatgccacgtaatatttcagccattcagaggaaactgttttctctttatttgcttatatgttaatatggtttttaaattggtaacttttatatagtatggtaacagtatgttaatacacacatacatatgcacacatgctttgggtccttccataatacttttatatttgtaaatcaatgttttggagcaatcccaagtttaagggaaatatttttgtaaatgtaatggttttgaaaatctgagcaatccttttgcttatacatttttaaagcatttgtgctttaaaattgttatgctggtgtttgaaacatgatactcctgtggtgcagatgagaagctataacagtgaatatgtggtttctcttacgtcatccaccttgacatgatgggtcagaaacaaatggaaatccagagcaagtcctccagggttgcaccaggtttacctaaagcttgttgccttttcttgtgctgtttatccgtgtagagcactcaagaaagttctgaaactgctttgtatctgctttgtactgttggtgccttcttggtattgtaccccaaaattctgcatagattatttagtataatggtaagttaaaaaatgttaaaggaagattttattaagaatctgaatgtttattcattatattgttacaatttaacattaacatttatttgtggtatttgtgatttggttaatctgtataaaaattgtaagtagaaaggtttatatttcatcttaattcttttgatgttgtaaacgtactttttaaaagatggattatttgaatgtttatggcacctgacttgtaaaaaaaaaaaactacaaaaaaatccttagaatcattaaattgtgtccctgtattaccaaaataacacagcaccgtgcatgtatagtttaattgcagtttcatctgtgaaaacgtgaaattgtctagtccttcgttatgttccccagatgtcttccagatttgctctgcatgtggtaacttgtgttagggctgtgagctgttcctcgagttgaatggggatgtcagtgctcctagggttctccaggtggttcttcagaccttcacctgtgggggggggggtaggcggtgcccacgcccatctcctcatcctcctgaacttctgcaaccccactgctgggcagacatcctgggcaaccccttttttcagagcaagaagtcataaagataggatttcttggacatttggttcttatcaatattgggcattatgtaatgacttatttacaaaacaaagatactggaaaatgttttggatgtggtgttatggaaagagcacaggccttggacccatccagctgggttcagaactaccccctgcttataactgcggctggctgtgggccagtcattctgcgtctctgctttcttcctctgcttcagactgtcagctgtaaagtggaagcaatattacttgccttgtatatggtaaagattataaaaatacatttcaactgttcagcatagtacttcaaagcaagtactcagtaaatagcaagtctttttaaatgctgctttatttcactaaattttgttgtgaggtgtcactaaaatgcctgcaaacaaacgtaactgctaatctgagaggaaaccctcttactaatcagagaagaaaccctcctgtcagaaaccttcagggaagtgagctgatcacacctaaactgggagtttgcaatggggtatttgaagcactgtgggagtattccactggcccnctccctgagagacttaacagtcttccctgttgtccagattctgtataaggcaatcagaataatcatcttccttgttcagcagaggagcctggtcccattttccccactttgtgatgggcttctctcagcggtagctcagcagttccagatggcagtttggaccagcatctaggctggccagttcgctgtgtttacttagaaccaacacgttcagagctggcctggaccatctgaggggaacaggaaacacccctaggctgtggaagcaagtgcagacccccacccccggccctgaagccaagggggcagggtttgggagtggccaaagagaagcagtgcagggatgggttttcctagggacaggcttagcattcctgactctaggaagaaggagcagtgaggcggagaaacagtggaggggatggtggcattgggccccatggggccgagatggacacagggctcgttctcttgagtctggtgccaaggacagctgaagacgacatcattttcaggtggagaggagagagtggagggagatcatgccctgtgatgtgtcttttgcaggtgaaggtgggagacaaggtctctgctgacgatgaggcagagccaccgtgaaagttgtaataggaggactgcccgccgctggaagggcctgcagtgacgctaggacaccctctgcctgcatgtcacgttagctgggctgggcgaagtagaagaccaaggggaagaggtgcagtggggagaccaggtgggatgcaaccacaggaccagtggaggggctgtggcacgtgggcggagactgagtggctgggcatgtgttgtggctgagcatgtggtgtgggcagtggtcctagaccccgccatgtccggacaatgatatagagcgtctcagcatcgccagtctagactgtctatggagagcagaaagttgtctngggctgcctggggaactgtgaggccagctatatcaccgtcgctgatggtgacattacggtggtggcaggagcaaggagagagggaagaaggaccccgtccagctttagtcacaaaatacccaatggaagatgccagtgccaatcctgtgggtttccttgggacttcacactggctttcttatctgctccagatccattcagtagtcactgagttcctgccaaatactttgtagcgccagaagccaggagcggggtctgcagcagggcagtccccnttttcaggaaatgcctggagctgctggtccctgagagaaaggaaaacatctttcagccgtacgcaggccaagaaggccaatgtccagtagctttgtgattttttttatatttttttatttatttatttttgagatagagtcttgctctgtcgctcaggctggagtgcagtggcgtgatctccactcactgcaacttccgcctcctggggtcaagcagttctgcctcagcctcccgagtagctgggattacaggcacacgccaccacacccagctaatttttgtgtttttagtagagacggtttcaccatgtcggccaggctggtctcaaactcctgacctcagatgattcagcctcccaaagtgctgggattacaggtgtgagccactgcacccagcctgtgatgtttctgtggggttccacaaatgtgtgtgtgtgtaaaagctgatgattacagcaagaatgtgaacagtagcagttttccatttgaaggcaagttttgtctttatctgggtatcagaaggaccctctgggccattgtcgcttcctgtactcagagccaccctagtactacgggcacacacagaaaacagcagcctgcgtactttcaaaggaaaggcatctttaatcaccaatgcctggaaaaattattttgtttccctcttccttccgtcttgtttcctaacttcttaccaaagtttagagtctgagtttttcgtataataatgtcccacatccacacatcgggcctacagatgctctcccttgaatcgactggaaacatgacaccggttccatgctctggaactgtcacctgtgatgtgctgggctgtgtcccaagcacaggaatcccagcagtttcagctcgatgcagaaccaccatgctccagacacaggcttgggaaagacacgtcaaaattaaaatactaggtaagagaagcacctgattgggtagaagttggagaggaatcctggaattttgtggccagaaggagccactgccccttttgtttagtaagactagacagtaacagaagccagttgtcagctatgaaagtggtgggtgaagcaggggaggctcctctatggtgggaccctggacaagggaagccgaatgtgtgaagaaggggtgcgggggtgtgcggtgccctaggacactagggcaaaggtttcaaacctggaacaaggcactggaggaagatctgctgccagtcagcagtgcgggccctcgagttagcagtccgtgcgcagaggggccagttctgagaccagtttggagagtcaggcagtgacccattggccatgtcataattccttcagcctgcctcctctttaatcccagagagtgctctttcttcatacttcctttaaaatactaaattgttcccattccatggggagctggctaggctttacaggctaggaaatgtaggttttctgagatggaaccatctacacaaggaggaggaaggcactaagactacagatgagacccatgacagggctgagcatttggaagccaaccctggttgcttttcaagaattgctttgtggctgggtgcagtggttcacacctgtaattgcagcactttgggaggctgaggcaggtggattgcttgaacccaggagttcgagaccagcctgggcaacatatgggacaccccaccgcccccggctctgcaaaaaaattaaaaattagccaggcgtggtgtcatgagcctgtggtctcaactactcaggaggctgaggctggaggatcgcttgaacctgggaggtcaaggctccagtgaaccataattgtgccactgcactgcagcctgggcgacaatttgttttctaaattgcttttgaaagtctactgcattacatattccaaaaagcagtggttttcaaatacttttatcaccgatatccttttatgaaatgaaatcagtagaactttctctgctctgaataagcaagggtgggaacctgtctacctcccacagatagcataatgtgcctgccatagaggagccaaaaaatggtgatgggaactgagaggagagcaaatgtcacaaaagactgagcaattgagaaaacaaaacaagaccacagatgactgttaacgcctccacagtggaccaagaaaggacagagagctggcagcatgggcatcactgtctggtcggcagcaggaaggcctcgctagggaattgagtacagtcatctaactagtttaaaagtacaggaaggatgattaaggctattggagaggtcatacaaataggggaggggcaggcaatggctgataagacatgaatttgtaaggcgatgagtattgcagtcagcaaaacaaacgagactgctctcccaacacataactcagcagggaggccaggcattggtttaaccatttaatataaagaagttaaaattacaaatgcgctaagtgcctaaagaagaataagtgcaggaatgagagcagcatggactgccacagttttagaataagcactgtcactgctagattggaaacaaaaatccataaatttggcccggtgtggtggcggacgcctgtagtcccagctacttggaggctgaggcgtgagaatcgcttgaacccgggaggcggaggttgcagtgagccgagatggcgccactgcactccagcctgggcgtcagagtgagaactctgtatcaaaaaataaaaanaaaaaaaagtccataaatctgcaatgtctcagttaagaaagaaagactgggccaatgcagatttcaaaccggagaaagtcatactgtcagtgaaggccgcctgtggccggaaggcgccaggggattagcaccctggactcagtgttgctgggaaacagggccccaaggctgggagcacagtgtttaaagggcatctacccaagaagggagcacagggcaaggaggagctgcagggggncttggctgccaaagtgaattctgaggagagagctattgctgcctacgatatgcaggctgcacagaacacaagtggaatcagcaggcaggagaggcagctaacgacgcagcccgtttcttatttctgttttctcacaagcgatgaaagtggaaaagagggtgagcaggtggcccacacatgtgcctccagtgctgcggcccctccggggaccatcngccaggccccggggagggagccagccacagtgtgtccggctcttctctgaagggaagagagccttgaatagactgaagcgaagacggttctgcaaggacaaggcagaccgaaggcattggttttttttttcagataaggagaattagactcccaagtagacaccagagtcactgtttggttggtgggtgatagtggggtcacagtggctgcctgtgctcccccagggtgagcgtgactgtgctaacctgggtggggcagcatgcacacccctctggcagccctttgttgctcgctgatgacaagtttggatgatcccgccaaacagcttgctaagatgtagtccccagtgttggaggtggggcctgatgggaggtgctacccttgtgagataaggttgtgtaaaagcctgtggcacctccccacactgacgctctcacccctgctctggccatgtgccgcgcctgctcccacttccccttctgccaggagtaaaagcccccgagacctcccagaagccaagcagatgctagtgccatgcttcctctgcagcctgcagaactgtgagccaattaaacctcttttctctat

SEQ ID NO: 300114 - DNA, 8490 bp, Homo sapiens
  misc_feature (3542)..(3542): n is a, c, g, or t
  misc_feature (4480)..(4480): n is a, c, g, or t
  misc_feature (4755)..(4755): n is a, c, g, or t
  misc_feature (7448)..(7448): n is a, c, g, or t
  misc_feature (7686)..(7686): n is a, c, g, or t
  misc_feature (7901)..(7901): n is a, c, g, or t
gaagctgttctagaggatcctcttcgaggtgtctgtcccagtgcggtgcctcctcttgacttccccactgctctctgtggtgagaaatttgccttgttcaataattactgtaccctcgcatgactgttacagctttctgtgcagagatgactgtccaagtgccacatgcctacgattgaaatgaaaactctattgttacctctgagttgtgttccacggaaaatgctatccagcagatcatttaggaaaaataattctatttttagcttttcatttctcagctgtccttttttcttgtttgatttttgacagcaatggagaatgggttatataaagactgcctgctaatatgaacagaaatgcatttgtaattcatgaaaataaatgtacatcttctatcttcacattcatgttaagattcagtgttgctttcctctggatcagcgtgtctgaatggacagtcaggttcaggttgtgctgaacacagaaatgctcacaggcctcactttgccgcccaggcactggcccagcacttggatttacataagatgagttagaaaggtacttctgtagggtcctttttacctctgctcggcagagaatcgatgctgtcatgttcctttattcacaatcttaggtctcaaatattctgtcaaaccctaacaaagaagccccgacatctcaggttggattccctggttctctctaaagagggcctgcccttgtgccccagaggtgctgctgggcacagccaagagttgggaagggccgccccacagtacgcagtcctcaccacccagcccagggtgctcacgctcaccactcctgtggctgaggaaggatagctggctcatcctcggaaaacagacccacatctctattcttgccctgaaatacgcgcttttcacttgcgtgctcagagctgccgtctgaaggtccacacagcattgacgggacacagaaatgtgactgttaccggataacactgattagtcagttttcatttataaaaaagcattgacagttttattactcttgtttctttttaaatggaaagttactattataaggttaatttgcagtcctcttctaaatagaaaaccatatccttggctactaacatctggagactgtgagctccttcccattccccttcctggtactgtggagtcagattggcatgaaaccactaacttcattctagaatcattgtagccataagttgtgtgctttttattaatcatgccaaacataatgtaactgggcagagaatggtcctaaccaaggtacctatgaaaagcgctagctatcatgtgtagtagatgcatcattttggctcttcttacatttgtaaaaatgtacagattaggtcatcttaattcatattagtgacacggaacagcacctccactatttgtatgttcaaataagctttcagactaatagcttttttggtgtctaaaatgtaagcaaaaaattcctgctgaaacattccagtcctttcatttagtataaaagaaatactgaacaagccagtgggatggaattgaaagaactaatcatgaggactctgtcctgacacaggtcctcaaagctagcagagatacgcagacattgtggcatctgggtagaagaatactgtattgtgtgtgcagtgcacagtgtgtggtgtgtgcacactcattccttctgctcttgggcacaggcagtgggtgtagaggtaaccagtagctttgagaagctacatgtagctcaccagtggttttctctaaggaatcacaaaggtaaactacccaaccacatgccacgtaatatttcagccattcagaggaaactgttttctctttatttgcttatatgttaatatggtttttaaattggtaacttttatatagtatggtaacagtatgttaatacacacatacatatgcacacatgctttgggtccttccataatacttttatatttgtaaatcaatgttttggagcaatcccaagtttaagggaaatatttttgtaaatgtaatggttttgaaaatctgagcaatccttttgcttatacatttttaaagcatttgtgctttaaaattgttatgctggtgtttgaaacatgatactcctgtggtgcagatgagaagctataacagtgaatatgtggtttctcttacgtcatccaccttgacatgatgggtcagaaacaaatggaaatccagagcaagtcctccagggttgcaccaggtttacctaaagcttgttgccttttcttgtgctgtttatccgtgtagagcactcaagaaagttctgaaactgctttgtatctgctttgtactgttggtgccttcttggtattgtaccccaaaattctgcatagattatttagtataatggtaagttaaaaaatgttaaaggaagattttattaagaatctgaatgtttattcattatattgttacaatttaacattaacatttatttgtggtatttgtgatttggttaatctgtataaaaattgtaagtagaaaggtttatatttcatcttaattcttttgatgttgtaaacgtactttttaaaagatggattatttgaatgtttatggcacctgacttgtaaaaaaaaaaaactacaaaaaaatccttagaatcattaaattgtgtccctgtattaccaaaataacacagcaccgtgcatgtatagtttaattgcagtttcatctgtgaaaacgtgaaattgtctagtccttcgttatgttccccagatgtcttccagatttgctctgcatgtggtaacttgtgttagggctgtgagctgttcctcgagttgaatggggatgtcagtgctcctagggttctccaggtggttcttcagaccttcacctgtgggggggggggtaggcggtgcccacgcccatctcctcatcctcctgaacttctgcaaccccactgctgggcagacatcctgggcaaccccttttttcagagcaagaagtcataaagataggatttcttggacatttggttcttatcaatattgggcattatgtaatgacttatttacaaaacaaagatactggaaaatgttttggatgtggtgttatggaaagagcacaggccttggacccatccagctgggttcagaactaccccctgcttataactgcggctggctgtgggccagtcattctgcgtctctgctttcttcctctgcttcagactgtcagctgtaaagtggaagcaatattacttgccttgtatatggtaaagattataaaaatacatttcaactgttcagcatagtacttcaaagcaagtactcagtaaatagcaagtctttttaaatgctgctttatttcactaaattttgttgtgaggtgtcactaaaatgcctgcaaacaaacgtaactgctaatctgagaggaaaccctcttactaatcagagaagaaaccctcctgtcagaaaccttcagggaagtgagctgatcacacctaaactgggagtttgcaatggggtatttgaagcactgtgggagtattccactggcccnctccctgagagacttaacagtcttccctgttgtccagattctgtataaggcaatcagaataatcatcttccttgttcagcagaggagcctggtcccattttccccactttgtgatgggcttctctcagcggtagctcagcagttccagatggcagtttggaccagcatctaggctggccagttcgctgtgtttacttagaaccaacacgttcagagctggcctggaccatctgaggggaacaggaaacacccctaggctgtggaagcaagtgcagacccccacccccggccctgaagccaagggggcagggtttgggagtggccaaagagaagcagtgcagggatgggttttcctagggacaggcttagcattcctgactctaggaagaaggagcagtgaggcggagaaacagtggaggggatggtggcattgggccccatggggccgagatggacacagggctcgttctcttgagtctggtgccaaggacagctgaagacgacatcattttcaggtggagaggagagagtggagggagatcatgccctgtgatgtgtcttttgcaggtgaaggtgggagacaaggtctctgctgacgatgaggcagagccaccgtgaaagttgtaataggaggactgcccgccgctggaagggcctgcagtgacgctaggacaccctctgcctgcatgtcacgttagctgggctgggcgaagtagaagaccaaggggaagaggtgcagtggggagaccaggtgggatgcaaccacaggaccagtggaggggctgtggcacgtgggcggagactgagtggctgggcatgtgttgtggctgagcatgtggtgtgggcagtggtcctagaccccgccatgtccggacaatgatatagagcgtctcagcatcgccagtctagactgtctatggagagcagaaagttgtctngggctgcctggggaactgtgaggccagctatatcaccgtcgctgatggtgacattacggtggtggcaggagcaaggagagagggaagaaggaccccgtccagctttagtcacaaaatacccaatggaagatgccagtgccaatcctgtgggtttccttgggacttcacactggctttcttatctgctccagatccattcagtagtcactgagttcctgccaaatactttgtagcgccagaagccaggagcggggtctgcagcagggcagtccccnttttcaggaaatgcctggagctgctggtccctgagagaaaggaaaacatctttcagccgtacgcaggccaagaaggccaatgtccagtagctttgtgattttttttatatttttttatttatttatttttgagatagagtcttgctctgtcgctcaggctggagtgcagtggcgtgatctccactcactgcaacttccgcctcctggggtcaagcagttctgcctcagcctcccgagtagctgggattacaggcacacgccaccacacccagctaatttttgtgtttttagtagagacggtttcaccatgtcggccaggctggtctcaaactcctgacctcagatgattcagcctcccaaagtgctgggattacaggtgtgagccactgcacccagcctgtgatgtttctgtggggttccacaaatgtgtgtgtgtgtaaaagctgatgattacagcaagaatgtgaacagtagcagttttccatttgaaggcaagttttgtctttatctgggtatcagaaggaccctctgggccattgtcgcttcctgtactcagagccaccctagtactacgggcacacacagaaaacagcagcctgcgtactttcaaaggaaaggcatctttaatcaccaatgcctggaaaaattattttgtttccctcttccttccgtcttgtttcctaacttcttaccaaagtttagagtctgagtttttcgtataataatgtcccacatccacacatcgggcctacagatgctctcccttgaatcgactggaaacatgacaccggttccatgctctggaactgtcacctgtgatgtgctgggctgtgtcccaagcacaggaatcccagcagtttcagctcgatgcagaaccaccatgctccagacacaggcttgggaaagacacgtcaaaattaaaatactaggtaagagaagcacctgattgggtagaagttggagaggaatcctggaattttgtggccagaaggagccactgccccttttgtttagtaagactagacagtaacagaagccagttgtcagctatgaaagtggtgggtgaagcaggggaggctcctctatggtgggaccctggacaagggaagccgaatgtgtgaagaaggggtgcgggggtgtgcggtgccctaggacactagggcaaaggtttcaaacctggaacaaggcactggaggaagatctgctgccagtcagcagtgcgggccctcgagttagcagtccgtgcgcagaggggccagttctgagaccagtttggagagtcaggcagtgacccattggccatgtcataattccttcagcctgcctcctctttaatcccagagagtgctctttcttcatacttcctttaaaatactaaattgttcccattccatggggagctggctaggctttacaggctaggaaatgtaggttttctgagatggaaccatctacacaaggaggaggaaggcactaagactacagatgagacccatgacagggctgagcatttggaagccaaccctggttgcttttcaagaattgctttgtggctgggtgcagtggttcacacctgtaattgcagcactttgggaggctgaggcaggtggattgcttgaacccaggagttcgagaccagcctgggcaacatatgggacaccccaccgcccccggctctgcaaaaaaattaaaaattagccaggcgtggtgtcatgagcctgtggtctcaactactcaggaggctgaggctggaggatcgcttgaacctgggaggtcaaggctccagtgaaccataattgtgccactgcactgcagcctgggcgacaatttgttttctaaattgcttttgaaagtctactgcattacatattccaaaaagcagtggttttcaaatacttttatcaccgatatccttttatgaaatgaaatcagtagaactttctctgctctgaataagcaagggtgggaacctgtctacctcccacagatagcataatgtgcctgccatagaggagccaaaaaatggtgatgggaactgagaggagagcaaatgtcacaaaagactgagcaattgagaaaacaaaacaagaccacagatgactgttaacgcctccacagtggaccaagaaaggacagagagctggcagcatgggcatcactgtctggtcggcagcaggaaggcctcgctagggaattgagtacagtcatctaactagtttaaaagtacaggaaggatgattaaggctattggagaggtcatacaaataggggaggggcaggcaatggctgataagacatgaatttgtaaggcgatgagtattgcagtcagcaaaacaaacgagactgctctcccaacacataactcagcagggaggccaggcattggtttaaccatttaatataaagaagttaaaattacaaatgcgctaagtgcctaaagaagaataagtgcaggaatgagagcagcatggactgccacagttttagaataagcactgtcactgctagattggaaacaaaaatccataaatttggcccggtgtggtggcggacgcctgtagtcccagctacttggaggctgaggcgtgagaatcgcttgaacccgggaggcggaggttgcagtgagccgagatggcgccactgcactccagcctgggcgtcagagtgagaactctgtatcaaaaaataaaaanaaaaaaaagtccataaatctgcaatgtctcagttaagaaagaaagactgggccaatgcagatttcaaaccggagaaagtcatactgtcagtgaaggccgcctgtggccggaaggcgccaggggattagcaccctggactcagtgttgctgggaaacagggccccaaggctgggagcacagtgtttaaagggcatctacccaagaagggagcacagggcaaggaggagctgcagggggncttggctgccaaagtgaattctgaggagagagctattgctgcctacgatatgcaggctgcacagaacacaagtggaatcagcaggcaggagaggcagctaacgacgcagcccgtttcttatttctgttttctcacaagcgatgaaagtggaaaagagggtgagcaggtggcccacacatgtgcctccagtgctgcggcccctccggggaccatcngccaggccccggggagggagccagccacagtgtgtccggctcttctctgaagggaagagagccttgaatagactgaagcgaagacggttctgcaaggacaaggcagaccgaaggcattggttttttttttcagataaggagaattagactcccaagtagacaccagagtcactgtttggttggtgggtgatagtggggtcacagtggctgcctgtgctcccccagggtgagcgtgactgtgctaacctgggtggggcagcatgcacacccctctggcagccctttgttgctcgctgatgacaagtttggatgatcccgccaaacagcttgctaagatgtagtccccagtgttggaggtggggcctgatgggaggtgctacccttgtgagataaggttgtgtaaaagcctgtggcacctccccacactgacgctctcacccctgctctggccatgtgccgcgcctgctcccacttccccttctgccaggagtaaaagcccccgagacctcccagaagccaagcagatgctagtgccatgcttcctctgcagcctgcagaactgtgagccaattaaacctcttttctctat

SEQ ID NO: 300115 - DNA, 5079 bp, Homo sapiens
  misc_feature (4947)..(4947): n is a, c, g, or t
  misc_feature (4994)..(4994): n is a, c, g, or t
  misc_feature (5010)..(5010): n is a, c, g, or t
  misc_feature (5013)..(5013): n is a, c, g, or t
  misc_feature (5018)..(5018): n is a, c, g, or t
  misc_feature (5061)..(5061): n is a, c, g, or t
acataatttctggagccctgtaccaacgtgtggccacatattctgtcaggaaccctgtgtgatcatggtctggatctgcaacacgggccaggccaaagtcacagatcttgagatcacaggtggtgttgagcagcaggcaggcaggcaatcggtccgagtggctgtcggctcttcagctctcccgctcggcgtcttccttcctcctcccggtcagcgtcggcggctgcaccggcggcggcgcagtccctgcgggaggggcgacaagagctgagcggcggccgccgagcgtcgagctcagcgcggcggaggcggcggcggcccggcagccaacatggcggcggcggcggcggcgggcgcgggcccggagatggtccgcgggcaggtgttcgacgtggggccgcgctacaccaacctctcgtacatcggcgagggcgcctacggcatggtgtgctctgcttatgataatgtcaacaaagttcgagtagctatcaagaaaatcagcccctttgagcaccagacctactgccagagaaccctgagggagataaaaatcttactgcgcttcagacatgagaacatcattggaatcaatgacattattcgagcaccaaccatcgagcaaatgaaagatgtatatatagtacaggacctcatggaaacagatctttacaagctcttgaagacacaacacctcagcaatgaccatatctgctattttctctaccagatcctcagagggttaaaatatatccattcagctaacgttctgcaccgtgacctcaagccttccaacctgctgctcaacaccacctgtgatctcaagatctgtgactttggcctggcccgtgttgcagatccagaccatgatcacacagggttcctgacagaatatgtggccacacgttggtacagggctccagaaattatgttgaattccaagggctacaccaagtccattgatatttggtctgtaggctgcattctggcagaaatgctttctaacaggcccatctttccagggaagcattatcttgaccagctgaaccacattttgggtattcttggatccccatcacaagaagacctgaattgtataataaatttaaaagctaggaactatttgctttctcttccacacaaaaataaggtgccatggaacaggctgttcccaaatgctgactccaaagctctggacttattggacaaaatgttgacattcaacccacacaagaggattgaagtagaacaggctctggcccacccatatctggagcagtattacgacccgagtgacgagcccatcgccgaagcaccattcaagttcgacatggaattggatgacttgcctaaggaaaagctcaaagaactaatttttgaagagactgctagattccagccaggatacagatcttaaatttgtcaggacaagggctcagaggactggacgtgctcagacatcggtgttcttcttcccagttcttgacccctggtcctgtctccagcccgtcttggcttatccactttgactcctttgagccgtttggaggggcggtttctggtagttgtggcttttatgctttcaaagaatttcttcagtccagagaattcctcctggcagccctgtgtgtgtcacccattggtgacctgcggcagtatgtacttcagtgcacctactgcttactgttgctttagtcactaattgctttctggtttgaaagatgcagtggttcctccctctcctgaatccttttctacatgatgccctgctgaccatgcagccgcaccagagagagattcttccccaattggctctagtcactggcatctcactttatgatagggaaggctactacctagggcactttaagtcagtgacagccccttatttgcacttcaccttttgaccataactgtttccccagagcaggagcttgtggaaataccttggctgatgttgcagcctgcagcaagtgcttccgtctccggaatccttggggagcacttgtccacgtcttttctcatatcatggtagtcactaacatatataaggtatgtgctattggcccagcttttagaaaatgcagtcatttttctaaataaaaaggaagtactgcacccagcagtgtcactctgtagttactgtggtcacttgtaccatatagaggtgtaacacttgtcaagaagcgttatgtgcagtacttaatgtttgtaagacttacaaaaaaagatttaaagtggcagcttcactcgacatttggtgagagaagtacaaaggttgcagtgctgagctgtgggcggtttctggggatgtcccagggtggaactccacatgctggtgcatatacgcccttgagctacttcaaatgtgggtgtttcagtaaccacgttccatgcctgaggatttagcagagaggaacactgcgtctttaaatgagaaagtatacaattctttttccttctacagcatgtcagcatctcaagttcatttttcaacctacagtataacaatttgtaataaagcctccaggagctcatgacgtgaagcactgttctgtcctcaagtactcaaatatttctgatactgctgagtcagactgtcagaaaaagctagcactaactcgtgtttggagctctatccatattttactgatctctttaagtatttgttcctgccactgtgtactgtggagttgactcggtgttctgtcccagtgcggtgcctcctcttgacttccccactgctctctgtggtgagaaatttgccttgttcaataattactgtaccctcgcatgactgttacagctttctgtgcagagatgactgtccaagtgccacatgcctacgattgaaatgaaaactctattgttacctctgagttgtgttccacggaaaatgctatccagcagatcatttaggaaaaataattctatttttagcttttcatttctcagctgtccttttttcttgtttgatttttgacagcaatggagaatgggttatataaagactgcctgctaatatgaacagaaatgcatttgtaattcatgaaaataaatgtacatcttctatcttcacattcatgttaagattcagtgttgctttcctctggatcagcgtgtctgaatggacagtcaggttcaggttgtgctgaacacagaaatgctcacaggcctcactttgccgcccaggcactggcccagcacttggatttacataagatgagttagaaaggtacttctgtagggtcctttttacctctgctcggcagagaatcgatgctgtcatgttcctttattcacaatcttaggtctcaaatattctgtcaaaccctaacaaagaagccccgacatctcaggttggattccctggttctctctaaagagggcctgcccttgtgccccagaggtgctgctgggcacagccaagagttgggaagggccgccccacagtacgcagtcctcaccacccagcccagggtgctcacgctcaccactcctgtggctgaggaaggatagctggctcatcctcggaaaacagacccacatctctattcttgccctgaaatacgcgcttttcacttgcgtgctcagagctgccgtctgaaggtccacacagcattgacgggacacagaaatgtgactgttaccggataacactgattagtcagttttcatttataaaaaagcattgacagttttattactcttgtttctttttaaatggaaagttactattataaggttaatttgcagtcctcttctaaatagaaaaccatatccttggctactaacatctggagactgtgagctccttcccattccccttcctggtactgtggagtcagattggcatgaaaccactaacttcattctagaatcattgtagccataagttgtgtgctttttattaatcatgccaaacataatgtaactgggcagagaatggtcctaaccaaggtacctatgaaaagcgctagctatcatgtgtagtagatgcatcattttggctcttcttacatttgtaaaaatgtacagattaggtcatcttaattcatattagtgacacggaacagcacctccactatttgtatgttcaaataagctttcagactaatagcttttttggtgtctaaaatgtaagcaaaaaattcctgctgaaacattccagtcctttcatttagtataaaagaaatactgaacaagccagtgggatggaattgaaagaactaatcatgaggactctgtcctgacacaggtcctcaaagctagcagagatacgcagacattgtggcatctgggtagaagaatactgtattgtgtgtgcagtgcacagtgtgtggtgtgtgcacactcattccttctgctcttgggcacaggcagtgggtgtagaggtaaccagtagctttgagaagctacatgtagctcaccagtggttttctctaaggaatcacaaaggtaaactacccaaccacatgccacgtaatatttcagccattcagaggaaactgttttctctttatttgcttatatgttaatatggtttttaaattggtaacttttatatagtatggtaacagtatgttaatacacacatacatatgcacacatgctttgggtccttccataatacttttatatttgtaaatcaatgttttggagcaatcccaagtttaagggaaatatttttgtaaatgtaatggttttgaaaatctgagcaatccttttgcttatacatttttaaagcatttgtgctttaaaattgttatgctggtgtttgaaacatgatactcctgtggtgcagatgagaagctataacagtgaatatgtggtttctcttacgtcatccaccttgacatgatgggtcagaaacaaatggaaatccagagcaagtcctccagggttgcaccaggtttacctaaagcttgttgccttttcctgggccggtanatccggggagggcaccccaaaggaaagtcctggaacctgcctttggnaacctgcctttggacntgntgggngcctccctggggaatggaccccccaaaaattcctgccaaaggntaatttagggaaaaaggg

SEQ ID NO: 300116 - DNA, 3686 bp, Homo sapiens
acataatttctggagccctgtaccaacgtgtggccacatattctgtcaggaaccctgtgtgatcatggtctggatctgcaacacgggccaggccaaagtcacagatcttgagatcacaggtggtgttgagcagcaggcaggcaggcaatcggtccgagtggctgtcggctcttcagctctcccgctcggcgtcttccttcctcctcccggtcagcgtcggcggctgcaccggcggcggcgcagtccctgcgggaggggcgacaagagctgagcggcggccgccgagcgtcgagctcagcgcggcggaggcggcggcggcccggcagccaacatggcggcggcggcggcggcgggcgcgggcccggagatggtccgcgggcaggtgttcgacgtggggccgcgctacaccaacctctcgtacatcggcgagggcgcctacggcatggtgtgctctgcttatgataatgtcaacaaagttcgagtagctatcaagaaaatcagcccctttgagcaccagacctactgccagagaaccctgagggagataaaaatcttactgcgcttcagacatgagaacatcattggaatcaatgacattattcgagcaccaaccatcgagcaaatgaaagatgtatatatagtacaggacctcatggaaacagatctttacaagctcttgaagacacaacacctcagcaatgaccatatctgctattttctctaccagatcctcagagggttaaaatatatccattcagctaacgttctgcaccgtgacctcaagccttccaacctgctgctcaacaccacctgtgatctcaagatctgtgactttggcctggcccgtgttgcagatccagaccatgatcacacagggttcctgacagaatatgtggccacacgttggtacagggctccagaaattatgttgaattccaagggctacaccaagtccattgatatttggtctgtaggctgcattctggcagaaatgctttctaacaggcccatctttccagggaagcattatcttgaccagctgaaccacattttgggtattcttggatccccatcacaagaagacctgaattgtataataaatttaaaagctaggaactatttgctttctcttccacacaaaaataaggtgccatggaacaggctgttcccaaatgctgactccaaagctctggacttattggacaaaatgttgacattcaacccacacaagaggattgaagtagaacaggctctggcccacccatatctggagcagtattacgacccgagtgacgagcccatcgccgaagcaccattcaagttcgacatggaattggatgacttgcctaaggaaaagctcaaagaactaatttttgaagagactgctagattccagccaggatacagatcttaaatttgtcaggacaagggctcagaggactggacgtgctcagacatcggtgttcttcttcccagttcttgacccctggtcctgtctccagcccgtcttggcttatccactttgactcctttgagccgtttggaggggcggtttctggtagttgtggcttttatgctttcaaagaatttcttcagtccagagaattcctcctggcagccctgtgtgtgtcacccattggtgacctgcggcagtatgtacttcagtgcacctactgcttactgttgctttagtcactaattgctttctggtttgaaagatgcagtggttcctccctctcctgaatccttttctacatgatgccctgctgaccatgcagccgcaccagagagagattcttccccaattggctctagtcactggcatctcactttatgatagggaaggctactacctagggcactttaagtcagtgacagccccttatttgcacttcaccttttgaccataactgtttccccagagcaggagcttgtggaaataccttggctgatgttgcagcctgcagcaagtgcttccgtctccggaatccttggggagcacttgtccacgtcttttctcatatcatggtagtcactaacatatataaggtatgtgctattggcccagcttttagaaaatgcagtcatttttctaaataaaaaggaagtactgcacccagcagtgtcactctgtagttactgtggtcacttgtaccatatagaggtgtaacacttgtcaagaagcgttatgtgcagtacttaatgtttgtaagacttacaaaaaaagatttaaagtggcagcttcactcgacatttggtgagagaagtacaaaggttgcagtgctgagctgtgggcggtttctggggatgtcccagggtggaactccacatgctggtgcatatacgcccttgagctacttcaaatgtgggtgtttcagtaaccacgttccatgcctgaggatttagcagagaggaacactgcgtctttaaatgagaaagtatacaattctttttccttctacagcatgtcagcatctcaagttcatttttcaacctacagtataacaatttgtaataaagcctccaggagctcatgacgtgaagcactgttctgtcctcaagtactcaaatatttctgatactgctgagtcagactgtcagaaaaagctagcactaactcgtgtttggagctctatccatattttactgatctctttaagtatttgttcctgccactgtgtactgtggagttgactcggtgttctgtcccagtgcggtgcctcctcttgacttccccactgctctctgtggtgagaaatttgccttgttcaataattactgtaccctcgcatgactgttacagctttctgtgcagagatgactgtccaagtgccacatgcctacgattgaaatgaaaactctattgttacctctgagttgtgttccacggaaaatgctatccagcagatcatttaggaaaaataattctatttttagcttttcatttctcagctgtccttttttcttgtttgatttttgacagcaatggagaatgggttatataaagactgcctgctaatatgaacagaaatgcatttgtaattcatgaaaataaatgtacatcttctatcttcacattcatgttaagattcagtgttgctttcctctggatcagcgtgtctgaatggacagtcaggttcaggttgtgctgaacacagaaatgctcacaggcctcactttgccgcccaggcactggcccagcacttggatttacataagatgagttagaaaggtacttctgtagggtcctttttacctctgctcggcagagaatcgatgctgtcatgttcctttattcacaatcttaggtctcaaatattctgtcaaaccctaacaaagaagccccgacatctcaggttggattccctggttctctctaaagagggcctgcccttgtgccccagaggtgctgctgggcacagccaagagttgggaagggccgccccacagtacgcagtcctcaccacccagcccagggtgctcacgctcaccactcctgtggctgaggaaggatagctggctcatcctcggaaaacagacccacatctctattcttgccctgaaatacgcgcttttcacttgcgtgctcagagctgccgtctgaaggtccacacagcattgacgggacacaccaacttcccgtggccgaagccatgctgacttgccggcataagttccctgatgaa

SEQ ID NO: 300117 - DNA, 2496 bp, Homo sapiens
acataatttctggagccctgtaccaacgtgtggccacatattctgtcaggaaccctgtgtgatcatggtctggatctgcaacacgggccaggccaaagtcacagatcttgagatcacaggtggtgttgagcagcaggcaggcaggcaatcggtccgagtggctgtcggctcttcagctctcccgctcggcgtcttccttcctcctcccggtcagcgtcggcggctgcaccggcggcggcgcagtccctgcgggaggggcgacaagagctgagcggcggccgccgagcgtcgagctcagcgcggcggaggcggcggcggcccggcagccaacatggcggcggcggcggcggcgggcgcgggcccggagatggtccgcgggcaggtgttcgacgtggggccgcgctacaccaacctctcgtacatcggcgagggcgcctacggcatggtgtgctctgcttatgataatgtcaacaaagttcgagtagctatcaagaaaatcagcccctttgagcaccagacctactgccagagaaccctgagggagataaaaatcttactgcgcttcagacatgagaacatcattggaatcaatgacattattcgagcaccaaccatcgagcaaatgaaagatgtatatatagtacaggacctcatggaaacagatctttacaagctcttgaagacacaacacctcagcaatgaccatatctgctattttctctaccagatcctcagagggttaaaatatatccattcagctaacgttctgcaccgtgacctcaagccttccaacctgctgctcaacaccacctgtgatctcaagatctgtgactttggcctggcccgtgttgcagatccagaccatgatcacacagggttcctgacagaatatgtggccacacgttggtacagggctccagaaattatgttgaattccaagggctacaccaagtccattgatatttggtctgtaggctgcattctggcagaaatgctttctaacaggcccatctttccagggaagcattatcttgaccagctgaaccacattttgggtattcttggatccccatcacaagaagacctgaattgtataataaatttaaaagctaggaactatttgctttctcttccacacaaaaataaggtgccatggaacaggctgttcccaaatgctgactccaaagctctggacttattggacaaaatgttgacattcaacccacacaagaggattgaagtagaacaggctctggcccacccatatctggagcagtattacgacccgagtgacgagcccatcgccgaagcaccattcaagttcgacatggaattggatgacttgcctaaggaaaagctcaaagaactaatttttgaagagactgctagattccagccaggatacagatcttaaatttgtcaggacaagggctcagaggactggacgtgctcagacatcggtgttcttcttcccagttcttgacccctggtcctgtctccagcccgtcttggcttatccactttgactcctttgagccgtttggaggggcggtttctggtagttgtggcttttatgctttcaaagaatttcttcagtccagagaattcctcctggcagccctgtgtgtgtcacccattggtgacctgcggcagtatgtacttcagtgcacctactgcttactgttgctttagtcactaattgctttctggtttgaaagatgcagtggttcctccctctcctgaatccttttctacatgatgccctgctgaccatgcagccgcaccagagagagattcttccccaattggctctagtcactggcatctcactttatgatagggaaggctactacctagggcactttaagtcagtgacagccccttatttgcacttcaccttttgaccataactgtttccccagagcaggagcttgtggaaataccttggctgatgttgcagcctgcagcaagtgcttccgtctccggaatccttggggagcacttgtccacgtcttttctcatatcatggtagtcactaacatatataaggtatgtgctattggcccagcttttagaaaatgcagtcatttttctaaataaaaaggaagtactgcacccagcagtgtcactctgtagttactgtggtcacttgtaccatatagaggtgtaacacttgtcaagaagcgttatgtgcagtacttaatgtttgtaagacttacaaaaaaagatttaaagtggcagcttcactcgacatttggtgagagaagtacaaaggttgcagtgctgagctgtgggcggtttctggggatgtcccagggtggaactccacatgctggtgcatatacgcccttgagctacttcaaatgtggtttatacctcgcagatacaagaatctttatgaatatacaattctttttccttctacagcttagctccgtcttttcaaccacgaacatttaaaacccgacctactagcactgttctgtcctcaagtac

SEQ ID NO: 300118 - DNA, 6542 bp, Homo sapiens
  misc_feature (3)..(3): n is a, c, g, or t
  misc_feature (5)..(5): n is a, c, g, or t
  misc_feature (1594)..(1594): n is a, c, g, or t
  misc_feature (2532)..(2532): n is a, c, g, or t
  misc_feature (2807)..(2807): n is a, c, g, or t
  misc_feature (5500)..(5500): n is a, c, g, or t
  misc_feature (5738)..(5738): n is a, c, g, or t
  misc_feature (5953)..(5953): n is a, c, g, or t
gcngncgcctactactactaaattcgcggccgcgtcgacgcaatcccaagtttaagggaaatatttttgtaaatgtaatggttttgaaaatctgagcaatccttttgcttatacatttttaaagcatttgtgctttaaaattgttatgctggtgtttgaaacatgatactcctgtggtgcagatgagaagctataacagtgaatatgtggtttctcttacgtcatccaccttgacatgatgggtcagaaacaaatggaaatccagagcaagtcctccagggttgcaccaggtttacctaaagcttgttgccttttcttgtgctgtttatccgtgtagagcactcaagaaagttctgaaactgctttgtatctgctttgtactgttggtgccttcttggtattgtaccccaaaattctgcatagattatttagtataatggtaagttaaaaaatgttaaaggaagattttattaagaatctgaatgtttattcattatattgttacaatttaacattaacatttatttgtggtatttgtgatttggttaatctgtataaaaattgtaagtagaaaggtttatatttcatcttaattcttttgatgttgtaaacgtactttttaaaagatggattatttgaatgtttatggcacctgacttgtaaaaaaaaaaaactacaaaaaaatccttagaatcattaaattgtgtccctgtattaccaaaataacacagcaccgtgcatgtatagtttaattgcagtttcatctgtgaaaacgtgaaattgtctagtccttcgttatgttccccagatgtcttccagatttgctctgcatgtggtaacttgtgttagggctgtgagctgttcctcgagttgaatggggatgtcagtgctcctagggttctccaggtggttcttcagaccttcacctgtgggggggggggtaggcggtgcccacgcccatctcctcatcctcctgaacttctgcaaccccactgctgggcagacatcctgggcaaccccttttttcagagcaagaagtcataaagataggatttcttggacatttggttcttatcaatattgggcattatgtaatgacttatttacaaaacaaagatactggaaaatgttttggatgtggtgttatggaaagagcacaggccttggacccatccagctgggttcagaactaccccctgcttataactgcggctggctgtgggccagtcattctgcgtctctgctttcttcctctgcttcagactgtcagctgtaaagtggaagcaatattacttgccttgtatatggtaaagattataaaaatacatttcaactgttcagcatagtacttcaaagcaagtactcagtaaatagcaagtctttttaaatgctgctttatttcactaaattttgttgtgaggtgtcactaaaatgcctgcaaacaaacgtaactgctaatctgagaggaaaccctcttactaatcagagaagaaaccctcctgtcagaaaccttcagggaagtgagctgatcacacctaaactgggagtttgcaatggggtatttgaagcactgtgggagtattccactggcccnctccctgagagacttaacagtcttccctgttgtccagattctgtataaggcaatcagaataatcatcttccttgttcagcagaggagcctggtcccattttccccactttgtgatgggcttctctcagcggtagctcagcagttccagatggcagtttggaccagcatctaggctggccagttcgctgtgtttacttagaaccaacacgttcagagctggcctggaccatctgaggggaacaggaaacacccctaggctgtggaagcaagtgcagacccccacccccggccctgaagccaagggggcagggtttgggagtggccaaagagaagcagtgcagggatgggttttcctagggacaggcttagcattcctgactctaggaagaaggagcagtgaggcggagaaacagtggaggggatggtggcattgggccccatggggccgagatggacacagggctcgttctcttgagtctggtgccaaggacagctgaagacgacatcattttcaggtggagaggagagagtggagggagatcatgccctgtgatgtgtcttttgcaggtgaaggtgggagacaaggtctctgctgacgatgaggcagagccaccgtgaaagttgtaataggaggactgcccgccgctggaagggcctgcagtgacgctaggacaccctctgcctgcatgtcacgttagctgggctgggcgaagtagaagaccaaggggaagaggtgcagtggggagaccaggtgggatgcaaccacaggaccagtggaggggctgtggcacgtgggcggagactgagtggctgggcatgtgttgtggctgagcatgtggtgtgggcagtggtcctagaccccgccatgtccggacaatgatatagagcgtctcagcatcgccagtctagactgtctatggagagcagaaagttgtctngggctgcctggggaactgtgaggccagctatatcaccgtcgctgatggtgacattacggtggtggcaggagcaaggagagagggaagaaggaccccgtccagctttagtcacaaaatacccaatggaagatgccagtgccaatcctgtgggtttccttgggacttcacactggctttcttatctgctccagatccattcagtagtcactgagttcctgccaaatactttgtagcgccagaagccaggagcggggtctgcagcagggcagtccccnttttcaggaaatgcctggagctgctggtccctgagagaaaggaaaacatctttcagccgtacgcaggccaagaaggccaatgtccagtagctttgtgattttttttatatttttttatttatttatttttgagatagagtcttgctctgtcgctcaggctggagtgcagtggcgtgatctccactcactgcaacttccgcctcctggggtcaagcagttctgcctcagcctcccgagtagctgggattacaggcacacgccaccacacccagctaatttttgtgtttttagtagagacggtttcaccatgtcggccaggctggtctcaaactcctgacctcagatgattcagcctcccaaagtgctgggattacaggtgtgagccactgcacccagcctgtgatgtttctgtggggttccacaaatgtgtgtgtgtgtaaaagctgatgattacagcaagaatgtgaacagtagcagttttccatttgaaggcaagttttgtctttatctgggtatcagaaggaccctctgggccattgtcgcttcctgtactcagagccaccctagtactacgggcacacacagaaaacagcagcctgcgtactttcaaaggaaaggcatctttaatcaccaatgcctggaaaaattattttgtttccctcttccttccgtcttgtttcctaacttcttaccaaagtttagagtctgagtttttcgtataataatgtcccacatccacacatcgggcctacagatgctctcccttgaatcgactggaaacatgacaccggttccatgctctggaactgtcacctgtgatgtgctgggctgtgtcccaagcacaggaatcccagcagtttcagctcgatgcagaaccaccatgctccagacacaggcttgggaaagacacgtcaaaattaaaatactaggtaagagaagcacctgattgggtagaagttggagaggaatcctggaattttgtggccagaaggagccactgccccttttgtttagtaagactagacagtaacagaagccagttgtcagctatgaaagtggtgggtgaagcaggggaggctcctctatggtgggaccctggacaagggaagccgaatgtgtgaagaaggggtgcgggggtgtgcggtgccctaggacactagggcaaaggtttcaaacctggaacaaggcactggaggaagatctgctgccagtcagcagtgcgggccctcgagttagcagtccgtgcgcagaggggccagttctgagaccagtttggagagtcaggcagtgacccattggccatgtcataattccttcagcctgcctcctctttaatcccagagagtgctctttcttcatacttcctttaaaatactaaattgttcccattccatggggagctggctaggctttacaggctaggaaatgtaggttttctgagatggaaccatctacacaaggaggaggaaggcactaagactacagatgagacccatgacagggctgagcatttggaagccaaccctggttgcttttcaagaattgctttgtggctgggtgcagtggttcacacctgtaattgcagcactttgggaggctgaggcaggtggattgcttgaacccaggagttcgagaccagcctgggcaacatatgggacaccccaccgcccccggctctgcaaaaaaattaaaaattagccaggcgtggtgtcatgagcctgtggtctcaactactcaggaggctgaggctggaggatcgcttgaacctgggaggtcaaggctccagtgaaccataattgtgccactgcactgcagcctgggcgacaatttgttttctaaattgcttttgaaagtctactgcattacatattccaaaaagcagtggttttcaaatacttttatcaccgatatccttttatgaaatgaaatcagtagaactttctctgctctgaataagcaagggtgggaacctgtctacctcccacagatagcataatgtgcctgccatagaggagccaaaaaatggtgatgggaactgagaggagagcaaatgtcacaaaagactgagcaattgagaaaacaaaacaagaccacagatgactgttaacgcctccacagtggaccaagaaaggacagagagctggcagcatgggcatcactgtctggtcggcagcaggaaggcctcgctagggaattgagtacagtcatctaactagtttaaaagtacaggaaggatgattaaggctattggagaggtcatacaaataggggaggggcaggcaatggctgataagacatgaatttgtaaggcgatgagtattgcagtcagcaaaacaaacgagactgctctcccaacacataactcagcagggaggccaggcattggtttaaccatttaatataaagaagttaaaattacaaatgcgctaagtgcctaaagaagaataagtgcaggaatgagagcagcatggactgccacagttttagaataagcactgtcactgctagattggaaacaaaaatccataaatttggcccggtgtggtggcggacgcctgtagtcccagctacttggaggctgaggcgtgagaatcgcttgaacccgggaggcggaggttgcagtgagccgagatggcgccactgcactccagcctgggcgtcagagtgagaactctgtatcaaaaaataaaaanaaaaaaaagtccataaatctgcaatgtctcagttaagaaagaaagactgggccaatgcagatttcaaaccggagaaagtcatactgtcagtgaaggccgcctgtggccggaaggcgccaggggattagcaccctggactcagtgttgctgggaaacagggccccaaggctgggagcacagtgtttaaagggcatctacccaagaagggagcacagggcaaggaggagctgcagggggncttggctgccaaagtgaattctgaggagagagctattgctgcctacgatatgcaggctgcacagaacacaagtggaatcagcaggcaggagaggcagctaacgacgcagcccgtttcttatttctgttttctcacaagcgatgaaagtggaaaagagggtgagcaggtggcccacacatgtgcctccagtgctgcggcccctccggggaccatcngccaggccccggggagggagccagccacagtgtgtccggctcttctctgaagggaagagagccttgaatagactgaagcgaagacggttctgcaaggacaaggcagaccgaaggcattggttttttttttcagataaggagaattagactcccaagtagacaccagagtcactgtttggttggtgggtgatagtggggtcacagtggctgcctgtgctcccccagggtgagcgtgactgtgctaacctgggtggggcagcatgcacacccctctggcagccctttgttgctcgctgatgacaagtttggatgatcccgccaaacagcttgctaagatgtagtccccagtgttggaggtggggcctgatgggaggtgctacccttgtgagataaggttgtgtaaaagcctgtggcacctccccacactgacgctctcacccctgctctggccatgtgccgcgcctgctcccacttccccttctgccaggagtaaaagcccccgagacctcccagaagccaagcagatgctagtgccatgcttcctctgcagcctgcagaactgtgagccaattaaacctcttttctctat

SEQ ID NO: 300119 - DNA, 1590 bp, Homo sapiens
acataatttctggagccctgtaccaacgtgtggccacatattctgtcaggaaccctgtgtgatcatggtctggatctgcaacacgggccaggccaaagtcacagatcttgagatcacaggtggtgttgagcagcaggcaggcaggcaatcggtccgagtggctgtcggctcttcagctctcccgctcggcgtcttccttcctcctcccggtcagcgtcggcggctgcaccggcggcggcgcagtccctgcgggaggggcgacaagagctgagcggcggccgccgagcgtcgagctcagcgcggcggaggcggcggcggcccggcagccaacatggcggcggcggcggcggcgggcgcgggcccggagatggtccgcgggcaggtgttcgacgtggggccgcgctacaccaacctctcgtacatcggcgagggcgcctacggcatggtgtgctctgcttatgataatgtcaacaaagttcgagtagctatcaagaaaatcagcccctttgagcaccagacctactgccagagaaccctgagggagataaaaatcttactgcgcttcagacatgagaacatcattggaatcaatgacattattcgagcaccaaccatcgagcaaatgaaagatgtatatatagtacaggacctcatggaaacagatctttacaagctcttgaagacacaacacctcagcaatgaccatatctgctattttctctaccagatcctcagagggttaaaatatatccattcagctaacgttctgcaccgtgacctcaagccttccaacctgctgctcaacaccacctgtgatctcaagatctgtgactttggcctggcccgtgttgcagatccagaccatgatcacacagggttcctgacagaatatgtggccacacgttggtacagggctccagaaattatgttgaattccaagggctacaccaagtccattgatatttggtctgtaggctgcattctggcagaaatgctttctaacaggcccatctttccagggaagcattatcttgaccagctgaaccacattttgggtattcttggatccccatcacaagaagacctgaattgtataataaatttaaaagctaggaactatttgctttctcttccacacaaaaataaggtgccatggaacaggctgttcccaaatgctgactccaaagctctggacttattggacaaaatgttgacattcaacccacacaagaggattgaagtagaacaggctctggcccacccatatctggagcagtattacgacccgagtgacgagcccatcgccgaagcaccattcaagttcgacatggaattggatgacttgcctaaggaaaagctcaaagaactaatttttgaagagactgctagattccagccaggatacagatcttaaatttgtcaggtacctggagtttaatacagtgagctctagcaagggaggcgctgccttttgtttctagaatattatgttcctcaaggtccattattttgtattcttttccaagctccttattggaaggtatttttttaaatttagaattaaaaattatttagaaagttaaatataaa

SEQ ID NO: 300120 - DNA, 1127 bp, Homo sapiens
  misc_feature (1127)..(1127): n is a, c, g, or t
acataatttctggagccctgtaccaacgtgtggccacatattctgtcaggaaccctgtgtgatcatggtctggatctgcaacacgggccaggccaaagtcacagatcttgagatcacaggtggtgttgagcagcaggcaggcaggcaatcggtccgagtggctgtcggctcttcagctctcccgctcggcgtcttccttcctcctcccggtcagcgtcggcggctgcaccggcggcggcgcagtccctgcgggaggggcgacaagagctgagcggcggccgccgagcgtcgagctcagcgcggcggaggcggcggcggcccggcagccaacatggcggcggcggcggcggcgggcgcgggcccggagatggtccgcgggcaggtgttcgacgtggggccgcgctacaccaacctctcgtacatcggcgagggcgcctacggcatggtgtgctctgcttatgataatgtcaacaaagttcgagtagctatcaagaaaatcagcccctttgagcaccagacctactgccagagaaccctgagggagataaaaatcttactgcgcttcagacatgagaacatcattggaatcaatgacattattcgagcaccaaccatcgagcaaatgaaagatgtatatatagtacaggacctcatggaaacagatctttacaagctcttgaagacacaacacctcagcaatgaccatatctgctattttctctaccagatcctcagagggttaaaatatatccattcagctaacgttctgcaccgtgacctcaagccttccaacctgctgctcaacaccacctgtgatctcaagatctgtgactttggcctggcccgtgttgcagatccagaccatgatcacacagggttcctgacagaatatgtggccacacgttggtacagggctccagaaattatgttgaattccaagggctacaccaagtccattgatatttggtctgtaggctgcattctggcagattttggtattctggatcccatacaagagaccctgatgatataattaaagtaggactattgcttctttcaactaggtgcatggacagctgtcaatgtgctcaagtcggactatgcaatgtgcataaccagagatgagn

SEQ ID NO: 300121 - DNA, 335 bp, Homo sapiens
tcggcctcccaaagtgctgggattacaggcattagccactgtgcccagcccaagttaatcaactatgaagagaaaaataaaatcacataatcttggttgttcagcctctcataagaaagccaaattgttttttgcttttccatgttgtttacttgtatttctgaattgtagagtcaaaggagaagttcagagtcccatcagcaatgcacctgtcatacaggaagatctcatcatgtcctgtaacaccagataccattttcagtcttttctctctttctcctgcagggctacaccaagtccattgatatttggtctgtaggctgcattctggcaga

SEQ ID NO: 300122 - DNA, 2546 bp, Homo sapiens
ggctgactgagccgctttcaatttatttagcttttgacaataattccgtctaacccatcaggcccctagaagggctaactatgccctttctgagtcttccacgcggtgggggcgaaggaggatggagctagaacgaagcctcagcgcgtgccccgcacaaacatggcagcattcccagcagccctaaaccgcccgacgggagcgcgcgcgcggcgcaggcgcatttctgctcattccgcggcgtcggctgcggctgcagtggtggtggcgggtaccgcacggggtatggtccccgggtccgagggcccggcccgcgccgggagcgtggtggccgacgtggtgtttgtgattgagggtacggccaacctgggaccctacttcgaggggctccgcaagcactacctgctcccggccatcgagtattttaatggtggtcctcctgctgagacggacttcgggggagactatggggggacccagtacagcctcgtggtgttcaacacagtggactgcgctcccgagtcctacgtacaatgtcacgctcccaccagcagcgcctatgagtttgtcacctggctcgatggcattaagttcatgggcgggggtggtgagagctgcagcctcatcgcggaaggactcagcacagccttgcagctgtttgatgacttcaagaagatgcgcgagcagattggccagacgcaccgggtctgcctcctcatctgcaactcacccccatacttgttgcctgctgttgagagcaccacgtactctggatgcacaactgagaatcttgtgcagcagattggggagcgggggatccacttctccattgtgtctccccggaagctgcctgcgcttcggcttctgtttgagaaggcagcccccccggccttgctggagccgctgcagcctccgacagatgtgagccaggacccgaggcacatggtgctggttcggggactcgtgctgcctgttgggggtggctcagccccaggccccctccagtcaaagcagccagtccccctgcctcccgccgcaccctcaggtgccactctctcagcagccccccagcagcctctgccccccgtccccccgcagtaccaggttcccgggaacctgagtgcagctcaggtggccgcgcagaatgcagtggaggctgccaagaaccagaaggctgggctgggccctcgcttctcgcccatcacccctctccaacaagctgctcccggagtgggtccccccttcagccaggccccagctccccaactacccccaggaccccctggcgcccccaagccaccacctgcttcccagcccagtctggtctccactgtggcccctggctccggcctggctcccacggcacagcccggggcaccgtccatggcaggcactgtggccccaggaggggtgagcggcccttccccagcccagctgggagccccagccctcggtgggcagcagtcagtctccaataagcttctggcctggagcggggtcctggagtggcaagagaaacccaaacctgcctcagtggatgccaacaccaagctgacgcggtcactgccctgccaggtctacgtgaatcatggcgagaacctgaagacggagcagtggccccagaagctgatcatgcagctcatcccccagcagctgctgaccaccctgggccctttgttccggaactcaaggatggtccagttccatttcaccaacaaggacctggagtctctcaaaggcctctaccgcatcatgggcaacggcttcgcgggctgcgtgcacttcccccacacggcgccctgtgaggtgcgcgtgctcatgctcctgtactcgtccaagaagaagatcttcatgggcctcatcccctacgaccagagcggcttcgtcaacggcatccggcaggtcatcaccaaccacaagcaggtccagcagcagaagctggagcagcagcagcgaggaatggggggacagcaggcacccccagggctggggcccattctggaggaccaagccaggccctcacagaatctgctccagctccgcccaccgcagccccagcctcagggtaccgtaggggcctctggggccacggggcagccccagccccaaggtactgcccagcccccgccaggtgcccctcaaggccctcctggagcagcttctggcccaccccctcctggacccatccttcggccccagaaccctggggccaaccctcagctgcgaagcctcctcctcaacccaccaccgccgcagactggggtgcccccaccccaggcctccctccaccacctgcccagtcctggcccgcacaacttccccctcgggctccactgccaggtaaggggacccgggggagggcagaggtctggactgagtgtcccagcagctcctgggctagagcaccaagaccaagtgctcctgggaagtaaagacataggatccaagaatgagggttcccccagccgggcctgcagcccagcgtcatggaggacgacatcctcatggatctcatctgaatccccaacacccaataaagttccttt

SEQ ID NO: 300123 - DNA, 3475 bp, Homo sapiens
ggaacaaaagctggtactgggccgcccctcgaaggctcaggcccttacgggggatccacttctccattgtgtctccccggaagctgcctgcgcttcggcttctgtttgagaaggcagcccccccggccttgctggagccgctgcagcctccgacagatgtgagccaggacccgaggcacatggtgctggttcggggactcgtgctgcctgttgggggtggctcagccccaggccccctccagtcaaagcagccagtccccctgcctcccgccgcaccctcaggtgccactctctcagcagccccccagcagcctctgccccccgtccccccgcagtaccaggttcccgggaacctgagtgcagctcaggtggccgcgcagaatgcagtggaggctgccaagaaccagaaggctgggctgggccctcgcttctcgcccatcacccctctccaacaagctgctcccggagtgggtccccccttcagccaggccccagctccccaactacccccaggaccccctggcgcccccaagccaccacctgcttcccagcccagtctggtctccactgtggcccctggctccggcctggctcccacggcacagcccggggcaccgtccatggcaggcactgtggccccaggaggggtgagcggcccttccccagcccagctgggagccccagccctcggtgggcagcagtcagtctccaataagcttctggcctggagcggggtcctggagtggcaagagaaacccaaacctgcctcagtggatgccaacaccaagctgacgcggtcactgccctgccaggtctacgtgaatcatggcgagaacctgaagacggagcagtggccccagaagctgatcatgcagctcatcccccagcagctgctgaccaccctgggccctttgttccggaactcaaggatggtccagttccatttcaccaacaaggacctggagtctctcaaaggcctctaccgcatcatgggcaacggcttcgcgggctgcgtgcacttcccccacacggcgccctgtgaggtgcgcgtgctcatgctcctgtactcgtccaagaagaagatcttcatgggcctcatcccctacgaccagagcggcttcgtcaacggcatccggcaggtcatcaccaaccacaagcaggtccagcagcagaagctggagcagcagcagcgaggaatggggggacagcaggcacccccagggctggggcccattctggaggaccaagccaggccctcacagaatctgctccagctccgcccaccgcagccccagcctcagggtaccgtaggggcctctggggccacggggcagccccagccccaaggtactgcccagcccccgccaggtgcccctcaaggccctcctggagcagcttctggcccaccccctcctggacccatccttcggccccagaaccctggggccaaccctcagctgcgaagcctcctcctcaacccaccaccgccgcagactggggtgcccccaccccaggcctccctccaccacctccagccaccaggggctcctgcgctgctgcctccgccgcaccagggcctggggcagccccagttggggcccccactcctgcatccaccacctgcccagtcctggcccgcacaacttccccctcgggctccactgccagcggcaaaacgaaagagagaaggagagggccgtgtgtttcgagaaaaatgggagcgagcctatttctttgtggaagtgaagagcatgcctatgtgtttaatatgcaaacaaatcgtgtctgtgttgaaagaatacaacctgaaacgccactatgaatcaaagcatagtaagagctacgaccagtacacagaacagactcgagatgccatcctcaacgaactgaaaaagggactcaaatgtcaatagggtttgttttgaaaagcgaattaacagaagtggcgcggcagtggtacgccgttccggaatcacgtgagaagaatgacctgggcattcagagctacagcagatggcaagtttataaaggagcagagtgacgtgtcctgcacagaaacacatgactgttgagaccgttatttaagtctaacgggcatttgcgttgcacagtgagttggagataactcgggggatttacaagtccagttgcttgaaagagtcaaattgattgtggccttttctttcgctgctcataaactattaccacccagttagctttatttatttgtggtgttaagaatcttgatgtgaccgaagaagtctgtggcatggtgccaaggcaggcccaacactgggaaaggactaattttttttgtatattgagagaaaagtttcacatagactggccagagttccgaagcacaactacagacagcgtcatgacagggggacttggcaggacaccttgatccaaggcgacagcattttggcaaggacacggaagttgggtcgttgcatccatcatcaggagttgacttgttctgagcaactgaacagaacacaccgcgatgctctcgacacttccgctcctggacttcagtcacgagtgagttgatggtgacttgacctgagagatttcacagaagctctgtgacttggttgtggaagaaatctgaactgttcaagttaaccaacttggttcattttaaatcaggcaaaagccacagtgggttcccctgagaaggttagtcaaagacttctggtcaaggttatgaccgttctgaacactgaatatttctccgcaaggatgttccacaaacagctacttgaatgtatgatggtgtatgcttggtcctggggaatccaccggcaaggaaaaaaaacctttactctttcctgtgctgcagtcggctttcagaaatgaaagaggtggcccggactgtattcacctacgtcctggggttgaagaccaaattcccccaaaggctctcggaatccagactcatgagaaggaacagacactgtccagtttgcctttgttggcagatgtttcttgtgtgaatgcagaccataaatagtaattgaactacagtgcaatacggcgctggttcctaaatacaagtctgtgtgaagatggtgagattctacaactatctccagtagttgtcctgaatatctgtgtttgggagtacccacgcttgtgaacagctgttttccgttacgaacctgaatcaaattaaacatcgttcccagttgaaggattcaaggctgaattctaaactgcccgtccccaccgtgccacccgaggcctgacactgacatctcggtgtggaagggaagacgccagccttttggcttcaactcaaaggcgcaaaaagaattatgaaagagaaaattttaataattaaatatttctatttttcaatttgtattttttcaattttgaatttaaaaatataaactccagtaacatccatgtttgtattatgttccatgcattcaccatagttgagtaaagatccgatttgatgata

SEQ ID NO: 300124 - DNA, 4238 bp, Homo sapiens
ggctgactgagccgctttcaatttatttagcttttgacaataattccgtctaacccatcaggcccctagaagggctaactatgccctttctgagtcttccacgcggtgggggcgaaggaggatggagctagaacgaagcctcagcgcgtgccccgcacaaacatggcagcattcccagcagccctaaaccgcccgacgggagcgcgcgcgcggcgcaggcgcatttctgctcattccgcggcgtcggctgcggctgcagtggtggtggcgggtaccgcacggggtatggtccccgggtccgagggcccggcccgcgccgggagcgtggtggccgacgtggtgtttgtgattgagggtacggccaacctgggaccctacttcgaggggctccgcaagcactacctgctcccggccatcgagtattttaatggtggtcctcctgctgagacggacttcgggggagactatggggggacccagtacagcctcgtggtgttcaacacagtggactgcgctcccgagtcctacgtacaatgtcacgctcccaccagcagcgcctatgagtttgtcacctggctcgatggcattaagttcatgggcgggggtggtgagagctgcagcctcatcgcggaaggactcagcacagccttgcagctgtttgatgacttcaagaagatgcgcgagcagattggccagacgcaccgggtctgcctcctcatctgcaactcacccccatacttgttgcctgctgttgagagcaccacgtactctggatgcacaactgagaatcttgtgcagcagattggggagcgggggatccacttctccattgtgtctccccggaagctgcctgcgcttcggcttctgtttgagaaggcagcccccccggccttgctggagccgctgcagcctccgacagatgtgagccaggacccgaggcacatggtgctggttcggggactcgtgctgcctgttgggggtggctcagccccaggccccctccagtcaaagcagccagtccccctgcctcccgccgcaccctcaggtgccactctctcagcagccccccagcagcctctgccccccgtccccccgcagtaccaggttcccgggaacctgagtgcagctcaggtggccgcgcagaatgcagtggaggctgccaagaaccagaaggctgggctgggccctcgcttctcgcccatcacccctctccaacaagctgctcccggagtgggtccccccttcagccaggccccagctccccaactacccccaggaccccctggcgcccccaagccaccacctgcttcccagcccagtctggtctccactgtggcccctggctccggcctggctcccacggcacagcccggggcaccgtccatggcaggcactgtggccccaggaggggtgagcggcccttccccagcccagctgggagccccagccctcggtgggcagcagtcagtctccaataagcttctggcctggagcggggtcctggagtggcaagagaaacccaaacctgcctcagtggatgccaacaccaagctgacgcggtcactgccctgccaggtctacgtgaatcatggcgagaacctgaagacggagcagtggccccagaagctgatcatgcagctcatcccccagcagctgctgaccaccctgggccctttgttccggaactcaaggatggtccagttccatttcaccaacaaggacctggagtctctcaaaggcctctaccgcatcatgggcaacggcttcgcgggctgcgtgcacttcccccacacggcgccctgtgaggtgcgcgtgctcatgctcctgtactcgtccaagaagaagatcttcatgggcctcatcccctacgaccagagcggcttcgtcaacggcatccggcaggtcatcaccaaccacaagcaggtccagcagcagaagctggagcagcagcagcgaggaatggggggacagcaggcacccccagggctggggcccattctggaggaccaagccaggccctcacagaatctgctccagctccgcccaccgcagccccagcctcagggtaccgtaggggcctctggggccacggggcagccccagccccaaggtactgcccagcccccgccaggtgcccctcaaggccctcctggagcagcttctggcccaccccctcctggacccatccttcggccccagaaccctggggccaaccctcagctgcgaagcctcctcctcaacccaccaccgccgcagactggggtgcccccaccccaggcctccctccaccacctccagccaccaggggctcctgcgctgctgcctccgccgcaccagggcctggggcagccccagttggggcccccactcctgcatccaccacctgcccagtcctggcccgcacaacttccccctcgggctccactgccagcggcaaaacgaaagagagaaggagagggccgtgtgtttcgagaaaaatgggagcgagcctatttctttgtggaagtgaagagcatgcctatgtgtttaatatgcaaacaaatcgtgtctgtgttgaaagaatacaacctgaaacgccactatgaatcaaagcatagtaagagctacgaccagtacacagaacagactcgagatgccatcctcaacgaactgaaaaagggactcaaatgtcaatagggtttgttttgaaaagcgaattaacagaagtggcgcggcagtggtacgccgttccggaatcacgtgagaagaatgacctgggcattcagagctacagcagatggcaagtttataaaggagcagagtgacgtgtcctgcacagaaacacatgactgttgagaccgttatttaagtctaacgggcatttgcgttgcacagtgagttggagataactcgggggatttacaagtccagttgcttgaaagagtcaaattgattgtggccttttctttcgctgctcataaactattaccacccagttagctttatttatttgtggtgttaagaatcttgatgtgaccgaagaagtctgtggcatggtgccaaggcaggcccaacactgggaaaggactaattttttttgtatattgagagaaaagtttcacatagactggccagagttccgaagcacaactacagacagcgtcatgacagggggacttggcaggacaccttgatccaaggcgacagcattttggcaaggacacggaagttgggtcgttgcatccatcatcaggagttgacttgttctgagcaactgaacagaacacaccgcgatgctctcgacacttccgctcctggacttcagtcacgagtgagttgatggtgacttgacctgagagatttcacagaagctctgtgacttggttgtggaagaaatctgaactgttcaagttaaccaacttggttcattttaaatcaggcaaaagccacagtgggttcccctgagaaggttagtcaaagacttctggtcaaggttatgaccgttctgaacactgaatatttctccgcaaggatgttccacaaacagctacttgaatgtatgatggtgtatgcttggtcctggggaatccaccggcaaggaaaaaaaacctttactctttcctgtgctgcagtcggctttcagaaatgaaagaggtggcccggactgtattcacctacgtcctggggttgaagaccaaattcccccaaaggctctcggaatccagactcatgagaaggaacagacactgtccagtttgcctttgttggcagatgtttcttgtgtgaatgcagaccataaatagtaattgaactacagtgcaatacggcgctggttcctaaatacaagtctgtgtgaagatggtgagattctacaactatctccagtagttgtcctgaatatctgtgtttgggagtacccacgcttgtgaacagctgttttccgttacgaacctgaatcaaattaaacatcgttcccagttgaaggattcaaggctgaattctaaactgcccgtccccaccgtgccacccgaggcctgacactgacatctcggtgtggaagggaagacgccagccttttggcttcaactcaaaggcgcaaaaagaattatgaaagagaaaattttaataattaaatatttctatttttcaatttgtattttttcaattttgaatttaaaaatataaactccagtaacatccatgtttgtattatgttccatgcattcaccatagttgagtaaagatccgatttgatgata

SEQ ID NO: 300125 - DNA, 4069 bp, Homo sapiens
ggctgactgagccgctttcaatttatttagcttttgacaataattccgtctaacccatcaggcccctagaagggctaactatgccctttctgagtcttccacgcggtgggggcgaaggaggatggagctagaacgaagcctcagcgcgtgccccgcacaaacatggcagcattcccagcagccctaaaccgcccgacgggagcgcgcgcgcggcgcaggcgcatttctgctcattccgcggcgtcggctgcggctgcagtggtggtggcgggtaccgcacggggtatggtccccgggtccgagggcccggcccgcgccgggagcgtggtggccgacgtggtgtttgtgattgagggtacggccaacctgggaccctacttcgaggggctccgcaagcactacctgctcccggccatcgagtattttaatggtggtcctcctgctgagacggacttcgggggagacgactcagcacagccttgcagctgtttgatgacttcaagaagatgcgcgagcagattggccagacgcaccgggtctgcctcctcatctgcaactcacccccatacttgttgcctgctgttgagagcaccacgtactctggatgcacaactgagaatcttgtgcagcagattggggagcgggggatccacttctccattgtgtctccccggaagctgcctgcgcttcggcttctgtttgagaaggcagcccccccggccttgctggagccgctgcagcctccgacagatgtgagccaggacccgaggcacatggtgctggttcggggactcgtgctgcctgttgggggtggctcagccccaggccccctccagtcaaagcagccagtccccctgcctcccgccgcaccctcaggtgccactctctcagcagccccccagcagcctctgccccccgtccccccgcagtaccaggttcccgggaacctgagtgcagctcaggtggccgcgcagaatgcagtggaggctgccaagaaccagaaggctgggctgggccctcgcttctcgcccatcacccctctccaacaagctgctcccggagtgggtccccccttcagccaggccccagctccccaactacccccaggaccccctggcgcccccaagccaccacctgcttcccagcccagtctggtctccactgtggcccctggctccggcctggctcccacggcacagcccggggcaccgtccatggcaggcactgtggccccaggaggggtgagcggcccttccccagcccagctgggagccccagccctcggtgggcagcagtcagtctccaataagcttctggcctggagcggggtcctggagtggcaagagaaacccaaacctgcctcagtggatgccaacaccaagctgacgcggtcactgccctgccaggtctacgtgaatcatggcgagaacctgaagacggagcagtggccccagaagctgatcatgcagctcatcccccagcagctgctgaccaccctgggccctttgttccggaactcaaggatggtccagttccatttcaccaacaaggacctggagtctctcaaaggcctctaccgcatcatgggcaacggcttcgcgggctgcgtgcacttcccccacacggcgccctgtgaggtgcgcgtgctcatgctcctgtactcgtccaagaagaagatcttcatgggcctcatcccctacgaccagagcggcttcgtcaacggcatccggcaggtcatcaccaaccacaagcaggtccagcagcagaagctggagcagcagcagcgaggaatggggggacagcaggcacccccagggctggggcccattctggaggaccaagccaggccctcacagaatctgctccagctccgcccaccgcagccccagcctcagggtaccgtaggggcctctggggccacggggcagccccagccccaaggtactgcccagcccccgccaggtgcccctcaaggccctcctggagcagcttctggcccaccccctcctggacccatccttcggccccagaaccctggggccaaccctcagctgcgaagcctcctcctcaacccaccaccgccgcagactggggtgcccccaccccaggcctccctccaccacctccagccaccaggggctcctgcgctgctgcctccgccgcaccagggcctggggcagccccagttggggcccccactcctgcatccaccacctgcccagtcctggcccgcacaacttccccctcgggctccactgccagcggcaaaacgaaagagagaaggagagggccgtgtgtttcgagaaaaatgggagcgagcctatttctttgtggaagtgaagagcatgcctatgtgtttaatatgcaaacaaatcgtgtctgtgttgaaagaatacaacctgaaacgccactatgaatcaaagcatagtaagagctacgaccagtacacagaacagactcgagatgccatcctcaacgaactgaaaaagggactcaaatgtcaatagggtttgttttgaaaagcgaattaacagaagtggcgcggcagtggtacgccgttccggaatcacgtgagaagaatgacctgggcattcagagctacagcagatggcaagtttataaaggagcagagtgacgtgtcctgcacagaaacacatgactgttgagaccgttatttaagtctaacgggcatttgcgttgcacagtgagttggagataactcgggggatttacaagtccagttgcttgaaagagtcaaattgattgtggccttttctttcgctgctcataaactattaccacccagttagctttatttatttgtggtgttaagaatcttgatgtgaccgaagaagtctgtggcatggtgccaaggcaggcccaacactgggaaaggactaattttttttgtatattgagagaaaagtttcacatagactggccagagttccgaagcacaactacagacagcgtcatgacagggggacttggcaggacaccttgatccaaggcgacagcattttggcaaggacacggaagttgggtcgttgcatccatcatcaggagttgacttgttctgagcaactgaacagaacacaccgcgatgctctcgacacttccgctcctggacttcagtcacgagtgagttgatggtgacttgacctgagagatttcacagaagctctgtgacttggttgtggaagaaatctgaactgttcaagttaaccaacttggttcattttaaatcaggcaaaagccacagtgggttcccctgagaaggttagtcaaagacttctggtcaaggttatgaccgttctgaacactgaatatttctccgcaaggatgttccacaaacagctacttgaatgtatgatggtgtatgcttggtcctggggaatccaccggcaaggaaaaaaaacctttactctttcctgtgctgcagtcggctttcagaaatgaaagaggtggcccggactgtattcacctacgtcctggggttgaagaccaaattcccccaaaggctctcggaatccagactcatgagaaggaacagacactgtccagtttgcctttgttggcagatgtttcttgtgtgaatgcagaccataaatagtaattgaactacagtgcaatacggcgctggttcctaaatacaagtctgtgtgaagatggtgagattctacaactatctccagtagttgtcctgaatatctgtgtttgggagtacccacgcttgtgaacagctgttttccgttacgaacctgaatcaaattaaacatcgttcccagttgaaggattcaaggctgaattctaaactgcccgtccccaccgtgccacccgaggcctgacactgacatctcggtgtggaagggaagacgccagccttttggcttcaactcaaaggcgcaaaaagaattatgaaagagaaaattttaataattaaatatttctatttttcaatttgtattttttcaattttgaatttaaaaatataaactccagtaacatccatgtttgtattatgttccatgcattcaccatagttgagtaaagatccgatttgatgata

SEQ ID NO: 300126 - DNA, 4259 bp, Homo sapiens
ggctgactgagccgctttcaatttatttagcttttgacaataattccgtctaacccatcaggcccctagaagggctaactatgccctttctgagtcttccacgcggtgggggcgaaggaggatggagctagaacgaagcctcagcgcgtgccccgcacaaacatggcagcattcccagcagccctaaaccgcccgacgggagcgcgcgcgcggcgcaggcgcatttctgctcattccgcggcgtcggctgcggctgcagtggtggtggcgggtaccgcacggggtatggtccccgggtccgagggcccggcccgcgccgggagcgtggtggccgacgtggtgtttgtgattgagggtacggccaacctgggaccctacttcgaggggctccgcaagcactacctgctcccggccatcgagtattttaatggtggtcctcctgctgagacggacttcgggggagactatggggggacccagtacagcctcgtggtgttcaacacagtggactgcgctcccgagtcctacgtacaatgtcacgctcccaccagcagcgcctatgagtttgtcacctggctcgatggcattaagtgagctttcccccacttggggttcatgggcgggggtggtgagagctgcagcctcatcgcggaaggactcagcacagccttgcagctgtttgatgacttcaagaagatgcgcgagcagattggccagacgcaccgggtctgcctcctcatctgcaactcacccccatacttgttgcctgctgttgagagcaccacgtactctggatgcacaactgagaatcttgtgcagcagattggggagcgggggatccacttctccattgtgtctccccggaagctgcctgcgcttcggcttctgtttgagaaggcagcccccccggccttgctggagccgctgcagcctccgacagatgtgagccaggacccgaggcacatggtgctggttcggggactcgtgctgcctgttgggggtggctcagccccaggccccctccagtcaaagcagccagtccccctgcctcccgccgcaccctcaggtgccactctctcagcagccccccagcagcctctgccccccgtccccccgcagtaccaggttcccgggaacctgagtgcagctcaggtggccgcgcagaatgcagtggaggctgccaagaaccagaaggctgggctgggccctcgcttctcgcccatcacccctctccaacaagctgctcccggagtgggtccccccttcagccaggccccagctccccaactacccccaggaccccctggcgcccccaagccaccacctgcttcccagcccagtctggtctccactgtggcccctggctccggcctggctcccacggcacagcccggggcaccgtccatggcaggcactgtggccccaggaggggtgagcggcccttccccagcccagctgggagccccagccctcggtgggcagcagtcagtctccaataagcttctggcctggagcggggtcctggagtggcaagagaaacccaaacctgcctcagtggatgccaacaccaagctgacgcggtcactgccctgccaggtctacgtgaatcatggcgagaacctgaagacggagcagtggccccagaagctgatcatgcagctcatcccccagcagctgctgaccaccctgggccctttgttccggaactcaaggatggtccagttccatttcaccaacaaggacctggagtctctcaaaggcctctaccgcatcatgggcaacggcttcgcgggctgcgtgcacttcccccacacggcgccctgtgaggtgcgcgtgctcatgctcctgtactcgtccaagaagaagatcttcatgggcctcatcccctacgaccagagcggcttcgtcaacggcatccggcaggtcatcaccaaccacaagcaggtccagcagcagaagctggagcagcagcagcgaggaatggggggacagcaggcacccccagggctggggcccattctggaggaccaagccaggccctcacagaatctgctccagctccgcccaccgcagccccagcctcagggtaccgtaggggcctctggggccacggggcagccccagccccaaggtactgcccagcccccgccaggtgcccctcaaggccctcctggagcagcttctggcccaccccctcctggacccatccttcggccccagaaccctggggccaaccctcagctgcgaagcctcctcctcaacccaccaccgccgcagactggggtgcccccaccccaggcctccctccaccacctccagccaccaggggctcctgcgctgctgcctccgccgcaccagggcctggggcagccccagttggggcccccactcctgcatccaccacctgcccagtcctggcccgcacaacttccccctcgggctccactgccagcggcaaaacgaaagagagaaggagagggccgtgtgtttcgagaaaaatgggagcgagcctatttctttgtggaagtgaagagcatgcctatgtgtttaatatgcaaacaaatcgtgtctgtgttgaaagaatacaacctgaaacgccactatgaatcaaagcatagtaagagctacgaccagtacacagaacagactcgagatgccatcctcaacgaactgaaaaagggactcaaatgtcaatagggtttgttttgaaaagcgaattaacagaagtggcgcggcagtggtacgccgttccggaatcacgtgagaagaatgacctgggcattcagagctacagcagatggcaagtttataaaggagcagagtgacgtgtcctgcacagaaacacatgactgttgagaccgttatttaagtctaacgggcatttgcgttgcacagtgagttggagataactcgggggatttacaagtccagttgcttgaaagagtcaaattgattgtggccttttctttcgctgctcataaactattaccacccagttagctttatttatttgtggtgttaagaatcttgatgtgaccgaagaagtctgtggcatggtgccaaggcaggcccaacactgggaaaggactaattttttttgtatattgagagaaaagtttcacatagactggccagagttccgaagcacaactacagacagcgtcatgacagggggacttggcaggacaccttgatccaaggcgacagcattttggcaaggacacggaagttgggtcgttgcatccatcatcaggagttgacttgttctgagcaactgaacagaacacaccgcgatgctctcgacacttccgctcctggacttcagtcacgagtgagttgatggtgacttgacctgagagatttcacagaagctctgtgacttggttgtggaagaaatctgaactgttcaagttaaccaacttggttcattttaaatcaggcaaaagccacagtgggttcccctgagaaggttagtcaaagacttctggtcaaggttatgaccgttctgaacactgaatatttctccgcaaggatgttccacaaacagctacttgaatgtatgatggtgtatgcttggtcctggggaatccaccggcaaggaaaaaaaacctttactctttcctgtgctgcagtcggctttcagaaatgaaagaggtggcccggactgtattcacctacgtcctggggttgaagaccaaattcccccaaaggctctcggaatccagactcatgagaaggaacagacactgtccagtttgcctttgttggcagatgtttcttgtgtgaatgcagaccataaatagtaattgaactacagtgcaatacggcgctggttcctaaatacaagtctgtgtgaagatggtgagattctacaactatctccagtagttgtcctgaatatctgtgtttgggagtacccacgcttgtgaacagctgttttccgttacgaacctgaatcaaattaaacatcgttcccagttgaaggattcaaggctgaattctaaactgcccgtccccaccgtgccacccgaggcctgacactgacatctcggtgtggaagggaagacgccagccttttggcttcaactcaaaggcgcaaaaagaattatgaaagagaaaattttaataattaaatatttctatttttcaatttgtattttttcaattttgaatttaaaaatataaactccagtaacatccatgtttgtattatgttccatgcattcaccatagttgagtaaagatccgatttgatgata

SEQ ID NO: 300127 - DNA, 3857 bp, Homo sapiens
  misc_feature (26)..(26): n is a, c, g, or t
ttattattgccaagtgctgtaccccncgagtaatgggatatcgtcgaccacggcgtcgctgctgagacggacttcgggggagactatggggggacccagtacagcctcgtggtgttcaacacagtggactgcgctcccgagtcctacgtacaatgtcacgctcccaccagcagcgcctatgagtttgtcacctggctcgatggcattaagttcatgggcgggggtggtgagagctgcagcctcatcgcggaaggactcagcacagccttgcagctgtttgatgacttcaagaagatgcgcgagcagattggccagacgcaccgggtctgcctcctcatctgcaactcacccccatacttgttgcctgctgttgagagcaccacgtactctggatgcacaactgagaatcttgtgcagcagattggggagcgggggatccacttctccattgtgtctccccggaagctgcctgcgcttcggcttctgtttgagaaggcagcccccccggccttgctggagccgctgcagcctccgacagatgtgagccaggacccgaggcacatggtgctggttcggggactcgtgctgcctgttgggggtggctcagccccaggccccctccagtcaaagcagccagtccccctgcctcccgccgcaccctcaggtgccactctctcagcagccccccagcagcctctgccccccgtccccccgcagtaccaggttcccgggaacctgagtgcagctcaggtggccgcgcagaatgcagtggaggctgccaagaaccagaaggctgggctgggccctcgcttctcgcccatcacccctctccaacaagctgctcccggagtgggtccccccttcagccaggccccagctccccaactacccccaggaccccctggcgcccccaagccaccacctgcttcccagcccagtctggtctccactgtggcccctggctccggcctggctcccacggcacagcccggggcaccgtccatggcaggcactgtggccccaggaggggtgagcggcccttccccagcccagctgggagccccagccctcggtgggcagcagtcagtctccaataagcttctggcctggagcggggtcctggagtggcaagagaaacccaaacctgcctcagtggatgccaacaccaagctgacgcggtcactgccctgccaggtctacgtgaatcatggcgagaacctgaagacggagcagtggccccagaagctgatcatgcagctcatcccccagcagctgctgaccaccctgggccctttgttccggaactcaaggatggtccagttccatttcaccaacaaggacctggagtctctcaaaggcctctaccgcatcatgggcaacggcttcgcgggctgcgtgcacttcccccacacggcgccctgtgaggtgcgcgtgctcatgctcctgtactcgtccaagaagaagatcttcatgggcctcatcccctacgaccagagcggcttcgtcaacggcatccggcaggtcatcaccaaccacaagcaggtccagcagcagaagctggagcagcagcagcgaggaatggggggacagcaggcacccccagggctggggcccattctggaggaccaagccaggccctcacagaatctgctccagctccgcccaccgcagccccagcctcagggtaccgtaggggcctctggggccacggggcagccccagccccaaggtactgcccagcccccgccaggtgcccctcaaggccctcctggagcagcttctggcccaccccctcctggacccatccttcggccccagaaccctggggccaaccctcagctgcgaagcctcctcctcaacccaccaccgccgcagactggggtgcccccaccccaggcctccctccaccacctccagccaccaggggctcctgcgctgctgcctccgccgcaccagggcctggggcagccccagttggggcccccactcctgcatccaccacctgcccagtcctggcccgcacaacttccccctcgggctccactgccagcggcaaaacgaaagagagaaggagagggccgtgtgtttcgagaaaaatgggagcgagcctatttctttgtggaagtgaagagcatgcctatgtgtttaatatgcaaacaaatcgtgtctgtgttgaaagaatacaacctgaaacgccactatgaatcaaagcatagtaagagctacgaccagtacacagaacagactcgagatgccatcctcaacgaactgaaaaagggactcaaatgtcaatagggtttgttttgaaaagcgaattaacagaagtggcgcggcagtggtacgccgttccggaatcacgtgagaagaatgacctgggcattcagagctacagcagatggcaagtttataaaggagcagagtgacgtgtcctgcacagaaacacatgactgttgagaccgttatttaagtctaacgggcatttgcgttgcacagtgagttggagataactcgggggatttacaagtccagttgcttgaaagagtcaaattgattgtggccttttctttcgctgctcataaactattaccacccagttagctttatttatttgtggtgttaagaatcttgatgtgaccgaagaagtctgtggcatggtgccaaggcaggcccaacactgggaaaggactaattttttttgtatattgagagaaaagtttcacatagactggccagagttccgaagcacaactacagacagcgtcatgacagggggacttggcaggacaccttgatccaaggcgacagcattttggcaaggacacggaagttgggtcgttgcatccatcatcaggagttgacttgttctgagcaactgaacagaacacaccgcgatgctctcgacacttccgctcctggacttcagtcacgagtgagttgatggtgacttgacctgagagatttcacagaagctctgtgacttggttgtggaagaaatctgaactgttcaagttaaccaacttggttcattttaaatcaggcaaaagccacagtgggttcccctgagaaggttagtcaaagacttctggtcaaggttatgaccgttctgaacactgaatatttctccgcaaggatgttccacaaacagctacttgaatgtatgatggtgtatgcttggtcctggggaatccaccggcaaggaaaaaaaacctttactctttcctgtgctgcagtcggctttcagaaatgaaagaggtggcccggactgtattcacctacgtcctggggttgaagaccaaattcccccaaaggctctcggaatccagactcatgagaaggaacagacactgtccagtttgcctttgttggcagatgtttcttgtgtgaatgcagaccataaatagtaattgaactacagtgcaatacggcgctggttcctaaatacaagtctgtgtgaagatggtgagattctacaactatctccagtagttgtcctgaatatctgtgtttgggagtacccacgcttgtgaacagctgttttccgttacgaacctgaatcaaattaaacatcgttcccagttgaaggattcaaggctgaattctaaactgcccgtccccaccgtgccacccgaggcctgacactgacatctcggtgtggaagggaagacgccagccttttggcttcaactcaaaggcgcaaaaagaattatgaaagagaaaattttaataattaaatatttctatttttcaatttgtattttttcaattttgaatttaaaaatataaactccagtaacatccatgtttgtattatgttccatgcattcaccatagttgagtaaagatccgatttgatgata

SEQ ID NO: 300128 - DNA, 3527 bp, Homo sapiens
  misc_feature (3508)..(3509): n is a, c, g, or t
  misc_feature (3513)..(3514): n is a, c, g, or t
ggaacaaaagctggtactgggccgcccctcgaaggctcaggcccttacgggggatccacttctccattgtgtctccccggaagctgcctgcgcttcggcttctgtttgagaaggcagcccccccggccttgctggagccgctgcagcctccgacagatgtgagccaggacccgaggcacatggtgctggttcggggactcgtgctgcctgttgggggtggctcagccccaggccccctccagtcaaagcagccagtccccctgcctcccgccgcaccctcaggtgccactctctcagcagccccccagcagcctctgccccccgtccccccgcagtaccaggttcccgggaacctgagtgcagctcaggtggccgcgcagaatgcagtggaggctgccaagaaccagaaggctgggctgggccctcgcttctcgcccatcacccctctccaacaagctgctcccggagtgggtccccccttcagccaggccccagctccccaactacccccaggaccccctggcgcccccaagccaccacctgcttcccagcccagtctggtctccactgtggcccctggctccggcctggctcccacggcacagcccggggcaccgtccatggcaggcactgtggccccaggaggggtgagcggcccttccccagcccagctgggagccccagccctcggtgggcagcagtcagtctccaataagcttctggcctggagcggggtcctggagtggcaagagaaacccaaacctgcctcagtggatgccaacaccaagctgacgcggtcactgccctgccaggtctacgtgaatcatggcgagaacctgaagacggagcagtggccccagaagctgatcatgcagctcatcccccagcagctgctgaccaccctgggccctttgttccggaactcaaggatggtccagttccatttcaccaacaaggacctggagtctctcaaaggcctctaccgcatcatgggcaacggcttcgcgggctgcgtgcacttcccccacacggcgccctgtgaggtgcgcgtgctcatgctcctgtactcgtccaagaagaagatcttcatgggcctcatcccctacgaccagagcggcttcgtcaacggcatccggcaggtcatcaccaaccacaagcaggtccagcagcagaagctggagcagcagcagcgaggaatggggggacagcaggcacccccagggctggggcccattctggaggaccaagccaggccctcacagaatctgctccagctccgcccaccgcagccccagcctcagggtaccgtaggggcctctggggccacggggcagccccagccccaaggtactgcccagcccccgccaggtgcccctcaaggccctcctggagcagcttctggcccaccccctcctggacccatccttcggccccagaaccctggggccaaccctcagctgcgaagcctcctcctcaacccaccaccgccgcagactggggtgcccccaccccaggcctccctccaccacctccagccaccaggggctcctgcgctgctgcctccgccgcaccagggcctggggcagccccagttggggcccccactcctgcatccaccacctgcccagtcctggcccgcacaacttccccctcgggctccactgccagcggcaaaacgaaagagagaaggagagggccgtgtgtttcgagaaaaatgggagcgagcctatttctttgtggaagtgaagagcatgcctatgtgtttaatatgcaaacaaatcgtgtctgtgttgaaagaatacaacctgaaacgccactatgaatcaaagcatagtaagagctacgaccagtacacagaacagactcgagatgccatcctcaacgaactgaaaaagggactcaaatgtcaatagggtttgttttgaaaagcgaattaacagaagtggcgcggcagtggtacgccgttccggaatcacgtgagaagaatgacctgggcattcagagctacagcagatggcaagtttataaaggagcagagtgacgtgtcctgcacagaaacacatgactgttgagaccgttatttaagtctaacgggcatttgcgttgcacagtgagttggagataactcgggggatttacaagtccagttgcttgaaagagtcaaattgattgtggccttttctttcgctgctcataaactattaccacccagttagctttatttatttgtggtgttaagaatcttgatgtgaccgaagaagtctgtggcatggtgccaaggcaggcccaacactgggaaaggactaattttttttgtatattgagagaaaagtttcacatagactggccagagttccgaagcacaactacagacagcgtcatgacagggggacttggcaggacaccttgatccaaggcgacagcattttggcaaggacacggaagttgggtcgttgcatccatcatcaggagttgacttgttctgagcaactgaacagaacacaccgcgatgctctcgacacttccgctcctggacttcagtcacgagtgagttgatggtgacttgacctgagagatttcacagaagctctgtgacttggttgtggaagaaatctgaactgttcaagttaaccaacttggttcattttaaatcaggcaaaagccacagtgggttcccctgagaaggttagtcaaagacttctggtcaaggttatgaccgttctgaacactgaatatttctccgcaaggatgttccacaaacagctacttgaatgtatgatggtgtatgcttggtcctggggaatccaccggcaaggaaaaaaaacctttactctttcctgtgctgcagtcggctttcagaaatgaaagaggtggcccggactgtattcacctacgtcctggggttgaagaccaaattcccccaaaggctctcggaatccagactcatgagaaggaacagacactgtccagtttgcctttgttggcagatgtttcttgtgtgaatgcagaccataaatagtaattgaactacagtgcaatacggcgctggttcctaaatacaagtctgtgtgaagatggtgagattctacaactatctccagtagttgtcctgaatatctgtgtttgggagtacccacgcttgtgaacagctgttttccgttacgaacctgaatcaaattaaacatcgttcccagttgaaggattcaaggctgaattctaaactgcccgtccccaccgtgccacccgaggcctgacactgacatctcggtgtggaagggaagacgccagccttttggcttcaactcaaaggcgcaaaaagaattatgaaagagaaaattttaataattaaatatttctatttttcaatttgtattttttcaattttgaatttaaaaatataaactccagtaacatccatgtttgtattatgttccatgcattcaccatagttgagtaaagatccgatttgatgataaaaagataaatagaatagctaccagggaggganngggnntccttgggttttt

SEQ ID NO: 300129 - DNA, 2942 bp, Homo sapiens
gcgcggtggcaggcacctgcagtcccagctactcgggaggctgaggcaggagaatggcgtgaacccaggaggcggagtttgcagtgagccgagatggcaccattgcactccagcccgggcgaaggagcaaaaactccgtctcaaaaaaaaaacaaagatcccgaacagtcagtctccaataagcttctggcctggagcggggtcctggagtggcaagagaaacccaaacctgcctcagtggatgccaacaccaagctgacgcggtcactgccctgccaggtctacgtgaatcatggcgagaacctgaagacggagcagtggccccagaagctgatcatgcagctcatcccccagcagctgctgaccaccctgggccctttgttccggaactcaaggatggtccagttccatttcaccaacaaggacctggagtctctcaaaggcctctaccgcatcatgggcaacggcttcgcgggctgcgtgcacttcccccacacggcgccctgtgaggtgcgcgtgctcatgctcctgtactcgtccaagaagaagatcttcatgggcctcatcccctacgaccagagcggcttcgtcaacggcatccggcaggtcatcaccaaccacaagcaggtccagcagcagaagctggagcagcagcagcgaggaatggggggacagcaggcacccccagggctggggcccattctggaggaccaagccaggccctcacagaatctgctccagctccgcccaccgcagccccagcctcagggtaccgtaggggcctctggggccacggggcagccccagccccaaggtactgcccagcccccgccaggtgcccctcaaggccctcctggagcagcttctggcccaccccctcctggacccatccttcggccccagaaccctggggccaaccctcagctgcgaagcctcctcctcaacccaccaccgccgcagactggggtgcccccaccccaggcctccctccaccacctccagccaccaggggctcctgcgctgctgcctccgccgcaccagggcctggggcagccccagttggggcccccactcctgcatccaccacctgcccagtcctggcccgcacaacttccccctcgggctccactgccagcggcaaaacgaaagagagaaggagagggccgtgtgtttcgagaaaaatgggagcgagcctatttctttgtggaagtgaagagcatgcctatgtgtttaatatgcaaacaaatcgtgtctgtgttgaaagaatacaacctgaaacgccactatgaatcaaagcatagtaagagctacgaccagtacacagaacagactcgagatgccatcctcaacgaactgaaaaagggactcaaatgtcaatagggtttgttttgaaaagcgaattaacagaagtggcgcggcagtggtacgccgttccggaatcacgtgagaagaatgacctgggcattcagagctacagcagatggcaagtttataaaggagcagagtgacgtgtcctgcacagaaacacatgactgttgagaccgttatttaagtctaacgggcatttgcgttgcacagtgagttggagataactcgggggatttacaagtccagttgcttgaaagagtcaaattgattgtggccttttctttcgctgctcataaactattaccacccagttagctttatttatttgtggtgttaagaatcttgatgtgaccgaagaagtctgtggcatggtgccaaggcaggcccaacactgggaaaggactaattttttttgtatattgagagaaaagtttcacatagactggccagagttccgaagcacaactacagacagcgtcatgacagggggacttggcaggacaccttgatccaaggcgacagcattttggcaaggacacggaagttgggtcgttgcatccatcatcaggagttgacttgttctgagcaactgaacagaacacaccgcgatgctctcgacacttccgctcctggacttcagtcacgagtgagttgatggtgacttgacctgagagatttcacagaagctctgtgacttggttgtggaagaaatctgaactgttcaagttaaccaacttggttcattttaaatcaggcaaaagccacagtgggttcccctgagaaggttagtcaaagacttctggtcaaggttatgaccgttctgaacactgaatatttctccgcaaggatgttccacaaacagctacttgaatgtatgatggtgtatgcttggtcctggggaatccaccggcaaggaaaaaaaacctttactctttcctgtgctgcagtcggctttcagaaatgaaagaggtggcccggactgtattcacctacgtcctggggttgaagaccaaattcccccaaaggctctcggaatccagactcatgagaaggaacagacactgtccagtttgcctttgttggcagatgtttcttgtgtgaatgcagaccataaatagtaattgaactacagtgcaatacggcgctggttcctaaatacaagtctgtgtgaagatggtgagattctacaactatctccagtagttgtcctgaatatctgtgtttgggagtacccacgcttgtgaacagctgttttccgttacgaacctgaatcaaattaaacatcgttcccagttgaaggattcaaggctgaattctaaactgcccgtccccaccgtgccacccgaggcctgacactgacatctcggtgtggaagggaagacgccagccttttggcttcaactcaaaggcgcaaaaagaattatgaaagagaaaattttaataattaaatatttctatttttcaatttgtattttttcaattttgaatttaaaaatataaactccagtaacatccatgtttgtattatgttccatgcattcaccatagttgagtaaagatccgatttgatgata

SEQ ID NO: 300130 - DNA, 3205 bp, Homo sapiens
ggaacaaaagctggtactgggccgcccctcgaaggctcaggcccttacgggggatccacttctccattgtgtctccccggaagctgcctgcgcttcggcttctgtttgagaaggcagcccccccggccttgctggagccgctgcagcctccgacagatgtgagccaggacccgaggcacatggtgctggttcggggactcgtgctgcctgttgggggtggctcagccccaggccccctccagtcaaagcagccagtccccctgcctcccgccgcaccctcaggtgccactctctcagcagccccccagcagcctctgccccccgtccccccgcagtaccaggttcccgggaacctgagtgcagctcaggtggccgcgcagaatgcagtggaggctgccaagaaccagaaggctgggctgggccctcgcttctcgcccatcacccctctccaacaagctgctcccggagtgggtccccccttcagccaggccccagctccccaactacccccaggaccccctggcgcccccaagccaccacctgcttcccagcccagtctggtctccactgtggcccctggctccggcctggctcccacggcacagcccggggcaccgtccatggcaggcactgtggccccaggaggggtgagcggcccttccccagcccagctgggagccccagccctcggtgggcagcagtcagtctccaataagcttctggcctggagcggggtcctggagtggcaagagaaacccaaacctgcctcagtggatgccaacaccaagctgacgcggtcactgccctgccaggtctacgtgaatcatggcgagaacctgaagacggagcagtggccccagaagctgatcatgcagctcatcccccagcagctgctgaccaccctgggccctttgttccggaactcaaggatggtccagttccatttcaccaacaaggacctggagtctctcaaaggcctctaccgcatcatgggcaacggcttcgcgggctgcgtgcacttcccccacacggcgccctgtgaggtgcgcgtgctcatgctcctgtactcgtccaagaagaagatcttcatgggcctcatcccctacgaccagagcggcttcgtcaacggcatccggcaggtcatcaccaaccacaagcaggtccagcagcagaagctggagcagcagcagcgaggaatggggggacagcaggcacccccagggctggggcccattctggaggaccaagccaggccctcacagaatctgctccagctccgcccaccgcagccccagcctcagggtaccgtaggggcctctggggccacggggcagccccagccccaaggtactgcccagcccccgccaggtgcccctcaaggccctcctggagcagcttctggcccaccccctcctggacccatccttcggccccagaaccctggggccaaccctcagctgcgaagcctcctcctcaacccaccaccgccgcagactggggtgcccccaccccaggcctccctccaccacctccagccaccaggggctcctgcgctgctgcctccgccgcaccagggcctggggcagccccagttggggcccccactcctgcatccaccacctgcccagtcctggcccgcacaacttccccctcgggctccactgccagcggcaaaacgaaagagagaaggagagggccgtgtgtttcgagaaaaatgggagcgagcctatttctttgtggaagtgaagagcatgcctatgtgtttaatatgcaaacaaatcgtgtctgtgttgaaagaatacaacctgaaacgccactatgaatcaaagcatagtaagagctacgaccagtacacagaacagactcgagatgccatcctcaacgaactgaaaaagggactcaaatgtcaatagggtttgttttgaaaagcgaattaacagaagtggcgcggcagtggtacgccgttccggaatcacgtgagaagaatgacctgggcattcagagctacagcagatggcaagtttataaaggagcagagtgacgtgtcctgcacagaaacacatgactgttgagaccgttatttaagtctaacgggcatttgcgttgcacagtgagttggagataactcgggggatttacaagtccagttgcttgaaagagtcaaattgattgtggccttttctttcgctgctcataaactattaccacccagttagctttatttatttgtggtgttaagaatcttgatgtgaccgaagaagtctgtggcatggtgccaaggcaggcccaacactgggaaaggactaattttttttgtatattgagagaaaagtttcacatagactggccagagttccgaagcacaactacagacagcgtcatgacagggggacttggcaggacaccttgatccaaggcgacagcattttggcaaggacacggaagttgggtcgttgcatccatcatcaggagttgacttgttctgagcaactgaacagaacacaccgcgatgctctcgacacttccgctcctggacttcagtcacgagtgagttgatggtgacttgacctgagagatttcacagaagctctgtgacttggttgtggaagaaatctgaactgttcaagttaaccaacttggttcattttaaatcaggcaaaagccacagtgggttcccctgagaaggttagtcaaagacttctggtcaaggttatgaccgttctgaacactgaatatttctccgcaaggatgttccacaaacagctacttgaatgtatgatggtgtatgcttggtcctggggaatccaccggcaaggaaaaaaaacctttactctttcctgtgctgcagtcggctttcagaaatgaaagaggtggcccggactgtattcacctacgtcctggggttgaagaccaaattcccccaaaggctctcggaatccagactcatgagaaggaacagacactgtccagtttgcctttgttggcagatgtttcttgtgtgaatgcagaccataaatagtaattgaactacagtgcaatacggcgctggttcctaaatacaagtctgtgtgaagatggtgagattctacaactatctccagtagttgtcctgaatatctgtgtttgggagtacccacgcttgtgaacagctgttttccgttacgaacctggtctgtattaactgcttggggatcctcagatcatc

SEQ ID NO: 300131 - DNA, 1870 bp, Homo sapiens
ttgttctgtggtagcattcagaggaaagtgaaatctttcttgtacccatgtctctatcacaagcggcaaaacgaaagagagaaggagagggccgtgtgtttcgagaaaaatgggagcgagcctatttctttgtggaagtgaagagcatgcctatgtgtttaatatgcaaacaaatcgtgtctgtgttgaaagaatacaacctgaaacgccactatgaatcaaagcatagtaagagctacgaccagtacacagaacagactcgagatgccatcctcaacgaactgaaaaagggactcaaatgtcaatagggtttgttttgaaaagcgaattaacagaagtggcgcggcagtggtacgccgttccggaatcacgtgagaagaatgacctgggcattcagagctacagcagatggcaagtttataaaggagcagagtgacgtgtcctgcacagaaacacatgactgttgagaccgttatttaagtctaacgggcatttgcgttgcacagtgagttggagataactcgggggatttacaagtccagttgcttgaaagagtcaaattgattgtggccttttctttcgctgctcataaactattaccacccagttagctttatttatttgtggtgttaagaatcttgatgtgaccgaagaagtctgtggcatggtgccaaggcaggcccaacactgggaaaggactaattttttttgtatattgagagaaaagtttcacatagactggccagagttccgaagcacaactacagacagcgtcatgacagggggacttggcaggacaccttgatccaaggcgacagcattttggcaaggacacggaagttgggtcgttgcatccatcatcaggagttgacttgttctgagcaactgaacagaacacaccgcgatgctctcgacacttccgctcctggacttcagtcacgagtgagttgatggtgacttgacctgagagatttcacagaagctctgtgacttggttgtggaagaaatctgaactgttcaagttaaccaacttggttcattttaaatcaggcaaaagccacagtgggttcccctgagaaggttagtcaaagacttctggtcaaggttatgaccgttctgaacactgaatatttctccgcaaggatgttccacaaacagctacttgaatgtatgatggtgtatgcttggtcctggggaatccaccggcaaggaaaaaaaacctttactctttcctgtgctgcagtcggctttcagaaatgaaagaggtggcccggactgtattcacctacgtcctggggttgaagaccaaattcccccaaaggctctcggaatccagactcatgagaaggaacagacactgtccagtttgcctttgttggcagatgtttcttgtgtgaatgcagaccataaatagtaattgaactacagtgcaatacggcgctggttcctaaatacaagtctgtgtgaagatggtgagattctacaactatctccagtagttgtcctgaatatctgtgtttgggagtacccacgcttgtgaacagctgttttccgttacgaacctgaatcaaattaaacatcgttcccagttgaaggattcaaggctgaattctaaactgcccgtccccaccgtgccacccgaggcctgacactgacatctcggtgtggaagggaagacgccagccttttggcttcaactcaaaggcgcaaaaagaattatgaaagagaaaattttaataattaaatatttctatttttcaatttgtattttttcaattttgaatttaaaaatataaactccagtaacatccatgtttgtattatgttccatgcattcaccatagttgagtaaagatccgatttgatgata

SEQ ID NO: 300132 - DNA, 2677 bp, Homo sapiens
ggaacaaaagctggtactgggccgcccctcgaaggctcaggcccttacgggggatccacttctccattgtgtctccccggaagctgcctgcgcttcggcttctgtttgagaaggcagcccccccggccttgctggagccgctgcagcctccgacagatgtgagccaggacccgaggcacatggtgctggttcggggactcgtgctgcctgttgggggtggctcagccccaggccccctccagtcaaagcagccagtccccctgcctcccgccgcaccctcaggtgccactctctcagcagccccccagcagcctctgccccccgtccccccgcagtaccaggttcccgggaacctgagtgcagctcaggtggccgcgcagaatgcagtggaggctgccaagaaccagaaggctgggctgggccctcgcttctcgcccatcacccctctccaacaagctgctcccggagtgggtccccccttcagccaggccccagctccccaactacccccaggaccccctggcgcccccaagccaccacctgcttcccagcccagtctggtctccactgtggcccctggctccggcctggctcccacggcacagcccggggcaccgtccatggcaggcactgtggccccaggaggggtgagcggcccttccccagcccagctgggagccccagccctcggtgggcagcagtcagtctccaataagcttctggcctggagcggggtcctggagtggcaagagaaacccaaacctgcctcagtggatgccaacaccaagctgacgcggtcactgccctgccaggtctacgtgaatcatggcgagaacctgaagacggagcagtggccccagaagctgatcatgcagctcatcccccagcagctgctgaccaccctgggccctttgttccggaactcaaggatggtccagttccatttcaccaacaaggacctggagtctctcaaaggcctctaccgcatcatgggcaacggcttcgcgggctgcgtgcacttcccccacacggcgccctgtgaggtgcgcgtgctcatgctcctgtactcgtccaagaagaagatcttcatgggcctcatcccctacgaccagagcggcttcgtcaacggcatccggcaggtcatcaccaaccacaagcaggtccagcagcagaagctggagcagcagcagcgaggaatggggggacagcaggcacccccagggctggggcccattctggaggaccaagccaggccctcacagaatctgctccagctccgcccaccgcagccccagcctcagggtaccgtaggggcctctggggccacggggcagccccagccccaaggtactgcccagcccccgccaggtgcccctcaaggccctcctggagcagcttctggcccaccccctcctggacccatccttcggccccagaaccctggggccaaccctcagctgcgaagcctcctcctcaacccaccaccgccgcagactggggtgcccccaccccaggcctccctccaccacctccagccaccaggggctcctgcgctgctgcctccgccgcaccagggcctggggcagccccagttggggcccccactcctgcatccaccacctgcccagtcctggcccgcacaacttccccctcgggctccactgccagcggcaaaacgaaagagagaaggagagggccgtgtgtttcgagaaaaatgggagcgagcctatttctttgtggaagtgaagagcatgcctatgtgtttaatatgcaaacaaatcgtgtctgtgttgaaagaatacaacctgaaacgccactatgaatcaaagcatagtaagagctacgaccagtacacagaacagactcgagatgccatcctcaacgaactgaaaaagggactcaaatgtcaatagggtttgttttgaaaagcgaattaacagaagtggcgcggcagtggtacgccgttccggaatcacgtgagaagaatgacctgggcattcagagctacagcagatggcaagtttataaaggagcagagtgacgtgtcctgcacagaaacacatgactgttgagaccgttatttaagtctaacgggcatttgcgttgcacagtgagttggagataactcgggggatttacaagtccagttgcttgaaagagtcaaattgattgtggccttttctttcgctgctcataaactattaccacccagttagctttatttatttgtggtgttaagaatcttgatgtgaccgaagaagtctgtggcatggtgccaaggcaggcccaacactgggaaaggactaattttttttgtatattgagagaaaagtttcacatagactggccagagttcccctgagaaggttagtcaaagacttctggtcaaggttatgaccgttctgaacactgaatatttctccgcaaggatgtccaccgtgccacccgaggcctgacactgacatctcggtgtggaagggaagacgccagccttttggcttcaactcaaaggcgcaaaaagaattatgaaagagaaaattttaataattaaatatttctatttttcaatttgtattttttcaattttgaatttaaaaatataaactccagtaacatccatgtttgtattatgttccatgcattcaccatagttgagtaaagatccgatttgatgata

SEQ ID NO: 300133 - DNA, 2251 bp, Homo sapiens
ggaacaaaagctggtactgggccgcccctcgaaggctcaggcccttacgggggatccacttctccattgtgtctccccggaagctgcctgcgcttcggcttctgtttgagaaggcagcccccccggccttgctggagccgctgcagcctccgacagatgtgagccaggacccgaggcacatggtgctggttcggggactcgtgctgcctgttgggggtggctcagccccaggccccctccagtcaaagcagccagtccccctgcctcccgccgcaccctcaggtgccactctctcagcagccccccagcagcctctgccccccgtccccccgcagtaccaggttcccgggaacctgagtgcagctcaggtggccgcgcagaatgcagtggaggctgccaagaaccagaaggctgggctgggccctcgcttctcgcccatcacccctctccaacaagctgctcccggagtgggtccccccttcagccaggccccagctccccaactacccccaggaccccctggcgcccccaagccaccacctgcttcccagcccagtctggtctccactgtggcccctggctccggcctggctcccacggcacagcccggggcaccgtccatggcaggcactgtggccccaggaggggtgagcggcccttccccagcccagctgggagccccagccctcggtgggcagcagtcagtctccaataagcttctggcctggagcggggtcctggagtggcaagagaaacccaaacctgcctcagtggatgccaacaccaagctgacgcggtcactgccctgccaggtctacgtgaatcatggcgagaacctgaagacggagcagtggccccagaagctgatcatgcagctcatcccccagcagctgctgaccaccctgggccctttgttccggaactcaaggatggtccagttccatttcaccaacaaggacctggagtctctcaaaggcctctaccgcatcatgggcaacggcttcgcgggctgcgtgcacttcccccacacggcgccctgtgaggtgcgcgtgctcatgctcctgtactcgtccaagaagaagatcttcatgggcctcatcccctacgaccagagcggcttcgtcaacggcatccggcaggtcatcaccaaccacaagcaggtccagcagcagaagctggagcagcagcagcgaggaatggggggacagcaggcacccccagggctggggcccattctggaggaccaagccaggccctcacagaatctgctccagctccgcccaccgcagccccagcctcagggtaccgtaggggcctctggggccacggggcagccccagccccaaggtactgcccagcccccgccaggtgcccctcaaggccctcctggagcagcttctggcccaccccctcctggacccatccttcggccccagaaccctggggccaaccctcagctgcgaagcctcctcctcaacccaccaccgccgcagactggggtgcccccaccccaggcctccctccaccacctccagccaccaggggctcctgcgctgctgcctccgccgcaccagggcctggggcagccccagttggggcccccactcctgcatccaccacctgcccagtcctggcccgcacaacttccccctcgggctccactgccagcggcaaaacgaaagagagaaggagagggccgtgtgtttcgagaaaaatgggagcgagcctatttctttgtggaagtgaagagcatgcctatgtgtttaatatgcaaacaaatcgtgtctgtgttgaaagaatacaacctgaaacgccactatgaatcaaagcatagtaagagctacgaccagtacacagaacagactcgagatgccatcctcaacgaactgaaaaagggactcaaatgtcaatagggtttgttttgaaaagcgaattaacagaagtggcgcggcagtggtacgccgttccggaatcacgtgagaagaatgacctgggcattcagagctacagcagatggcaagtttataaaggagcagagtgacgtgtcctgcacagaaacacatgactgttgagaccgttatttaagtctaacgggcatttgcgttgcacagtgagttggagataactcgggggatttacaagtccagttgcttgaaagagtcaaattgattgtggccttttctttcgctgctcataaactattaccacccagttagctttatttatttgtgtgagctgtgcggtccgccac

SEQ ID NO: 300134 - DNA, 2556 bp, Homo sapiens
ggctgactgagccgctttcaatttatttagcttttgacaataattccgtctaacccatcaggcccctagaagggctaactatgccctttctgagtcttccacgcggtgggggcgaaggaggatggagctagaacgaagcctcagcgcgtgccccgcacaaacatggcagcattcccagcagccctaaaccgcccgacgggagcgcgcgcgcggcgcaggcgcatttctgctcattccgcggcgtcggctgcggctgcagtggtggtggcgggtaccgcacggggtatggtccccgggtccgagggcccggcccgcgccgggagcgtggtggccgacgtggtgtttgtgattgagggtacggccaacctgggaccctacttcgaggggctccgcaagcactacctgctcccggccatcgagtattttaatggtggtcctcctgctgagacggacttcgggggagactatggggggacccagtacagcctcgtggtgttcaacacagtggactgcgctcccgagtcctacgtacaatgtcacgctcccaccagcagcgcctatgagtttgtcacctggctcgatggcattaagttcatgggcgggggtggtgagagctgcagcctcatcgcggaaggactcagcacagccttgcagctgtttgatgacttcaagaagatgcgcgagcagattggccagacgcaccgggtctgcctcctcatctgcaactcacccccatacttgttgcctgctgttgagagcaccacgtactctggatgcacaactgagaatcttgtgcagcagattggggagcgggggatccacttctccattgtgtctccccggaagctgcctgcgcttcggcttctgtttgagaaggcagcccccccggccttgctggagccgctgcagcctccgacagatgtgagccaggacccgaggcacatggtgctggttcggggactcgtgctgcctgttgggggtggctcagccccaggccccctccagtcaaagcagccagtccccctgcctcccgccgcaccctcaggtgccactctctcagcagccccccagcagcctctgccccccgtccccccgcagtaccaggttcccgggaacctgagtgcagctcaggtggccgcgcagaatgcagtggaggctgccaagaaccagaaggctgggctgggccctcgcttctcgcccatcacccctctccaacaagctgctcccggagtgggtccccccttcagccaggccccagctccccaactacccccaggaccccctggcgcccccaagccaccacctgcttcccagcccagtctggtctccactgtggcccctggctccggcctggctcccacggcacagcccggggcaccgtccatggcaggcactgtggccccaggaggggtgagcggcccttccccagcccagctgggagccccagccctcggtgggcagcagtcagtctccaataagcttctggcctggagcggggtcctggagtggcaagagaaacccaaacctgcctcagtggatgccaacaccaagctgacgcggtcactgccctgccaggtctacgtgaatcatggcgagaacctgaagacggagcagtggccccagaagctgatcatgcagctcatcccccagcagctgctgaccaccctgggccctttgttccggaactcaaggatggtccagttccatttcaccaacaaggacctggagtctctcaaaggcctctaccgcatcatgggcaacggcttcgcgggctgcgtgcacttcccccacacggcgccctgtgaggtgcgcgtgctcatgctcctgtactcgtccaagaagaagatcttcatgggcctcatcccctacgaccagagcggcttcgtcaacggcatccggcaggtcatcaccaaccacaagcaggtccagcagcagaagctggagcagcagcagcgaggaatggggggacagcaggcacccccagggctggggcccattctggaggaccaagccaggccctcacagaatctgctccagctccgcccaccgcagccccagcctcagggtaccgtaggggcctctggggccacggggcagccccagccccaaggtactgcccagcccccgccaggtgcccctcaaggccctcctggagcagcttctggcccaccccctcctggacccatccttcggccccagaaccctggggccaaccctcagctgcgaagcctcctcctcaacccaccaccgccgcagactggggtgcccccaccccaggcctccctccaccacctccagccaccaggggctcctgcgctgctgcctccgccgcaccagggcctggggcagccccagttggggcccccactcctgcatccaccacctgcccagtcctggcccgcacaacttccccctcgggctccactgccaggtcagatgctgctgagcgggggtccccggggcccggtcccccagccgggcctgcagcccagcgtcatggaggacgacatcctcatggatctcatctgaatccccaacacccaataaagttccttt

SEQ ID NO: 300135 - DNA, 2995 bp, Homo sapiens
ggctgactgagccgctttcaatttatttagcttttgacaataattccgtctaacccatcaggcccctagaagggctaactatgccctttctgagtcttccacgcggtgggggcgaaggaggatggagctagaacgaagcctcagcgcgtgccccgcacaaacatggcagcattcccagcagccctaaaccgcccgacgggagcgcgcgcgcggcgcaggcgcatttctgctcattccgcggcgtcggctgcggctgcagtggtggtggcgggtaccgcacggggtatggtccccgggtccgagggcccggcccgcgccgggagcgtggtggccgacgtggtgtttgtgattgagggtacggccaacctgggaccctacttcgaggggctccgcaagcactacctgctcccggccatcgagtattttaatggtggtcctcctgctgagacggacttcgggggagactatggggggacccagtacagcctcgtggtgttcaacacagtggactgcgctcccgagtcctacgtacaatgtcacgctcccaccagcagcgcctatgagtttgtcacctggctcgatggcattaagttcatgggcgggggtggtgagagctgcagcctcatcgcggaaggactcagcacagccttgcagctgtttgatgacttcaagaagatgcgcgagcagattggccagacgcaccgggtctgcctcctcatctgcaactcacccccatacttgttgcctgctgttgagagcaccacgtactctggatgcacaactgagaatcttgtgcagcagattggggagcgggggatccacttctccattgtgtctccccggaagctgcctgcgcttcggcttctgtttgagaaggcagcccccccggccttgctggagccgctgcagcctccgacagatgtgagccaggacccgaggcacatggtgctggttcggggactcgtgctgcctgttgggggtggctcagccccaggccccctccagtcaaagcagccagtccccctgcctcccgccgcaccctcaggtgccactctctcagcagccccccagcagcctctgccccccgtccccccgcagtaccaggttcccgggaacctgagtgcagctcaggtggccgcgcagaatgcagtggaggctgccaagaaccagaaggctgggctgggccctcgcttctcgcccatcacccctctccaacaagctgctcccggagtgggtccccccttcagccaggccccagctccccaactacccccaggaccccctggcgcccccaagccaccacctgcttcccagcccagtctggtctccactgtggcccctggctccggcctggctcccacggcacagcccggggcaccgtccatggcaggcactgtggccccaggaggggtgagcggcccttccccagcccagctgggagccccagccctcggtgggcagcagtcagtctccaataagcttctggcctggagcggggtcctggagtggcaagagaaacccaaacctgcctcagtggatgccaacaccaagctgacgcggtcactgccctgccaggtctacgtgaatcatggcgagaacctgaagacggagcagtggccccagaagctgatcatgcagctcatcccccagcagctgctgaccaccctgggccctttgttccggaactcaaggatggtccagttccatttcaccaacaaggacctggagtctctcaaaggcctctaccgcatcatgggcaacggcttcgcgggctgcgtgcacttcccccacacggcgccctgtgaggtgcgcgtgctcatgctcctgtactcgtccaagaagaagatcttcatgggcctcatcccctacgaccagagcggcttcgtcaacggcatccggcaggtcatcaccaaccacaagcaggtccagcagcagaagctggagcagcagcagcgaggaatggggggacagcaggcacccccagggctggggcccattctggaggaccaagccaggccctcacagaatctgctccagctccgcccaccgcagccccagcctcagggtaccgtaggggcctctggggccacggggcagccccagccccaaggtactgcccagcccccgccaggtgcccctcaaggccctcctggagcagcttctggcccaccccctcctggacccatccttcggccccagaaccctggggccaaccctcagctgcgaagcctcctcctcaacccaccaccgccgcagactggggtgcccccaccccaggcctccctccaccacctccagccaccaggggctcctgcgctgctgcctccgccgcaccagggcctggggcagccccagttggggcccccactcctgcatccaccacctgcccagtcctggcccgcacaacttccccctcgggctccactgccaggtaaggggacccgggggagggcagaggtctggactgagtgtcccagcagctcctgggctagagcaccaagaccaagtgctcctgggaagtaaagacataggatccaagaatgagggttcccccaggcctttgcggagctctgagggctccgggaaagtacagcccatgggtccaaggacctagtgggttaagagcgtttcccatgatcctcctgtgtgtgctcctgggattgctgggaaatgtggtcttagggccagagaagtagttttggagaagggcccccaaaggctcatgggaaacagcatatttgtaactagatggggccagaaggtgcttctgttgggtcccccaagggctgcctagaaaacttagtgcctctgggccctcctgggcccaagggcctactgggagatgcagtcccttccccactgcccctcaggtcagatgctgctgagcgggggtccccggggcccggtcccccagccgggcctgcagcccagcgtcatggaggacgacatcctcatggatctcatctgaatccccaacacccaataaagttccttt

SEQ ID NO: 300136 - DNA, 1092 bp, Homo sapiens
ggctgactgagccgctttcaatttatttagcttttgacaataattccgtctaacccatcaggcccctagaagggctaactatgccctttctgagtcttccacgcggtgggggcgaaggaggatggagctagaacgaagcctcagcgcgtgccccgcacaaacatggcagcattcccagcagccctaaaccgcccgacgggagcgcgcgcgcggcgcaggcgcatttctgctcattccgcggcgtcggctgcggctgcagtggtggtggcgggtaccgcacggggtatggtccccgggtccgagggcccggcccgcgccgggagcgtggtggccgacgtggtgtttgtgattgagggtacggccaacctgggaccctacttcgaggggctccgcaagcactacctgctcccggccatcgagtattttaatggtggtcctcctgctgagacggacttcgggggagactatggggggacccagtacagcctcgtggtgttcaacacagtggactgcgctcccgagtcctacgtacaatgtcacgctcccaccagcagcgcctatgagtttgtcacctggctcgatggcattaagttcatgggcgggggtggtgagagctgcagcctcatcgcggaaggactcagcacagccttgcagctgtttgatgacttcaagaagatgcgcgagcagattggccagacgcaccgggtctgcctcctcatctgcaactcacccccatacttgttgcctgctgttgagagcaccacgtactctggatgcacaactgagaatcttgtgcagcagattggggagcgggggatccacttctccattgtgtctccccggaagctgcctgcgcttcggcttctgtttgagaaggcagcccccccggccttgctggagccgctgcagcctccgacagatgtgagccaggacccgaggcacatggtgctggttcggggactcgtgctgcctgttgggggtggctcagccccaggccccctccagtcaaagcagccagtccccctgcctcccgccgcaccctcaggtgccactctctcagcagctcgcacataagttggggggcctctagag

SEQ ID NO: 300137 - DNA, 1019 bp, Homo sapiens
ggctgactgagccgctttcaatttatttagcttttgacaataattccgtctaacccatcaggcccctagaagggctaactatgccctttctgagtcttccacgcggtgggggcgaaggaggatggagctagaacgaagcctcagcgcgtgccccgcacaaacatggcagcattcccagcagccctaaaccgcccgacgggagcgcgcgcgcggcgcaggcgcatttctgctcattccgcggcgtcggctgcggctgcagtggtggtggcgggtaccgcacggggtatggtccccgggtccgagggcccggcccgcgccgggagcgtggtggccgacgtggtgtttgtgattgagggtacggccaacctgggaccctacttcgaggggctccgcaagcactacctgctcccggccatcgagtattttaatggtggtcctcctgctgagacggacttcgggggagactatggggggacccagtacagcctcgtggtgttcaacacagtggactgcgctcccgagtcctacgtacaatgtcacgctcccaccagcagcgcctatgagtttgtcacctggctcgatggcattaagtgagctttcccccacttggggtgggttgctggtccctgtgaggggccgtgaatgagtgatggcttggggtggttggtgtccccgtgagaggctgtgaataagtgatggcttggggtggttggtgtccccgtgaggggctgtgaataagtaatggcttggggtggttggggtacctgcgaggggccgtgaatgagcgatggcttgggtttgagctgcaggaaacatctcatacattaagggattgaaaggactttgagggtgattgtgtttttgtcagaagtcacttttgtggtggcttctgtgtgctcagcaatgttgccatcagtttagaagtaggaaaaaccttcccattcagggaggcctggctgagctccagcagccaccttgtactccctgtgtgattgtcccctttctgtcctctctttttc

SEQ ID NO: 300138 - DNA, 205 bp, Homo sapiens
ctgagggagaaggggctggggccgagattgctgggtctgaggaaggaggaagctgaggagttcctggttctggaggaacgggaagctgggagccctgattccttctctaagggaaaagggaattgaggtcccagattaaaagttttctgtcctcccctcccagtatggggggacccagtacagcctcgtggtgttcaacacagtg

SEQ ID NO: 300139 - DNA, 148 bp, Homo sapiens
aaccctggggccaaccctcagctgcgaagcctcctcctcaacccaccaccggtgagatgttggggtggggtagcgagagttccagatcctggccctggtggttctggtcctgttgtctgggaggagggaggttgactgtggtcagtgg

SEQ ID NO: 300140 - DNA, 409 bp, Homo sapiens
cccaggatagagtgggggacagcatgggagcaggctcttcaagcatagcctggggatggggatgatggcaaccctgggggctgaccgctctgcccctgcaggttcatgggcgggggtggtgagagctgcagcctcatcgcggaaggactcagcacagccttgcagctgtttgatgacttcaagaagatgcgcgagcagatgtgagtgccccctccacccaggccgggccggtctctctctgcctggcctggaaccactttgcctgtcgagtggttctacctccagcctcaccctgtagggcatgggctctgtgtccccaagcacgctgagccaggaggctgcaggtgtgtccttgggggacgcctggccagtgcccggtctcagcatccccatcaggaagcagtgccaa

SEQ ID NO: 300141 - DNA, 412 bp, Homo sapiens
tctggccgtcgacttttcttatacctggctagttcactcatttatgtgacccgcctggcccctgtaggcatgtgagtttccgatccctgccctggaactgttggatccagtcgggggagggcgggggtctgggagtcgtgtgagcaagctctctaggcgatcctcaggaatgtgagtgtggagcaggaggcactggtgacagcgaagaagtgcaagtgggtgatttcccaggcagcctgtgtagcaggggtttttgaaaactcagatggcttcagggaccaggcaggtgatgaaaatgtgtgaagcggacgggtgtaagacaacagggaatgatggggactgtggcgaacttggagagtgcttgccccgcctaatggcattcaaattgaaaacaaaaacactgtgaggacca

SEQ ID NO: 300142 - DNA, 297 bp, Homo sapiens
tcaaattaaacatcgttcccagttgaaggattcaaggctgaattctaaactgcccgtccccaccgtgccacccgaggcctgacactgacatctcggtgtggaagggaagacgccagccttttggcttcaactcaaaggcgcaaaaagaattatgaaagagaaaattttaataattaaatatttctatttttcaatttgtattttttcaattttgaatttaaaaatataaactccagtaacatccatgtttgtattatgttccatgcattcaccatagttgagtaaagatccgatttg

SEQ ID NO: 300143 - DNA, 1299 bp, Homo sapiens
  misc_feature (47)..(47): n is a, c, g, or t
gggtcctgggcttgagagtctcgggcggggagtggagccacggtccncgccctgcagctcgccccgccctgctaatgggaccggccagcccgggaggcccctgacccttggggaagcccgctgggcgatggggaccctcgcctcccgccaagtgagctgtgaaccacgtcctgcgcaacctctcgctctccaaaactgtttgtaatatttaaacgatatttggcttaggagaatttcataaagttagccagatctcgggtctcaatttagactcggggtgctggggggcatagcatccctggagtacattggacagcaaaagtccaatcgttgcctgccgagtggacctgcagtgcttaaaccccgtcacccggctggcggggtcccaggccctggggtttctttcgcccgggagtccacgccctgatgctggggtggcccggtccccccgcgggtggctgggggcctggggctgcctcacacgacggtcccagcagggaatctctcgccgtcccgaccttcccggcccttggggagtcgcccggcaggttccggacccacccgcagaggaacccggcccacgcgcggcgcctttaaggcccctccgctcgctccccagtcacgtgacctggccgtcgcttggcaacaggacgccgccgagtcccgcttctcctccaggcacaatggctgaggaatgccccagagcgtgcgcggagcctgtggcgcccaaggccacggccccgccggagaggaccagcgactactaccgcgtgagcgcggacctgccgggcaggttcaacaacccggggtggttccggggctacaggacccagaaggctgtctccgtgtacaggaccagtaaccaggcttacgggagcagagcccccaccgtgcacgagatgccttgcagcgggtggaatgttccggaacaatactctcaatgtttacctggagaaaagcatcgtgactggccccgataactgcatcacctcctgtgaccggctcaacttccaccccagttacaacatcaacaggccatccatctgcgattgaggggctggaaactccctctaggagtcctctgaccccagggcctcctggaaaatcatcatccctcatcacccacagtcgcccgattgtgacggcacagactgcgctgccttccctgaaaatattattcgtctgcggagtaggaaaatatgcaaacggggccgtgaagtcctgccatttcacatctaataagtacatgggaaagatgctaatggttgactttgcattaaaaacgttgtcacatcctga

SEQ ID NO: 300144 - DNA, 598 bp, Homo sapiens
ggaagtggggataagggcagtggggggcagggccgtggggggagaaagcccagttgtggtctcagctccactgatttgtgtcgggacccagaaggctgtctccgtgtacaggaccagtaaccaggcttacgggagcagagcccccaccgtgcacgagatgcctaaagtattttatccaaattcgaataaattttcccaacaacttgcagcgggtggaatgttccggaacaatactctcaatgtttacctggagaaaagcatcgtgactggccccgataactgcatcacctcctgtgaccggctcaacttccaccccagttacaacatcaacaggccatccatctgcgattgaggggctggaaactccctctaggagtcctctgaccccagggcctcctggaaaatcatcatccctcatcacccacagtcgcccgattgtgacggcacagactgcgctgccttccctgaaaatattattcgtctgcggagtaggaaaatatgcaaacggggccgtgaagtcctgccatttcacatctaataagtacatgggaaagatgctaatggttgactttgcattaaaaacgttgtcacatcctga

SEQ ID NO: 300145 - DNA, 1340 bp, Homo sapiens
  misc_feature (47)..(47): n is a, c, g, or t
gggtcctgggcttgagagtctcgggcggggagtggagccacggtccncgccctgcagctcgccccgccctgctaatgggaccggccagcccgggaggcccctgacccttggggaagcccgctgggcgatggggaccctcgcctcccgccaagtgagctgtgaaccacgtcctgcgcaacctctcgctctccaaaactgtttgtaatatttaaacgatatttggcttaggagaatttcataaagttagccagatctcgggtctcaatttagactcggggtgctggggggcatagcatccctggagtacattggacagcaaaagtccaatcgttgcctgccgagtggacctgcagtgcttaaaccccgtcacccggctggcggggtcccaggccctggggtttctttcgcccgggagtccacgccctgatgctggggtggcccggtccccccgcgggtggctgggggcctggggctgcctcacacgacggtcccagcagggaatctctcgccgtcccgaccttcccggcccttggggagtcgcccggcaggttccggacccacccgcagaggaacccggcccacgcgcggcgcctttaaggcccctccgctcgctccccagtcacgtgacctggccgtcgcttggcaacaggacgccgccgagtcccgcttctcctccaggcacaatggctgaggaatgccccagagcgtgcgcggagcctgtggcgcccaaggccacggccccgccggagaggaccagcgactactaccgcgtgagcgcggacctgccgggcaggttcaacaacccggggtggttccggggctacaggacccagaaggctgtctccgtgtacaggaccagtaaccaggcttacgggagcagagcccccaccgtgcacgagatgcctaaagtattttatccaaattcgaataaattttcccaacaacttgcagcgggtggaatgttccggaacaatactctcaatgtttacctggagaaaagcatcgtgactggccccgataactgcatcacctcctgtgaccggctcaacttccaccccagttacaacatcaacaggccatccatctgcgattgaggggctggaaactccctctaggagtcctctgaccccagggcctcctggaaaatcatcatccctcatcacccacagtcgcccgattgtgacggcacagactgcgctgccttccctgaaaatattattcgtctgcggagtaggaaaatatgcaaacggggccgtgaagtcctgccatttcacatctaataagtacatgggaaagatgctaatggttgactttgcattaaaaacgttgtcacatcctga

SEQ ID NO: 300146 - DNA, 872 bp, Homo sapiens
ggtctggaggccaagcctccgctcctgacaagctaggttacccagaaattgcagcatgtgccgaggccctgccagggctggggatcagcacttgctggctgcctgctctttagggctttggcctgccttggaagagcagggacagtggcaagcagagggggccggggaggccgggccattcagaacggtcatcagccaggtactcccagaggctgccttcgaggccacatcaccagcccgggcatattgctctttccatgggggcatttccaggggagtgccgtcaaccaaatacaaggctgtggcttgtgcagaattagagtaaatgaatgaaaatagagtgtttctcatctaccaggacccagaaggctgtctccgtgtacaggaccagtaaccaggcttacgggagcagagcccccaccgtgcacgagatgcctaaagtattttatccaaattcgaataaattttcccaacaacttgcagcgggtggaatgttccggaacaatactctcaatgtttacctggagaaaagcatcgtgactggccccgataactgcatcacctcctgtgaccggctcaacttccaccccagttacaacatcaacaggccatccatctgcgattgaggggctggaaactccctctaggagtcctctgaccccagggcctcctggaaaatcatcatccctcatcacccacagtcgcccgattgtgacggcacagactgcgctgccttccctgaaaatattattcgtctgcggagtaggaaaatatgcaaacggggccgtgaagtcctgccatttcacatctaataagtacatgggaaagatgctaatggttgactttgcattaaaaacgttgtcacatcctga

SEQ ID NO: 300147 - DNA, 786 bp, Homo sapiens
gtggggagccgggagcccagcagccccaggaaagacctggaagcacagggaccttttcaggaaacagagggctggagccaggttctgatcccgaccttgctcctggtcacgtgacctggccgtcgcttggcaacaggacgccgccgagtcccgcttctcctccaggcacaatggctgaggaatgccccagagcgtgcgcggagcctgtggcgcccaaggccacggccccgccggagaggaccagcgactactaccgcgtgagcgcggacctgccgggcaggttcaacaacccggggtggttccggggctacaggacccagaaggctgtctccgtgtacaggaccagtaaccaggcttacgggagcagagcccccaccgtgcacgagatgccttgcagcgggtggaatgttccggaacaatactctcaatgtttacctggagaaaagcatcgtgactggccccgataactgcatcacctcctgtgaccggctcaacttccaccccagttacaacatcaacaggccatccatctgcgattgaggggctggaaactccctctaggagtcctctgaccccagggcctcctggaaaatcatcatccctcatcacccacagtcgcccgattgtgacggcacagactgcgctgccttccctgaaaatattattcgtctgcggagtaggaaaatatgcaaacggggccgtgaagtcctgccatttcacatctaataagtacatgggaaagatgctaatggttgactttgcattaaaaacgttgtcacatcctga

SEQ ID NO: 300148 - DNA, 1231 bp, Homo sapiens
  misc_feature (47)..(47): n is a, c, g, or t
gggtcctgggcttgagagtctcgggcggggagtggagccacggtccncgccctgcagctcgccccgccctgctaatgggaccggccagcccgggaggcccctgacccttggggaagcccgctgggcgatggggaccctcgcctcccgccaagtgagctgtgaaccacgtcctgcgcaacctctcgctctccaaaactgtttgtaatatttaaacgatatttggcttaggagaatttcataaagttagccagatctcgggtctcaatttagactcggggtgctggggggcatagcatccctggagtacattggacagcaaaagtccaatcgttgcctgccgagtggacctgcagtgcttaaaccccgtcacccggctggcggggtcccaggccctggggtttctttcgcccgggagtccacgccctgatgctggggtggcccggtccccccgcgggtggctgggggcctggggctgcctcacacgacggtcccagcagggaatctctcgccgtcccgaccttcccggcccttggggagtcgcccggcaggttccggacccacccgcagaggaacccggcccacgcgcggcgcctttaaggcccctccgctcgctccccagtcacgtgacctggccgtcgcttggcaacaggacgccgccgagtcccgcttctcctccaggcacaatggctgaggaatgccccagagcgtgcgcggagcctgtggcgcccaaggccacggccccgccggagaggaccagcgactactaccgcgtgagcgcggacctgccgggcaggttcaacaacccggggtggttccggggctacaggacccagaaggctgtctccgtgtacaggaccagtaaccaggcttacgggagcagagcccccaccgtgcacgagatgcctaaagtattttatccaaattcgaataaattttcccaacaactcccagttacaacatcaacaggccatccatctgcgattgaggggctggaaactccctctaggagtcctctgaccccagggcctcctggaaaatcatcatccctcatcacccacagtcgcccgattgtgacggcacagactgcgctgccttccctgaaaatattattcgtctgcggagtaggaaaatatgcaaacggggccgtgaagtcctgccatttcacatctaataagtacatgggaaagatgctaatggttgactttgcattaaaaacgttgtcacatcctga

SEQ ID NO: 300149 - DNA, 1235 bp, Homo sapiens
  misc_feature (47)..(47): n is a, c, g, or t
gggtcctgggcttgagagtctcgggcggggagtggagccacggtccncgccctgcagctcgccccgccctgctaatgggaccggccagcccgggaggcccctgacccttggggaagcccgctgggcgatggggaccctcgcctcccgccaagtgagctgtgaaccacgtcctgcgcaacctctcgctctccaaaactgtttgtaatatttaaacgatatttggcttaggagaatttcataaagttagccagatctcgggtctcaatttagactcggggtgctggggggcatagcatccctggagtacattggacagcaaaagtccaatcgttgcctgccgagtggacctgcagtgcttaaaccccgtcacccggctggcggggtcccaggccctggggtttctttcgcccgggagtccacgccctgatgctggggtggcccggtccccccgcgggtggctgggggcctggggctgcctcacacgacggtcccagcagggaatctctcgccgtcccgaccttcccggcccttggggagtcgcccggcaggttccggacccacccgcagaggaacccggcccacgcgcggcgcctttaaggcccctccgctcgctccccagtcacgtgacctggccgtcgcttggcaacaggacgccgccgagtcccgcttctcctccaggcacaatggctgaggaatgccccagagcgtgcgcggagcctgtggcgcccaaggccacggccccgccggagaggaccagcgactactaccgcgtgagcgcggacctgccgggcaggttcaacaacccggggtggttccggggctacaggacccagaaggctgtctccgtgtacaggaccagtaaccaggcttacgggagcagagcccccaccgtgcacgagatgcctaaagtattttatccaaattcgaataaattttcccaacaacttgcagcgggtggaatgttccggaacaatactctcaatgtttacctggagaaaagcatcgtgactggccccgataactgcatcacctcctggaaaatcatcatccctcatcacccacagtcgcccgattgtgacggcacagactgcgctgccttccctgaaaatattattcgtctgcggagtaggaaaatatgcaaacggggccgtgaagtcctgccatttcacatctaataagtacatgggaaagatgctaatggttgactttgcattaaaaacgttgtcacatcctga

SEQ ID NO: 300150 - DNA, 1090 bp, Homo sapiens
  misc_feature (47)..(47): n is a, c, g, or t
gggtcctgggcttgagagtctcgggcggggagtggagccacggtccncgccctgcagctcgccccgccctgctaatgggaccggccagcccgggaggcccctgacccttggggaagcccgctgggcgatggggaccctcgcctcccgccaagtgagctgtgaaccacgtcctgcgcaacctctcgctctccaaaactgtttgtaatatttaaacgatatttggcttaggagaatttcataaagttagccagatctcgggtctcaatttagactcggggtgctggggggcatagcatccctggagtacattggacagcaaaagtccaatcgttgcctgccgagtggacctgcagtgcttaaaccccgtcacccggctggcggggtcccaggccctggggtttctttcgcccgggagtccacgccctgatgctggggtggcccggtccccccgcgggtggctgggggcctggggctgcctcacacgacggtcccagcagggaatctctcgccgtcccgaccttcccggcccttggggagtcgcccggcaggttccggacccacccgcagaggaacccggcccacgcgcggcgcctttaaggcccctccgctcgctccccagtcacgtgacctggccgtcgcttggcaacaggacgccgccgagtcccgcttctcctccaggcacaatggctgaggaatgccccagagcgtgcgcggagcctgtggcgcccaaggccacggccccgccggagaggaccagcgactactaccgcgtgagcgcggacctgccgggcaggttcaacaacccggggtggttccggggctacaggacccagaaggctgtctccgtgtacaggaccagtaaccaggcttacgggagcagagcccccaccgtgcacgagatgcctaaagtattttatccaaattcgaataaattttcccaacaacttgcagcgggtggaatgttccggaacaatactctcaatgtttacctggagaaaagcatcgtgaagtcctgccatttcacatctaataagtacatgggaaagatgctaatggttgactttgcattaaaaacgttgtcacatcctga

SEQ ID NO: 300151 - DNA, 983 bp, Homo sapiens
  misc_feature (47)..(47): n is a, c, g, or t
gggtcctgggcttgagagtctcgggcggggagtggagccacggtccncgccctgcagctcgccccgccctgctaatgggaccggccagcccgggaggcccctgacccttggggaagcccgctgggcgatggggaccctcgcctcccgccaagtgagctgtgaaccacgtcctgcgcaacctctcgctctccaaaactgtttgtaatatttaaacgatatttggcttaggagaatttcataaagttagccagatctcgggtctcaatttagactcggggtgctggggggcatagcatccctggagtacattggacagcaaaagtccaatcgttgcctgccgagtggacctgcagtgcttaaaccccgtcacccggctggcggggtcccaggccctggggtttctttcgcccgggagtccacgccctgatgctggggtggcccggtccccccgcgggtggctgggggcctggggctgcctcacacgacggtcccagcagggaatctctcgccgtcccgaccttcccggcccttggggagtcgcccggcaggttccggacccacccgcagaggaacccggcccacgcgcggcgcctttaaggcccctccgctcgctccccagtcacgtgacctggccgtcgcttggcaacaggacgccgccgagtcccgcttctcctccaggcacaatggctgaggaatgccccagagcgtgcgcggagcctgtggcgcccaaggccacggccccgccggagaggaccagcgactactaccgcgtgagcgcggacctgccgggcaggttcaacaacccggggtggttccggggctacaggacccagaaggctgtctccgtgtacaggaccagtaaccaggcttacgggagcagagcccccaccgtgcacgagatgcctacccagaaggctgtctccgtgtacaggaccagtaaccaggcttacgggagcagagcccccaccgtgcacgagatgcct

SEQ ID NO: 300152 - DNA, 465 bp, Homo sapiens
cagagggatttgattttgattatgtaacatttatatatagcatttgtttttacattttcaaattgcttttcagtcattggtttattcttcacagcacacctggggagtacatctgtgcatttatcctctgttcacagctgaggcaactgagactgaaacaggcaaagtggtttgtccaagagcaaagccaggggcagggtgagaaattgttcattcattcaatcatgcatctattcttggcaaggcaccaaagtctgtgtggtggtggtgcacagagatggatattgtctatgtggcctctaccttgcaagagcctgcagtctctgagacaataagcggttcatgaattatgcctcctagagtgctcagacagcaaggaccagggttcagaggaggagagggtgagagttccctaggattcctggagaatatctgactacagcagggccgttgtggggaaagggc

SEQ ID NO: 300153 - DNA, 720 bp, Homo sapiens
cagagggatttgattttgattatgtaacatttatatatagcatttgtttttacattttcaaattgcttttcagtcattggtttattcttcacagcacacctggggagtacatctgtgcatttatcctctgttcacagctgaggcaactgagactgaaacaggcaaagtggtttgtccaagagcaaagccaggggcagggaagtttgaaagaaagaaaaatatgccaagatgattaagtttcacctaagattttaaagctcccacctaaaagatgtggaaaacaagcactataccaggatattgtaccttatttctgccctgtcttaaaaacaccatgacattttccttgatttcaagaatacagaaaatgaacatggtcctttaaattatgtgactctttcgaagcaaaatgacaacaaggaaaaaccacatttgttttctgcctccctttttcaagaagctgaaaatatagtgtaaatgaactcttggtcgtgggtcaacatccttacaatacctgcccctcgttctcaggtgttacggtgaaactgcctgctgctagctgagtttgagaacagtgaccctgacaagtgccttacaggagtttatcaagtggagaacaccatttagaacaccactcactgagatgcagctcttatctgtgcctgtcagtgaacaatgttcaatcgcagatcacagttgttagcagagctaattacagca

SEQ ID NO: 300154 - DNA, 562 bp, Homo sapiens
tttgattttgattatgtaacatttatatatagcatttgtttttacattttcaaattgcttttcagtcattggtttattcttcacagcacacctggggagtacatctgtgcatttatcctctgttcacagctgaggcaactgagactgaaacaggcaaagtggtttgtccaagagcaaagccaggggcagggtgagaaattgttcattcattcaatcatgcatctattcttggcaaggcaccaaagtctgtgtggtggtggtgcacagagatggatattgtctatgtggcctctaccttgcaagagcctgcagtctctgagacaataagcggttcatgaattatgcctcctagagtgctcagacagcaaggaccagggttcagaggaggagagggtgagagttccctaggattcctggagagagttggattcagggcccatgagggatgggtagaattttggcaaatggaagtgtggctagtgggaatgacagacatgaaggtgggcaaatttaagatgttttggagaatatctgactacagcagggccgttgtggggaaagg

SEQ ID NO: 300155 - DNA, 907 bp, Homo sapiens
acagaacttgtcacagctggtcttagggttctgccttcctttcccctgaccctatactaccttcctcttttctgctacccttagactttgacccttctaggcaatggaaactgagcacattcattcgtggtcaggttatcagtgccatcaggctcaaagagcacttgcaaagaaaagaactgtaaaacaagggcactatttcgcatgggctccgaataccagcaagaactgttccccgggaaggggcttgccactgtgcctatcgagtcacagcctacagacctcccgtttagtctattagtccagccagtagacccggggctgggggagcagatgtgcggagatgctgaggacccctctggctacgttaggaacgatttacttgggttgatagcttttctttgcctccctttcactgcttccgtctctagggggaatagaaaagggtcagaaaaaccatcaggtttgccattttttaaccatttctgtctccccaggcgtccaggtgatcccccaaacagcatgtgctcagccccagacctgccgcctgggaatcaggattccttcttccccaaggcactgagcgcctgcagatcccgcaggcttcgtttgcctccagaaccttcccgtctgattgttcctccccagccccctggcatgtttcaccacaaccctgttgctacatcagagtgtatttttgtaattcctctagctaccatttcaatagccccatctctcctgctcacccgcctcttgccccttctaggggcaggtgaaaggaataggaaattgaacctggggttttgacttgccactgccataacttgtttgtaaaagagctgttctttttgactgattgttttaaacaacgatttctccattaaacttctactgagcaaatggttaa

SEQ ID NO: 300156 - DNA, 1199 bp, Homo sapiens
gccaggaaggcttgcaggttctgctgtttggttgctgaagggggtcagtgtgtgtatgtgtcatggaggtgggcagggaaggggagggctgtgcgtgggggagatgaggatatatatgctggtgtggctgagaaagcggaaccgagcctcgcatccatcggagggagccggggactgacagctctcagcacctgcttcctgctcctgcaccatgaaagtcctgctttgtgacctgctgctgctcagtctcttctccagtgtgttcagcagttgtcagagggactgtctcacatgccaggagaagctccacccagccctggacagcttcgacctggaggtgtgcatcctcgagtgtgaagagaaggtcttccccagccccctctggactccatgcaccaaggtcatggccaggagctcttggcagctcagccctgccgccccagagcatgtggcggctgctctctaccagccgagagcttcggagatgcagcatctgcggcgaatgccccgagtccggagcttgttccaggagcaggaagagcccgagcctggcatggaggaggctggtgagatggagcagaagcagctgcagaagagatttgggggcttcaccggggcccggaagtcggccaggaagttggccaatcagaagcggttcagtgagtttatgaggcaatacttggtcctgagcatgcagtccagccagcgccggcgcaccctgcaccagaatggtaatgtgtagccggaaggggcgctcctcccagctgtaccggccactgcaacccatgagcgtccaggtgatcccccaaacagcatgtgctcagccccagacctgccgcctgggaatcaggattccttcttccccaaggcactgagcgcctgcagatcccgcaggcttcgtttgcctccagaaccttcccgtctgattgttcctccccagccccctggcatgtttcaccacaaccctgttgctacatcagagtgtatttttgtaattcctctagctaccatttcaatagccccatctctcctgctcacccgcctcttgccccttctaggggcaggtgaaaggaataggaaattgaacctggggttttgacttgccactgccataacttgtttgtaaaagagctgttctttttgactgattgttttaaacaacgatttctccattaaacttctactgagcaaatggttaa

SEQ ID NO: 300157 - DNA, 1110 bp, Homo sapiens
ttttagatctttacatggtgaccttaaaataaacctgcagatttgactacatactttcacatccccaatttctttaacccatgtgacctcccacaagcctgaagagagaacaaaataaaattctttagtgggtgacagtcatgagctgtgcttggctccaaaaacccgactaaagatgtaacaaggtgcggtgttgggcgcatttatcctgtgttaacttcctatgttaacgtgctgtgacaccagaggtgtgcatcctcgagtgtgaagagaaggtcttccccagccccctctggactccatgcaccaaggtcatggccaggagctcttggcagctcagccctgccgccccagagcatgtggcggctgctctctaccagccgagagcttcggagatgcagcatctgcggcgaatgccccgagtccggagcttgttccaggagcaggaagagcccgagcctggcatggaggaggctggtgagatggagcagaagcagctgcagaagagatttgggggcttcaccggggcccggaagtcggccaggaagttggccaatcagaagcggttcagtgagtttatgaggcaatacttggtcctgagcatgcagtccagccagcgccggcgcaccctgcaccagaatggtaatgtgtagccggaaggggcgctcctcccagctgtaccggccactgcaacccatgagcgtccaggtgatcccccaaacagcatgtgctcagccccagacctgccgcctgggaatcaggattccttcttccccaaggcactgagcgcctgcagatcccgcaggcttcgtttgcctccagaaccttcccgtctgattgttcctccccagccccctggcatgtttcaccacaaccctgttgctacatcagagtgtatttttgtaattcctctagctaccatttcaatagccccatctctcctgctcacccgcctcttgccccttctaggggcaggtgaaaggaataggaaattgaacctggggttttgacttgccactgccataacttgtttgtaaaagagctgttctttttgactgattgttttaaacaacgatttctccattaaacttctactgagcaaatggttaa

SEQ ID NO: 300158 - DNA, 1973 bp, Homo sapiens
tctgcgataacatttagaagtcagttttaattctgagaatgtggaagtcaaagcccatctgatgtcaggttgaatgaatagattaaaaattcaatcagaaacagcagagacttgtcaaggatttcaaaagcccctccaatcccttctgtgtgggcaacaaagtgtgcctagcaaaaatgcaaatcagattgttatcactcccctgtgtaaaacccttttatacccattcacaataaatctcagactgctcaccatggcttcagggcctcaagcctctttttttccccagctcgctgctttccagacccaccagcctttcagctcccacacacaccacgcttcctgtgcctctgaacagccgtgcaggcggttctcgctgcctgcggcctgcttccaccagctggtaacttttgcttgcctctccaatgagagaggcctcactcaaccatcccatcttagtcatgttttcctgaaaaagtgtctcacattgatgcttttggtaactccttcagtgcactaaagacagtctgttgagtttgtttatgccaaagtccggtctccccaactaaaatgtcagcttgcagagagcagaagaggtcgggcctgtgtagctcgctgatgaattcctgttgacagacacttacccatgagctgctcaagtcctgcacatcttgagaaagagcccttacttccggggtatcttttcaaggatgtctgtacggtgaaaacctgtggtagacagagtatctccttccaagagcaagtcaggtgcgcatgctgtgcagtatcatgaagaccatgtctccttctggaatggacaggcaggcttgctgcctgtgatttatgaagcttaaaatagcaaatataaatatcaaccaagcaaaatggtatttacgatacatgtacatagggagtaacaaacacaaaattcacaatgacgtctgcctcttgcagggaggccagggggtggaatctgtgagaagttgctggaagtttccatgccattgggtgtgcttctgccagctgatacccttggactctcaagtgagagacaccacagttgaccatcttacgttggtagcatcttcctgggttagtcccacctcgaaacgtgtgcatcctcgagtgtgaagagaaggtcttccccagccccctctggactccatgcaccaaggtcatggccaggagctcttggcagctcagccctgccgccccagagcatgtggcggctgctctctaccagccgagagcttcggagatgcagcatctgcggcgaatgccccgagtccggagcttgttccaggagcaggaagagcccgagcctggcatggaggaggctggtgagatggagcagaagcagctgcagaagagatttgggggcttcaccggggcccggaagtcggccaggaagttggccaatcagaagcggttcagtgagtttatgaggcaatacttggtcctgagcatgcagtccagccagcgccggcgcaccctgcaccagaatggtaatgtgtagccggaaggggcgctcctcccagctgtaccggccactgcaacccatgagcgtccaggtgatcccccaaacagcatgtgctcagccccagacctgccgcctgggaatcaggattccttcttccccaaggcactgagcgcctgcagatcccgcaggcttcgtttgcctccagaaccttcccgtctgattgttcctccccagccccctggcatgtttcaccacaaccctgttgctacatcagagtgtatttttgtaattcctctagctaccatttcaatagccccatctctcctgctcacccgcctcttgccccttctaggggcaggtgaaaggaataggaaattgaacctggggttttgacttgccactgccataacttgtttgtaaaagagctgttctttttgactgattgttttaaacaacgatttctccattaaacttctactgagcaaatggttaa

SEQ ID NO: 300159 - DNA, 1356 bp, Homo sapiens
ttttagatctttacatggtgaccttaaaataaacctgcagatttgactacatactttcacatccccaatttctttaacccatgtgacctcccacaagcctgaagagagaacaaaataaaattctttagtgggtgacagtcatgagctgtgcttggctccaaaaacccgactaaagatgtaacaaggtgcggtgttgggcgcatttatcctgtgttaacttcctatgttaacgtgctgtgacaccagaggtaagttacgctcacctctctgagccctggtttctttgtaaaatgatggagctgggtcagatgattctctgtttgtttccaattctgaaattctacgaacctaaaacctgtgtaaaactgctccacgttacttgataacttagatgcttcagaagcacttgcactggtgcagtgggccagatctcctccctcgccctggattaacagaggtccttgttccttctcccctcctctcacccgtatcttgtgtgcatcctcgagtgtgaagagaaggtcttccccagccccctctggactccatgcaccaaggtcatggccaggagctcttggcagctcagccctgccgccccagagcatgtggcggctgctctctaccagccgagagcttcggagatgcagcatctgcggcgaatgccccgagtccggagcttgttccaggagcaggaagagcccgagcctggcatggaggaggctggtgagatggagcagaagcagctgcagaagagatttgggggcttcaccggggcccggaagtcggccaggaagttggccaatcagaagcggttcagtgagtttatgaggcaatacttggtcctgagcatgcagtccagccagcgccggcgcaccctgcaccagaatggtaatgtgtagccggaaggggcgctcctcccagctgtaccggccactgcaacccatgagcgtccaggtgatcccccaaacagcatgtgctcagccccagacctgccgcctgggaatcaggattccttcttccccaaggcactgagcgcctgcagatcccgcaggcttcgtttgcctccagaaccttcccgtctgattgttcctccccagccccctggcatgtttcaccacaaccctgttgctacatcagagtgtatttttgtaattcctctagctaccatttcaatagccccatctctcctgctcacccgcctcttgccccttctaggggcaggtgaaaggaataggaaattgaacctggggttttgacttgccactgccataacttgtttgtaaaagagctgttctttttgactgattgttttaaacaacgatttctccattaaacttctactgagcaaatggttaa

SEQ ID NO: 300160 - DNA, 1890 bp, Homo sapiens
tctgcgataacatttagaagtcagttttaattctgagaatgtggaagtcaaagcccatctgatgtcaggttgaatgaatagattaaaaattcaatcagaaacagcagagacttgtcaaggatttcaaaagcccctccaatcccttctgtgtgggcaacaaagtgtgcctagcaaaaatgcaaatcagattgttatcactcccctgtgtaaaacccttttatacccattcacaataaatctcagactgctcaccatggcttcagggcctcaagcctctttttttccccagctcgctgctttccagacccaccagcctttcagctcccacacacaccacgcttcctgtgcctctgaacagccgtgcaggcggttctcgctgcctgcggcctgcttccaccagctggtaacttttgcttgcctctccaatgagagaggcctcactcaaccatcccatcttagtcatgttttcctgaaaaagtgtctcacattgatgcttttggtaactccttcagtgcactaaagacagtctgttgagtttgtttatgccaaagtccggtctccccaactaaaatgtcagcttgcagagagcagaagaggtcgggcctgtgtagctcgctgatgaattcctgttgacagacacttacccatgagctgctcaagtcctgcacatcttgagaaagagcccttacttccggggtatcttttcaaggatgtctgtacggtgaaaacctgtggtagacagagtatctccttccaagagcaagtcaggtgcgcatgctgtgcagtatcatgaagaccatgtctccttctggaatggacaggcaggcttgctgcctgtgatttatgaagcttaaaatagcaaatataaatatcaaccaagcaaaatggtatttacgatacatgtacatagggagtaacaaacacaaaattcacaatgacgtctgcctcttgcagggaggccagggggtggaatctgtgagaagttgctggaagtttccatgccattgggtgtgcttctgccagctgatacccttggactctcaagtgagagacaccacagttgaccatcttacgttggtagcatcttcctgggttagtcccacctcgaaacgtgtgcatcctcgagtgtgaagagaaggtcttccccagccccctctggactccatgcaccaaggtcatggccaggagctcttggcagctcagccctgccgccccagagcatgtggcggctgctctctaccagccgagagcttcggagatgcagcatctgcggcgaatgccccgagtccggagcttgttccaggagcaggaagagcccgagcctggcatggaggaggctggtgagatggagcagaagcagctgcagaagagatttgggggcttcaccggggcccggaagtcggccaggaagttggccaatcagaagcggttcagtgagtttatgaggcaatacttggtcctgagcatgcagtccagccagcgccggcgcaccctgcaccagaatggtaatgtgtagccggaaggggcgctcctcccagctgtaccggccactgcaacccatgagcgtccaggtgatcccccaaacagcatgtgctcagccccagacctgccgcctgggaatcaggattccttcttccccaaggcactgagcgcctgcagatcccgcaggcttcgtttgcctccagaaccttcccgtctgattgttcctccccagccccctggcatgtttcaccacaaccctgttgctacatcagagtgtatttttgtaattcctctagctaccatttcaatagccccatctctcctgctcaccgctttgccctctgggcggtgaggatggatgactgggttggatgcagctactgtggacacgctttgggtgtacaggtc

SEQ ID NO: 300161 - DNA, 2098 bp, Homo sapiens
ctggtcccagctcgggagcacatcagaggcttagaggcgagtgggaagggactcagacagtgcaggacgagaaacgcccgcggcaccaaagcccctcagagcgtcgcccccgcctctagttctagaaagtcagtttcccggcactggcaccccggaacctcaggggctgccgagctgggggggcgctcaagctgcgaggatccgggctgcccgcgagacgaggagcgggcgcccaggatggggtgcatgaagtccaagttcctccaggtcggaggcaatacattctcaaaaactgaaaccagcgccagcccacactgtcctgtgtacgtgccggatcccacatccaccatcaagccggggcctaatagccacaacagcaacacaccaggaatcagggaggcaggctctgaggacatcatcgtggttgccctgtatgattacgaggccattcaccacgaagacctcagcttccagaagggggaccagatggtggtcctagaggaatccggggagtggtggaaggctcgatccctggccacccggaaggagggctacatcccaagcaactatgtcgcccgcgttgactctctggagacagaggagtggtttttcaagggcatcagccggaaggacgcagagcgccaactgctggctcccggcaacatgctgggctccttcatgatccgggatagcgagaccactaaaggaagctactctttgtccgtgcgagactacgaccctcggcagggagataccgtgaaacattacaagatccggaccctggacaacgggggcttctacatatccccccgaagcaccttcagcactctgcaggagctggtggaccactacaagaaggggaacgacgggctctgccagaaactgtcggtgccctgcatgtcttccaagccccagaagccttgggagaaagatgcctgggagatccctcgggaatccctcaagctggagaagaaacttggagctgggcagtttggggaagtctggatggccacctacaacaagcacaccaaggtggcagtgaagacgatgaagccagggagcatgtcggtggaggccttcctggcagaggccaacgtgatgaaaactctgcagcatgacaagctggtcaaacttcatgcggtggtcaccaaggagcccatctacatcatcacggagttcatggccaaaggaagcttgctggactttctgaaaagtgatgagggcagcaagcagccattgccaaaactcattgacttctcagcccagattgcagaaggcatggccttcatcgagcagaggaactacatccaccgagacctccgagctgccaacatcttggtctctgcatccctggtgtgtaagattgctgactttggcctggcccgggtcattgaggacaacgagtacacggctcgggaaggggccaagttccccatcaagtggacagctcctgaagccatcaactttggctccttcaccatcaagtcagacgtctggtcctttggtatcctgctgatggagatcgtcacctacggccggatcccttacccagggatgtcaaaccctgaagtgatccgagctctggagcgtggataccggatgcctcgcccagagaactgcccagaggagctctacaacatcatgatgcgctgctggaaaaaccgtccggaggagcggccgaccttcgaatacatccagagtgtgctggatgacttctacacggccacagagagccagtaccaacagcagccatgatagggaggaccagggcagggccagggggtgcccaggtggtggctgcaaggtggctccagcaccatccgccagggcccacacccccttcctactcccagacacccaccctcgcttcagccacagtttcctcatctgtccagtgggtaggttggactggaaaatctctttttgactcttgcaatccacaatctgacattctcaggaagcccccaagttgatatttctatttcctggaatggttggattttagttacagctgtgatttggaagggaaactttcaaaatagtgaaatgaatatttaaataaaagatataaatgccaaagtctttaccaaaaaaaaaa

SEQ ID NO: 300162 - DNA, 2030 bp, Homo sapiens
cggaggcacggaagatgaggaagatgatcaggaggatgatgaaggtgaagagggagatgaagacgatgacgacgatggctctgaggggacctcaggggctgccgagctgggggggcgctcaagctgcgaggatccgggctgcccgcgagacgaggagcgggcgcccaggatggggtgcatgaagtccaagttcctccaggtcggaggcaatacattctcaaaaactgaaaccagcgccagcccacactgtcctgtgtacgtgccggatcccacatccaccatcaagccggggcctaatagccacaacagcaacacaccaggaatcagggaggcaggctctgaggacatcatcgtggttgccctgtatgattacgaggccattcaccacgaagacctcagcttccagaagggggaccagatggtggtcctagaggaatccggggagtggtggaaggctcgatccctggccacccggaaggagggctacatcccaagcaactatgtcgcccgcgttgactctctggagacagaggagtggtttttcaagggcatcagccggaaggacgcagagcgccaactgctggctcccggcaacatgctgggctccttcatgatccgggatagcgagaccactaaaggaagctactctttgtccgtgcgagactacgaccctcggcagggagataccgtgaaacattacaagatccggaccctggacaacgggggcttctacatatccccccgaagcaccttcagcactctgcaggagctggtggaccactacaagaaggggaacgacgggctctgccagaaactgtcggtgccctgcatgtcttccaagccccagaagccttgggagaaagatgcctgggagatccctcgggaatccctcaagctggagaagaaacttggagctgggcagtttggggaagtctggatggccacctacaacaagcacaccaaggtggcagtgaagacgatgaagccagggagcatgtcggtggaggccttcctggcagaggccaacgtgatgaaaactctgcagcatgacaagctggtcaaacttcatgcggtggtcaccaaggagcccatctacatcatcacggagttcatggccaaaggaagcttgctggactttctgaaaagtgatgagggcagcaagcagccattgccaaaactcattgacttctcagcccagattgcagaaggcatggccttcatcgagcagaggaactacatccaccgagacctccgagctgccaacatcttggtctctgcatccctggtgtgtaagattgctgactttggcctggcccgggtcattgaggacaacgagtacacggctcgggaaggggccaagttccccatcaagtggacagctcctgaagccatcaactttggctccttcaccatcaagtcagacgtctggtcctttggtatcctgctgatggagatcgtcacctacggccggatcccttacccagggatgtcaaaccctgaagtgatccgagctctggagcgtggataccggatgcctcgcccagagaactgcccagaggagctctacaacatcatgatgcgctgctggaaaaaccgtccggaggagcggccgaccttcgaatacatccagagtgtgctggatgacttctacacggccacagagagccagtaccaacagcagccatgatagggaggaccagggcagggccagggggtgcccaggtggtggctgcaaggtggctccagcaccatccgccagggcccacacccccttcctactcccagacacccaccctcgcttcagccacagtttcctcatctgtccagtgggtaggttggactggaaaatctctttttgactcttgcaatccacaatctgacattctcaggaagcccccaagttgatatttctatttcctggaatggttggattttagttacagctgtgatttggaagggaaactttcaaaatagtgaaatgaatatttaaataaaagatataaatgccaaagtctttaccaaaaaaaaaa

SEQ ID NO: 300163 - DNA, 1936 bp, Homo sapiens
gaattcctttctaaaatccaaccattccaggaaatagaaatatcaacttgggggcttcctgagaatgtcagattgatggggtgcatgaagtccaagttcctccaggtcggaggcaatacattctcaaaaactgaaaccagcgccagcccacactgtcctgtgtacgtgccggatcccacatccaccatcaagccggggcctaatagccacaacagcaacacaccaggaatcagggaggcaggctctgaggacatcatcgtggttgccctgtatgattacgaggccattcaccacgaagacctcagcttccagaagggggaccagatggtggtcctagaggaatccggggagtggtggaaggctcgatccctggccacccggaaggagggctacatcccaagcaactatgtcgcccgcgttgactctctggagacagaggagtggtttttcaagggcatcagccggaaggacgcagagcgccaactgctggctcccggcaacatgctgggctccttcatgatccgggatagcgagaccactaaaggaagctactctttgtccgtgcgagactacgaccctcggcagggagataccgtgaaacattacaagatccggaccctggacaacgggggcttctacatatccccccgaagcaccttcagcactctgcaggagctggtggaccactacaagaaggggaacgacgggctctgccagaaactgtcggtgccctgcatgtcttccaagccccagaagccttgggagaaagatgcctgggagatccctcgggaatccctcaagctggagaagaaacttggagctgggcagtttggggaagtctggatggccacctacaacaagcacaccaaggtggcagtgaagacgatgaagccagggagcatgtcggtggaggccttcctggcagaggccaacgtgatgaaaactctgcagcatgacaagctggtcaaacttcatgcggtggtcaccaaggagcccatctacatcatcacggagttcatggccaaaggaagcttgctggactttctgaaaagtgatgagggcagcaagcagccattgccaaaactcattgacttctcagcccagattgcagaaggcatggccttcatcgagcagaggaactacatccaccgagacctccgagctgccaacatcttggtctctgcatccctggtgtgtaagattgctgactttggcctggcccgggtcattgaggacaacgagtacacggctcgggaaggggccaagttccccatcaagtggacagctcctgaagccatcaactttggctccttcaccatcaagtcagacgtctggtcctttggtatcctgctgatggagatcgtcacctacggccggatcccttacccagggatgtcaaaccctgaagtgatccgagctctggagcgtggataccggatgcctcgcccagagaactgcccagaggagctctacaacatcatgatgcgctgctggaaaaaccgtccggaggagcggccgaccttcgaatacatccagagtgtgctggatgacttctacacggccacagagagccagtaccaacagcagccatgatagggaggaccagggcagggccagggggtgcccaggtggtggctgcaaggtggctccagcaccatccgccagggcccacacccccttcctactcccagacacccaccctcgcttcagccacagtttcctcatctgtccagtgggtaggttggactggaaaatctctttttgactcttgcaatccacaatctgacattctcaggaagcccccaagttgatatttctatttcctggaatggttggattttagttacagctgtgatttggaagggaaactttcaaaatagtgaaatgaatatttaaataaaagatataaatgccaaagtctttaccaaaaaaaaaa

SEQ ID NO: 300164 - DNA, 403 bp, Homo sapiens
gcggccgcctactactactactgctcgaattcaagcttctaacgatgtacggggccatgatagggaggaccagggcagggccagggggtgcccaggtggtggctgcaaggtggctccagcaccatccgccagggcccacacccccttcctactcccagacacccaccctcgcttcagccacagtttcctcatctgtccagtgggtaggttggactggaaaatctctttttgactcttgcaatccacaatctgacattctcaggaagcccccaagttgatatttctatttcctggaatggttggattttagttacagctgtgatttggaagggaaactttcaaaatagtgaaatgaatatttaaataaaagatataaatgccaaagtctttaccaaaaaaaaaa

SEQ ID NO: 300165 - DNA, 994 bp, Homo sapiens
actgaaatagaagcaatctattactcccaatcttccattggtgactggttagttcagcaactcagcagctgtcaggactctgggttcctgtctctatgatggtcttctccatgttgtcagctccaagtatcataagtatctcacagtgttcaaaggaagagatgaagggtgcgttctccaaagactctcctctaagcgggaggaaaaacctttccatcactttcccagcagacctccccatcagctcccattggcccaaactgggtcccaggcccatgtcctagctgcaagtgaagctgagggtggaagtctgtctttcacagtggaaggggctcagcttgcaaggtgaggtggggagtgatgcctgctggggaggccacagggcctgccacccctgggctctcatttcccaactgcttccgtttctaattccacggctccttttcagggatgtcaaaccctgaagtgatccgagctctggagcgtggataccggatgcctcgcccagagaactgcccagaggagctctacaacatcatgatgcgctgctggaaaaaccgtccggaggagcggccgaccttcgaatacatccagagtgtgctggatgacttctacacggccacagagagccagtaccaacagcagccatgatagggaggaccagggcagggccagggggtgcccaggtggtggctgcaaggtggctccagcaccatccgccagggcccacacccccttcctactcccagacacccaccctcgcttcagccacagtttcctcatctgtccagtgggtaggttggactggaaaatctctttttgactcttgcaatccacaatctgacattctcaggaagcccccaagttgatatttctatttcctggaatggttggattttagttacagctgtgatttggaagggaaactttcaaaatagtgaaatgaatatttaaataaaagatataaatgccaaagtctttaccaaaaaaaaaa

SEQ ID NO: 300166 - DNA, 468 bp, Homo sapiens
tggtaaagacccactcttgttatgttgcccaggctgctctcggactcctggcctcaagctatcctctcacctcggtcccccaaagcattggaatgacaggtgtaagccagcatacctggcctagttaatgctttttaaatcatgttcaaggaatctttgccaaaccccaaatcactagaattttctcatatgttttcttctgaaggttttatagttttaactctttttttaacacacggtctctctgtcacccagtctggagtgcagtggtgcaatcatggctcactgcaaccttgacctctctgggctcaggtgatcctcccacctcagactactgtgcagctgggactacaggtgagtgtcatcatgctcaactaattttttcatttttttgtagagacggtgtttcgctatgttgcccaggatgggtcttgtaactcctggggccaagtgatccacccgccttgg

SEQ ID NO: 300167 - DNA, 412 bp, Homo sapiens
tggtaaagacccactcttgttatgttgcccaggctgctctcggactcctggcctcaagctatcctctcacctcggtcccccaaagcattggaatgacaggtgtaagccagcatacctggcctagttaatgctttttaaatcatgttcaaggaatctttgccaaaccccaaatcactagaattttctcatatgttttcttctgaaggttttatagttttaactctttttttaacacacggtctctctgtcacccacaacaaaacaaaacaaacaactcccacccccctgccaccaaaaacacacttacatcattttaagtaatggacctatgaaaaagagcctgtatacagtacaagtatttaaaggacaagactggttgcagaacaaatgtttttctaaaaaaaaaaaacaa

SEQ ID NO: 300168 - DNA, 332 bp, Homo sapiens
ccccagcccacaccccacccacccacccacatcacacaaggtccagcgagctccccttccttgcaagtattctacaacagacctgataccataattgggcacacatccttccgaaattccttctagaaaatgatttaatctactaagaaagcccacatttgaattcattcattccaaaaagagtctccatccacttcctaggttttgagctctttttatgagtccatggaagctgccgtggttttctctgagtccatggccatattttccctctgggttcttgtttcttttaagtcttatacctctattagtattaaagatcatcagctgtg

SEQ ID NO: 300169 - DNA, 635 bp, Homo sapiens
tggtaaagacccactcttgttatgttgcccaggctgctctcggactcctggcctcaagctatcctctcacctcggtcccccaaagcattggaatgacaggtgtaagccagcatacctggcctagttaatgctttttaaatcatgttcaaggaatctttgccaaaccccaaatcactagaattttctcatatgttttcttctgaaggttttatagttttaactctttttttaacacacggtctctctgtcacccagtctggagtgcagtggtgcaatcatggctcactgcaaccttgacctctctgggctcaggtgatcctcccacctcagactactgtgcagctgggactacagaggcttcctccttgaagagtctacaacagacctgataccataattgggcacacatccttccgaaattccttctagaaaatgatttaatctactaagaaagcccacatttgaattcattcattccaaaaagagtctccatccacttcctaggttttgagctctttttatgagtccatggaagctgccgtggttttctctgagtccatggccatattttccctctgggttcttgtttcttttaagtcttatacctctattagtattaaagatcatcagctgtg

SEQ ID NO: 300170 - DNA, 948 bp, Homo sapiens
tggtaaagacccactcttgttatgttgcccaggctgctctcggactcctggcctcaagctatcctctcacctcggtcccccaaagcattggaatgacaggtgtaagccagcatacctggcctagttaatgctttttaaatcatgttcaaggaatctttgccaaaccccaaatcactagaattttctcatatgttttcttctgaaggttttatagttttaactctttttttaacacacggtctctctgtcacccagtctggagtgcagtggtgcaatcatggctcactgcaaccttgacctctctgggctcaggtgatcctcccacctcagactactgtgcagctgggactacagaggcttcctccttgaagagtctacaacagacctgataccataattgggcacacatccttccgaaattccttctagaaaatgatttaatctactaagaaagcccacatttgaattcattcattccaaaaagagtctccatccacttcctaggttttgagctctttttatgagtccatggaagctgccgtggttttctctgagtccatggccatattttccctctgggttcttgtttcttttaagtcttatacctctattagtattaaagatcatcagctgtgcttgagtgtggttaaatattcactttcacttagacttctgacctagacactaacagccaaccttgctagattcatctaagtaaagggaatgcaacaggaaaaaaagccaataatttttggtttccagagtgaaagaaaaatactgggctggacatcatgaatcacacctgtaatcccaacactttgggaggccaaggcggacagatcacttgagcccaggagtttgagactagctgaattctaatttttaattgttccttcttgtctttcagaggcttcctccttgaagagtctacaacagacctgataccat

SEQ ID NO: 300171 - DNA, 1251 bp, Homo sapiens
cgccctcctcccgcgggagtcagtgggtgagggtcgggcttgaagccatagctgcgggaccgtactcgtctcccccgacgcagaccatggagagcgcgctggcggtgccccggctgcccccgcatgatccagggacgccggtgctgtcggtggtggacatgcacacgggcggcgagcccttgcgtatcgtgctggcggggtgtccggaggtgtctgggcccaccctgctggccaagcggcgctacatgcgccagcaccttgaccacgtgcggcgacggctcatgttcgagccccgagggcaccgggacatgtacggggcggtcctagtcccgagcgagctgccggacgcgcatctgggcgtcctgttcctgcacaacgagggctacagctccatgtgcggccacgcagtgctggcgctgggccgcttcgctttggacttcgggcttgtgccggcgccccctgcgggcacccgcgaggcccgcgtcaatatccactgcccctgcgggctggtgaccgccttcgtggcatgcgaggacggccgcagccacggaccggtgcgcttccacagcgtcccggccttcgtgctggccacagatctcatggtggatgttcctggacatggaaaggtgatggtggacattgcatatggcggtgcattttatgcatttgttactgctgaaaagttaggactagacatttgttctgcaaagaccagggaccttgtggatgcagcgagtgcagtgacagaggcagtgaaagctcagtttaaaattaatcatcctgatagtgaagaccttgcctttttatatggaactatattaacagatggaaaagatgcttataccaaggaaccaaccaccaacatttgtgtttttgcagatgaacaggttgacagaagtcccactggctcaggagtgacagcccgaattgccttacagtatcacaaagggcttctggaactgaaccagatgagagccttcaaaagcagtgcaactggctcagtattcacagggaaagctgtgagggaagcgaaatgtggtgattttaaagctgttatagtggaagtatcaggacaagcccattacacgggtacagcaagctttataatagaagatgacgacccattgagggatggatttcttctcaagtgacttcttccatgattttaagggctttctttttaaagtaatcattatccttaaggactgttttctctaaattatatgaaaacaaataaattatacatataaa

SEQ ID NO: 300172 - DNA, 1577 bp, Homo sapiens
aaatttcttcactcagctctcagaagagaattttaaagcaggcctgtaaaaacttcttttcaactaggacattggttatccagtgtggtcttggggccccagcgggcccctaaggtcctttccatgggttcagagggtcaaaactgtgttcataataatgacattatttgcttttcactctcattctctcaagagtgtacagtggggttcttcagaggctacgatgtgatatgtgataacccaaccaattgaatgcagaagctagatatgagaacctagttgtcttctgttaagccagacatgaaacaggtttgcaaaaatatcaaacaatgccacttttctcataattttttttgttttggccagttattttcacaaaaatgtgttattcatatgttaatgtataatgggttatttttaaaatgaagtaatgaacagatatatccaattcctaatacagtaaatattgatagatataacttatataaagaaaaactctttggggtcctcaaatcttaaggtataaaagggtcctgagaccaaaaggtttgagaaccattaggatttggggtttttttttgtttttttgttttattttataatagtgttttatttgatataataggatgtgaaagccctgaaaagttgtggaacatcaaatttttgtaatggaataaaattttaaatgtgctaacagctaagtaatgaatcttatctcagtagtaaatgaaatctactacagaatgatctacattcagtaaattattctactcataaagagtcctttaacatagcaaacaatctatcctaatatagctgtttttaagatttggtgtttctgaatattagagtttccttaaggatctctacatcatatagtgatctgaaacatgtgaaaccatttatgttgtatgcaaaaatttggaacatactgtcttcaaaatctgaaatggaacataaaaataacaacatacatttattggatacttcactgtgcatcagtttccaagctaagcacttgatacatgccatctcatttaatcctcacaagaatcctacaaggtcagtactgtgctgttattatcgtttttcaatagatgataaaacggagaattggagaagttaggtaatttaccagaggttagttagtgagtagcagatccaggtcatgaaggtgggtctctgaacagaccacatgctgttaagcattatattatattgctgtcagacaaagcaaaaggtcaatgaggctttatattataggagctgttatgagaagaatctgggattgcaatgtccccccaaatagagagggagccgagagaccaaagaatgactcagacaagtccaggaagcgaaatgtggtgattttaaagctgttatagtggaagtatcaggacaagcccattacacgggtacagcaagctttataatagaagatgacgacccattgagggatggatttcttctcaagtgacttcttccatgattttaagggctttctttttaaagtaatcattatccttaaggactgttttctctaaattatatgaaaacaaataaattatacatataaa

SEQ ID NO: 300173 - DNA, 1412 bp, Homo sapiens
gtatgttcccagatattctctgggatatttgggttctcagggatacctgcttcttggctgggcaccatgcccttggcttaccccccagccttcagggttcaagcagtggacatacacccttacataacctggtgaaggacctgtcacactacagcagctttataaaaagatataaaaagataaagtattataccctaacaatatttgacattttacctttagcttcagttattattcttttaaaaattagaacataaaaagatatgctgaagttaatgtttccagttacttgttttatagttattgatcatgcttgccagaatgtcttcacttgcatcatgctctctccctgtctgtgtgggcccgtccaggctccctgatggtaccttctcagtttcttcccctgctgcagcttcctttccctgtccttccatttagatgttaccgtcacttcatccccaccttccttctcatctcttctacagtttgatgctgctgggcaatttcatccacttcctaggcttcagttctcaaccatctactgatgatgactcccaaatgtttatccctgccctgactacctaccctgtatgtctttctgaatataacgctcttaatcccaactgtttattatactcatctctaaatgactgtcccagaggtgtctcaaactcaccttgttaaaaagttcttcctttcttcctttctcaaatgtgctcttcctttctctccccattgtgtttaatggcatcactagcatcatttccaagctagaaactatggttataattaacttattgctagtcctcaattcccacatgcattgatcaagaggcctatcagttctacctccaaactatctctatgttagtatatattccccttctccatcttcactgaaaactcccatagtgactctggaatcaatcattcagtgaattgaggttatctcttaacatgtttctgggtctcttgtctctctcttctccagtttgatccccactttacagctacagttatctaaaacacaagtctgaccatgtcattctccttaaaaaccttccctggcccataggattaacccttggcctttccttcacatgataaaagtcaagagtacagttttcaagccagatataatacgagtgcaatattttgatagtatactcccttcatcttttttcaggaagcgaaatgtggtgattttaaagctgttatagtggaagtatcaggacaagcccattacacgggtacagcaagctttataatagaagatgacgacccattgagggatggatttcttctcaagtgacttcttccatgattttaagggctttctttttaaagtaatcattatccttaaggactgttttctctaaattatatgaaaacaaataaattatacatataaa

SEQ ID NO: 300174 - DNA, 1546 bp, Homo sapiens
aaatttcttcactcagctctcagaagagaattttaaagcaggcctgtaaaaacttcttttcaactaggacattggttatccagtgtggtcttggggccccagcgggcccctaaggtcctttccatgggttcagagggtcaaaactgtgttcataataatgacattatttgcttttcactctcattctctcaagagtgtacagtggggttcttcagaggctacgatgtgatatgtgataacccaaccaattgaatgcagaagctagatatgagaacctagttgtcttctgttaagccagacatgaaacaggtttgcaaaaatatcaaacaatgccacttttctcataattttttttgttttggccagttattttcacaaaaatgtgttattcatatgttaatgtataatgggttatttttaaaatgaagtaatgaacagatatatccaattcctaatacagtaaatattgatagatataacttatataaagaaaaactctttggggtcctcaaatcttaaggtataaaagggtcctgagaccaaaaggtttgagaaccattaggatttggggtttttttttgtttttttgttttattttataatagtgttttatttgatataataggatgtgaaagccctgaaaagttgtggaacatcaaatttttgtaatggaataaaattttaaatgtgctaacagctaagtaatgaatcttatctcagtagtaaatgaaatctactacagaatgatctacattcagtaaattattctactcataaagagtcctttaacatagcaaacaatctatcctaatatagctgtttttaagatttggtgtttctgaatattagagtttccttaaggatctctacatcatatagtgatctgaaacatgtgaaaccatttatgttgtatgcaaaaatttggaacatactgtcttcaaaatctgaaatggaacataaaaataacaacatacatttattggatacttcactgtgcatcagtttccaagctaagcacttgatacatgccatctcatttaatcctcacaagaatcctacaaggaagcgaaatgtggtgattttaaagctgttatagtggaagtatcaggacaagcccattacacgggtacagcaagctttataatagaagatgacgacccattgagggatggatttcttctcaagtgacttcttccatgattttaagggctttctttttaaagtaatcattatccttaaggactgttttctctaaattatatgaaaacaaataaattatacatataaactaactctcattctttgtaaaatactaccctgtggctaaatataaagtcattatacctcgtatttgcaactgtatttgtataaatatcacttatgtctagcatacaaaatgccagaaattcagagtctttttctagtgattaacgtatcaggtaaaattaaaacagtagttacttttaaaatattgctctatagtaattactattaatatcatattttgtattaaaggctcttcgaataatatgtggaatttaactga

SEQ ID NO: 300175 - DNA, 1670 bp, Homo sapiens
gtatgttcccagatattctctgggatatttgggttctcagggatacctgcttcttggctgggcaccatgcccttggcttaccccccagccttcagggttcaagcagtggacatacacccttacataacctggtgaaggacctgtcacactacagcagctttataaaaagatataaaaagataaagtattataccctaacaatatttgacattttacctttagcttcagttattattcttttaaaaattagaacataaaaagatatgctgaagttaatgtttccagttacttgttttatagttattgatcatgcttgccagaatgtcttcacttgcatcatgctctctccctgtctgtgtgggcccgtccaggctccctgatggtaccttctcagtttcttcccctgctgcagcttcctttccctgtccttccatttagatgttaccgtcacttcatccccaccttccttctcatctcttctacagtttgatgctgctgggcaatttcatccacttcctaggcttcagttctcaaccatctactgatgatgactcccaaatgtttatccctgccctgactacctaccctgtatgtctttctgaatataacgctcttaatcccaactgtttattatactcatctctaaatgactgtcccagaggtgtctcaaactcaccttgttaaaaagttcttcctttcttcctttctcaaatgtgctcttcctttctctccccattgtgtttaatggcatcactagcatcatttccaagctagaaactatggttataattaacttattgctagtcctcaattcccacatgcattgatcaagaggcctatcagttctacctccaaactatctctatgttagtatatattccccttctccatcttcactgaaaactcccatagtgactctggaatcaatcattcagtgaattgaggttatctcttaacatgtttctgggtctcttgtctctctcttctccagtttgatccccactttacagctacagttatctaaaacacaagtctgaccatgtcattctccttaaaaaccttccctggcccataggattaacccttggcctttccttcacatgataaaagtcaagagtacagttttcaagccagatataatacgagtgcaatattttgatagtatactcccttcatcttttttcaggaagcgaaatgtggtgattttaaagctgttatagtggaagtatcaggacaagcccattacacgggtacagcaagctttataatagaagatgacgacccattgagggatggatttcttctcaagtgacttcttccatgattttaagggctttctttttaaagtaatcattatccttaaggactgttttctctaaattatatgaaaacaaataaattatacatataaactaactctcattctttgtaaaatactaccctgtggctaaatataaagtcattatacctcgtatttgcaactgtatttgtataaatatcacttatgtctagcatacaaaatgccagaaattcagagtctttttctagtgattaacgtatcaggtaaaattaaaacagtagttacttttaaaatattgctctatagtaattactattaatatcatattttgtattaaaggctcttcgaataatatgtggaatttaactga

SEQ ID NO: 300176 - DNA, 1288 bp, Homo sapiens
aaatttcttcactcagctctcagaagagaattttaaagcaggcctgtaaaaacttcttttcaactaggacattggttatccagtgtggtcttggggccccagcgggcccctaaggtcctttccatgggttcagagggtcaaaactgtgttcataataatgacattatttgcttttcactctcattctctcaagagtgtacagtggggttcttcagaggctacgatgtgatatgtgataacccaaccaattgaatgcagaagctagatatgagaacctagttgtcttctgttaagccagacatgaaacaggtttgcaaaaatatcaaacaatgccacttttctcataattttttttgttttggccagttattttcacaaaaatgtgttattcatatgttaatgtataatgggttatttttaaaatgaagtaatgaacagatatatccaattcctaatacagtaaatattgatagatataacttatataaagaaaaactctttggggtcctcaaatcttaaggtataaaagggtcctgagaccaaaaggtttgagaaccattaggatttggggtttttttttgtttttttgttttattttataatagtgttttatttgatataataggatgtgaaagccctgaaaagttgtggaacatcaaatttttgtaatggaataaaattttaaatgtgctaacagctaagtaatgaatcttatctcagtagtaaatgaaatctactacagaatgatctacattcagtaaattattctactcataaagagtcctttaacatagcaaacaatctatcctaatatagctgtttttaagatttggtgtttctgaatattagagtttccttaaggatctctacatcatatagtgatctgaaacatgtgaaaccatttatgttgtatgcaaaaatttggaacatactgtcttcaaaatctgaaatggaacataaaaataacaacatacatttattggatacttcactgtgcatcagtttccaagctaagcacttgatacatgccatctcatttaatcctcacaagaatcctacaaggaagcgaaatgtggtgattttaaagctgttatagtggaagtatcaggacaagcccattacacgggtacagcaagctttataatagaagatgacgacccattgagggatggatttcttctcaagtgacttcttccatgattttaagggctttctttttaaagtaatcattatccttaaggactgttttctctaaattatatgaaaacaaataaattatacatataaa

SEQ ID NO: 300177 - DNA, 513 bp, Homo sapiens
  misc_feature (32)..(32): n is a, c, g, or t
ggggccccgcctggccgagggttagttttttngttactggtaacaaacggtttatttaagctgttagggaattcagacaagcccattacacgggtacagcaagctttataatagaagatgacgacccattgagggatggatttcttctcaagtgacttcttccatgattttaagggctttctttttaaagtaatcattatccttaaggactgttttctctaaattatatgaaaacaaataaattatacatataaactaactctcattctttgtaaaatactaccctgtggctaaatataaagtcattatacctcgtatttgcaactgtatttgtataaatatcacttatgtctagcatacaaaatgccagaaattcagagtctttttctagtgattaacgtatcaggtaaaattaaaacagtagttacttttaaaatattgctctatagtaattactattaatatcatattttgtattaaaggctcttcgaataatatgtggaatttaactga

SEQ ID NO: 300178 - DNA, 1509 bp, Homo sapiens
cgccctcctcccgcgggagtcagtgggtgagggtcgggcttgaagccatagctgcgggaccgtactcgtctcccccgacgcagaccatggagagcgcgctggcggtgccccggctgcccccgcatgatccagggacgccggtgctgtcggtggtggacatgcacacgggcggcgagcccttgcgtatcgtgctggcggggtgtccggaggtgtctgggcccaccctgctggccaagcggcgctacatgcgccagcaccttgaccacgtgcggcgacggctcatgttcgagccccgagggcaccgggacatgtacggggcggtcctagtcccgagcgagctgccggacgcgcatctgggcgtcctgttcctgcacaacgagggctacagctccatgtgcggccacgcagtgctggcgctgggccgcttcgctttggacttcgggcttgtgccggcgccccctgcgggcacccgcgaggcccgcgtcaatatccactgcccctgcgggctggtgaccgccttcgtggcatgcgaggacggccgcagccacggaccggtgcgcttccacagcgtcccggccttcgtgctggccacagatctcatggtggatgttcctggacatggaaaggtgatggtggacattgcatatggcggtgcattttatgcatttgttactgctgaaaagttaggactagacatttgttctgcaaagaccagggaccttgtggatgcagcgagtgcagtgacagaggcagtgaaagctcagtttaaaattaatcatcctgatagtgaagaccttgcctttttatatggaactatattaacagatggaaaagatgcttataccaaggaaccaaccaccaacatttgtgtttttgcagatgaacaggttgacagaagtcccactggctcaggagtgacagcccgaattgccttacagtatcacaaagggcttctggaactgaaccagatgagagccttcaaaagcagtgcaactggctcagtattcacagggaaagctgtgagggaagcgaaatgtggtgattttaaagctgttatagtggaagtatcaggacaagcccattacacgggtacagcaagctttataatagaagatgacgacccattgagggatggatttcttctcaagtgacttcttccatgattttaagggctttctttttaaagtaatcattatccttaaggactgttttctctaaattatatgaaaacaaataaattatacatataaactaactctcattctttgtaaaatactaccctgtggctaaatataaagtcattatacctcgtatttgcaactgtatttgtataaatatcacttatgtctagcatacaaaatgccagaaattcagagtctttttctagtgattaacgtatcaggtaaaattaaaacagtagttacttttaaaatattgctctatagtaattactattaatatcatattttgtattaaaggctcttcgaataatatgtggaatttaactga

SEQ ID NO: 300179 - DNA, 1380 bp, Homo sapiens
cgccctcctcccgcgggagtcagtgggtgagggtcgggcttgaagccatagctgcgggaccgtactcgtctcccccgacgcagaccatggagagcgcgctggcggtgccccggctgcccccgcatgatccagggacgccggtgctgtcggtggtggacatgcacacgggcggcgagcccttgcgtatcgtgctggcggggtgtccggaggtgtctgggcccaccctgctggccaagcggcgctacatgcgccagcaccttgaccacgtgcggcgacggctcatgttcgagccccgagggcaccgggacatgtacggggcggtcctagtcccgagcgagctgccggacgcgcatctgggcgtcctgttcctgcacaacgagggctacagctccatgtgcggccacgcagtgctggcgctgggccgcttcgctttggacttcgggcttgtgccggcgccccctgcgggcacccgcgaggcccgcgtcaatatccactgcccctgcgggctggtgaccgccttcgtggcatgcgaggacggccgcagccacggaccggtgcgcttccacagcgtcccggccttcgtgctggccacaggtaatgggcgggacctttccagcccagggcagagctgcaaccgggacgcgactaactacattaacggtttttctgggctggaactctggcaactaacctactccgcgaaaccttgcaattaatagaaagatctcatggtggatgttcctggacatggaaaggtgatggtggacattgcatatggcggtgcattttatgcatttgttactgctgaaaagttaggactagacatttgttctgcaaagaccagggaccttgtggatgcagcgagtgcagtgacagaggcagtgaaagctcagtttaaaattaatcatcctgatagtgaagaccttgcctttttatatggaactatattaacagatggaaaagatgcttataccaaggaaccaaccaccaacatttgtgtttttgcagatgaacaggttgacagaagtcccactggctcaggagtgacagcccgaattgccttacagtatcacaaagggcttctggaactgaaccagatgagagccttcaaaagcagtgcaactggctcagtattcacagggaaagctgtgagggaagcgaaatgtggtgattttaaagctgttatagtggaagtatcaggacaagcccattacacgggtacagcaagctttataatagaagatgacgacccattgagggatggatttcttctcaagtgacttcttccatgattttaagggctttctttttaaagtaatcattatccttaaggactgttttctctaaattatatgaaaacaaataaattatacatataaa

SEQ ID NO: 300180 - DNA, 1570 bp, Homo sapiens
cgccctcctcccgcgggagtcagtgggtgagggtcgggcttgaagccatagctgcgggaccgtactcgtctcccccgacgcagaccatggagagcgcgctggcggtgccccggctgcccccgcatgatccagggacgccggtgctgtcggtggtggacatgcacacgggcggcgagcccttgcgtatcgtgctggcggggtgtccggaggtgtctgggcccaccctgctggccaagcggcgctacatgcgccagcaccttgaccacgtgcggcgacggctcatgttcgagccccgagggcaccgggacatgtacggggcggtcctagtcccgagcgagctgccggacgcgcatctgggcgtcctgttcctgcacaacgagggctacagctccatgtgcggccacgcagtgctggcgctgggccgcttcgctttggacttcgggcttgtgccggcgccccctgcgggcacccgcgaggcccgcgtcaatatccactgcccctgcgggctggtgaccgccttcgtggcatgcgaggacggccgcagccacggaccggtgcgcttccacagcgtcccggccttcgtgctggccacaggtaatgggcgggacctttccagcccagggcagagctgcaaccgggacgcgactaactacattaacggtttttctgggctggaactctggcaactaacctactccgcgaaaccttgcaattaatagaaaggtaaatcactgccaacgtgtgtcagcagccttgcgtatttggtgcgtgtaatttcgattttccctgactcccatccgcctgtggttttgggagacccttgaggagcgaggaattgcgtgttaccctgactcagcgcctccctctgcactggtgaggcattcctagagatttcaccggtggataaagcaagatctcatggtggatgttcctggacatggaaaggtgatggtggacattgcatatggcggtgcattttatgcatttgttactgctgaaaagttaggactagacatttgttctgcaaagaccagggaccttgtggatgcagcgagtgcagtgacagaggcagtgaaagctcagtttaaaattaatcatcctgatagtgaagaccttgcctttttatatggaactatattaacagatggaaaagatgcttataccaaggaaccaaccaccaacatttgtgtttttgcagatgaacaggttgacagaagtcccactggctcaggagtgacagcccgaattgccttacagtatcacaaagggcttctggaactgaaccagatgagagccttcaaaagcagtgcaactggctcagtattcacagggaaagctgtgagggaagcgaaatgtggtgattttaaagctgttatagtggaagtatcaggacaagcccattacacgggtacagcaagctttataatagaagatgacgacccattgagggatggatttcttctcaagtgacttcttccatgattttaagggctttctttttaaagtaatcattatccttaaggactgttttctctaaattatatgaaaacaaataaattatacatataaa

SEQ ID NO: 300181 - DNA, 1355 bp, Homo sapiens
cgccctcctcccgcgggagtcagtgggtgagggtcgggcttgaagccatagctgcgggaccgtactcgtctcccccgacgcagaccatggagagcgcgctggcggtgccccggctgcccccgcatgatccagggacgccggtgctgtcggtggtggacatgcacacgggcggcgagcccttgcgtatcgtgctggcggggtgtccggaggtgtctgggcccaccctgctggccaagcggcgctacatgcgccagcaccttgaccacgtgcggcgacggctcatgttcgagccccgagggcaccgggacatgtacggggcggtcctagtcccgagcgagctgccggacgcgcatctgggcgtcctgttcctgcacaacgagggctacagctccatgtgcggccacgcagtgctggcgctgggccgcttcgctttggacttcgggcttgtgccggcgccccctgcgggcacccgcgaggcccgcgtcaatatccactgcccctgcgggctggtgaccgccttcgtggcatgcgaggacggccgcagccacggaccggtgcgcttccacagcgtaatgggcgggacctttccagcccagggcagagctgcaaccgggacgcgactaactacattaacggtttttctgggctggaactctggcaactaacctactccgcgaaaccttgcaattaatagaaagatctcatggtggatgttcctggacatggaaaggtgatggtggacattgcatatggcggtgcattttatgcatttgttactgctgaaaagttaggactagacatttgttctgcaaagaccagggaccttgtggatgcagcgagtgcagtgacagaggcagtgaaagctcagtttaaaattaatcatcctgatagtgaagaccttgcctttttatatggaactatattaacagatggaaaagatgcttataccaaggaaccaaccaccaacatttgtgtttttgcagatgaacaggttgacagaagtcccactggctcaggagtgacagcccgaattgccttacagtatcacaaagggcttctggaactgaaccagatgagagccttcaaaagcagtgcaactggctcagtattcacagggaaagctgtgagggaagcgaaatgtggtgattttaaagctgttatagtggaagtatcaggacaagcccattacacgggtacagcaagctttataatagaagatgacgacccattgagggatggatttcttctcaagtgacttcttccatgattttaagggctttctttttaaagtaatcattatccttaaggactgttttctctaaattatatgaaaacaaataaattatacatataaa

SEQ ID NO: 300182 - DNA, 1597 bp, Homo sapiens
cgccctcctcccgcgggagtcagtgggtgagggtcgggcttgaagccatagctgcgggaccgtactcgtctcccccgacgcagaccatggagagcgcgctggcggtgccccggctgcccccgcatgatccagggacgccggtgctgtcggtggtggacatgcacacgggcggcgagcccttgcgtatcgtgctggcggggtgtccggaggtgtctgggcccaccctgctggccaagcggcgctacatgcgccagcaccttgaccacgtgcggcgacggctcatgttcgagccccgagggcaccgggacatgtacggggcggtcctagtcccgagcgagctgccggacgcgcatctgggcgtcctgttcctgcacaacgagggctacagctccatgtgcggccacgcagtgctggcgctgggccgcttcgctttggacttcgggcttgtgccggcgccccctgcgggcacccgcgaggcccgcgtcaatatccactgcccctgcgggctggtgaccgccttcgtggcatgcgaggacggccgcagccacggaccggtgcgcttccacagcgtcccggccttcgtgctggccacagatctcatggtggatgttcctggacatggaaaggtgatggtggacattgcatatggcggtgcattttatgcatttgttactgctgaaaagttaggactagacatttgttctgcaaagaccagggaccttgtggatgcagcgagtgcagtgacagaggcagtgaaagctcagtttaaaattaatcatcctgatagtgaagaccttgcctttttatatggaactatattaacagatggaaaagatgcttataccaaggaaccaaccaccaacatttgtgtttttgcagatgaacaggttgacagaagtcccactggctcaggagtgacagcccgaattgccttacagtatcacaaagggcttctggaactgaaccagatgagagccttcaaaagcagtgcaactggctcagtattcacagggaaagctgtgagggagctgttatgagaagaatctgggattgcaatgtccccccaaatagagagggagccgagagaccaaagaatgactcagacaagtccaggaagcgaaatgtggtgattttaaagctgttatagtggaagtatcaggacaagcccattacacgggtacagcaagctttataatagaagatgacgacccattgagggatggatttcttctcaagtgacttcttccatgattttaagggctttctttttaaagtaatcattatccttaaggactgttttctctaaattatatgaaaacaaataaattatacatataaactaactctcattctttgtaaaatactaccctgtggctaaatataaagtcattatacctcgtatttgcaactgtatttgtataaatatcacttatgtctagcatacaaaatgccagaaattcagagtctttttctagtgattaacgtatcaggtaaaattaaaacagtagttacttttaaaatattgctctatagtaattactattaatatcatattttgtattaaaggctcttcgaataatatgtggaatttaactga

SEQ ID NO: 300183 - DNA, 1339 bp, Homo sapiens
cgccctcctcccgcgggagtcagtgggtgagggtcgggcttgaagccatagctgcgggaccgtactcgtctcccccgacgcagaccatggagagcgcgctggcggtgccccggctgcccccgcatgatccagggacgccggtgctgtcggtggtggacatgcacacgggcggcgagcccttgcgtatcgtgctggcggggtgtccggaggtgtctgggcccaccctgctggccaagcggcgctacatgcgccagcaccttgaccacgtgcggcgacggctcatgttcgagccccgagggcaccgggacatgtacggggcggtcctagtcccgagcgagctgccggacgcgcatctgggcgtcctgttcctgcacaacgagggctacagctccatgtgcggccacgcagtgctggcgctgggccgcttcgctttggacttcgggcttgtgccggcgccccctgcgggcacccgcgaggcccgcgtcaatatccactgcccctgcgggctggtgaccgccttcgtggcatgcgaggacggccgcagccacggaccggtgcgcttccacagcgtcccggccttcgtgctggccacagatctcatggtggatgttcctggacatggaaaggtgatggtggacattgcatatggcggtgcattttatgcatttgttactgctgaaaagttaggactagacatttgttctgcaaagaccagggaccttgtggatgcagcgagtgcagtgacagaggcagtgaaagctcagtttaaaattaatcatcctgatagtgaagaccttgcctttttatatggaactatattaacagatggaaaagatgcttataccaaggaaccaaccaccaacatttgtgtttttgcagatgaacaggttgacagaagtcccactggctcaggagtgacagcccgaattgccttacagtatcacaaagggcttctggaactgaaccagatgagagccttcaaaagcagtgcaactggctcagtattcacagggaaagctgtgagggagctgttatgagaagaatctgggattgcaatgtccccccaaatagagagggagccgagagaccaaagaatgactcagacaagtccaggaagcgaaatgtggtgattttaaagctgttatagtggaagtatcaggacaagcccattacacgggtacagcaagctttataatagaagatgacgacccattgagggatggatttcttctcaagtgacttcttccatgattttaagggctttctttttaaagtaatcattatccttaaggactgttttctctaaattatatgaaaacaaataaattatacatataaa

SEQ ID NO: 300184 - DNA, 1916 bp, Homo sapiens
cgccctcctcccgcgggagtcagtgggtgagggtcgggcttgaagccatagctgcgggaccgtactcgtctcccccgacgcagaccatggagagcgcgctggcggtgccccggctgcccccgcatgatccagggacgccggtgctgtcggtggtggacatgcacacgggcggcgagcccttgcgtatcgtgctggcggggtgtccggaggtgtctgggcccaccctgctggccaagcggcgctacatgcgccagcaccttgaccacgtgcggcgacggctcatgttcgagccccgagggcaccgggacatgtacggggcggtcctagtcccgagcgagctgccggacgcgcatctgggcgtcctgttcctgcacaacgagggctacagctccatgtgcggccacgcagtgctggcgctgggccgcttcgctttggacttcgggcttgtgccggcgccccctgcgggcacccgcgaggcccgcgtcaatatccactgcccctgcgggctggtgaccgccttcgtggcatgcgaggacggccgcagccacggaccggtgcgcttccacagcgtcccggccttcgtgctggccacaggtaatgggcgggacctttccagcccagggcagagctgcaaccgggacgcgactaactacattaacggtttttctgggctggaactctggcaactaacctactccgcgaaaccttgcaattaatagaaaggtaaatcactgccaacgtgtgtcagcagccttgcgtatttggtgcgtgtaatttcgattttccctgactcccatccgcctgtggttttgggagacccttgaggagcgaggaattgcgtgttaccctgactcagcgcctccctctgcactggtgaggcattcctagagatttcaccggtggataaagcaagatctcatggtggatgttcctggacatggaaaggtgatggtggacattgcatatggcggtgcattttatgcatttgttactgctgaaaagttaggactagacatttgttctgcaaagaccagggaccttgtggatgcagcgagtgcagtgacagaggcagtgaaagctcagtttaaaattaatcatcctgatagtgaagaccttgcctttttatatggaactatattaacagatggaaaagatgcttataccaaggaaccaaccaccaacatttgtgtttttgcagatgaacaggttgacagaagtcccactggctcaggagtgacagcccgaattgccttacagtatcacaaagggcttctggaactgaaccagatgagagccttcaaaagcagtgcaactggctcagtattcacagggaaagctgtgagggagctgttatgagaagaatctgggattgcaatgtccccccaaatagagagggagccgagagaccaaagaatgactcagacaagtccaggaagcgaaatgtggtgattttaaagctgttatagtggaagtatcaggacaagcccattacacgggtacagcaagctttataatagaagatgacgacccattgagggatggatttcttctcaagtgacttcttccatgattttaagggctttctttttaaagtaatcattatccttaaggactgttttctctaaattatatgaaaacaaataaattatacatataaactaactctcattctttgtaaaatactaccctgtggctaaatataaagtcattatacctcgtatttgcaactgtatttgtataaatatcacttatgtctagcatacaaaatgccagaaattcagagtctttttctagtgattaacgtatcaggtaaaattaaaacagtagttacttttaaaatattgctctatagtaattactattaatatcatattttgtattaaaggctcttcgaataatatgtggaatttaactga

SEQ ID NO: 300185 - DNA, 1043 bp, Homo sapiens
cgccctcctcccgcgggagtcagtgggtgagggtcgggcttgaagccatagctgcgggaccgtactcgtctcccccgacgcagaccatggagagcgcgctggcggtgccccggctgcccccgcatgatccagggacgccggtgctgtcggtggtggacatgcacacgggcggcgagcccttgcgtatcgtgctggcggggtgtccggaggtgtctgggcccaccctgctggccaagcggcgctacatgcgccagcaccttgaccacgtgcggcgacggctcatgttcgagccccgagggcaccgggacatgtacggggcggtcctagtcccgagcgagctgccggacgcgcatctgggcgtcctgttcctgcacaacgagggctacagctccatgtgcggccacgcagtgctggcgctgggccgcttcgctttggacttcgggcttgtgccggcgccccctgcgggcacccgcgaggcccgcgtcaatatccactgcccctgcgggctggtgaccgccttcgtggcatgcgaggacggccgcagccacggaccggtgcgcttccacagcgtcccggccttcgtgctggccacaggtaatgggcgggacctttccagcccagggcagagctgcaaccgggacgcgactaactacattaacggtttttctgggctggaactctggcaactaacctactccgcgaaaccttgcaattaatagaaaggtaaatcactgccaacgtgtgtcagcagccttgcgtatttggtgcgtgtaatttcgattttccctgactcccatccgcctgtggttttgggagacccttgaggagcgaggaattgcgtgttaccctgactcagcgcctccctctgcactggtgaggcattcctagagatttcaccggtggataaagcaaggtacggtggggtcaaggaaagagcgaagaacagccaatgtaccagggttccaggctggctgagaatatgcttggtagacacagaatcacacttaataagttactaaacctggtctcctttcctcacctcc

SEQ ID NO: 300186 - DNA, 1634 bp, Homo sapiens
aaatttcttcactcagctctcagaagagaattttaaagcaggcctgtaaaaacttcttttcaactaggacattggttatccagtgtggtcttggggccccagcgggcccctaaggtcctttccatgggttcagagggtcaaaactgtgttcataataatgacattatttgcttttcactctcattctctcaagagtgtacagtggggttcttcagaggctacgatgtgatatgtgataacccaaccaattgaatgcagaagctagatatgagaacctagttgtcttctgttaagccagacatgaaacaggtttgcaaaaatatcaaacaatgccacttttctcataattttttttgttttggccagttattttcacaaaaatgtgttattcatatgttaatgtataatgggttatttttaaaatgaagtaatgaacagatatatccaattcctaatacagtaaatattgatagatataacttatataaagaaaaactctttggggtcctcaaatcttaaggtataaaagggtcctgagaccaaaaggtttgagaaccattaggatttggggtttttttttgtttttttgttttattttataatagtgttttatttgatataataggatgtgaaagccctgaaaagttgtggaacatcaaatttttgtaatggaataaaattttaaatgtgctaacagctaagtaatgaatcttatctcagtagtaaatgaaatctactacagaatgatctacattcagtaaattattctactcataaagagtcctttaacatagcaaacaatctatcctaatatagctgtttttaagatttggtgtttctgaatattagagtttccttaaggatctctacatcatatagtgatctgaaacatgtgaaaccatttatgttgtatgcaaaaatttggaacatactgtcttcaaaatctgaaatggaacataaaaataacaacatacatttattggatacttcactgtgcatcagtttccaagctaagcacttgatacatgccatctcatttaatcctcacaagaatcctacaaggagctgttatgagaagaatctgggattgcaatgtccccccaaatagagagggagccgagagaccaaagaatgactcagacaagtccaggaagcgaaatgtggtgattttaaagctgttatagtggaagtatcaggacaagcccattacacgggtacagcaagctttataatagaagatgacgacccattgagggatggatttcttctcaagtgacttcttccatgattttaagggctttctttttaaagtaatcattatccttaaggactgttttctctaaattatatgaaaacaaataaattatacatataaactaactctcattctttgtaaaatactaccctgtggctaaatataaagtcattatacctcgtatttgcaactgtatttgtataaatatcacttatgtctagcatacaaaatgccagaaattcagagtctttttctagtgattaacgtatcaggtaaaattaaaacagtagttacttttaaaatattgctctatagtaattactattaatatcatattttgtattaaaggctcttcgaataatatgtggaatttaactga

SEQ ID NO: 300187 - DNA, 1967 bp, Homo sapiens
  misc_feature (1008)..(1008): n is a, c, g, or t
gtgcacaataaatgtaatgcatttgaatcatcccaaaaccatccctgcacccccggtctgtagaaaaattgtctttcatgaaacccgtccctggtgccaaaaaggttggagaccactactctaaaagataaagatggttgggcatggtggctcacacttgtggtcccagcattttgggaagctgaggagggcagatcacctgagaccagcctgggcaacatggggaaaccctgtttctacaaaaagtacaaaaattagctggacctggtaatgcacacctgtagtctcagctactgaggaggctgaggtgagaggatcccttgagactgggagcttgaggctgtagtcagctgtgagcatgtcattgcactccatcttgggcaatggagcaagaccctgtctcagaaaaaaaggattaaaaaattttagccacaatattatttatcacacctaaaaattaataatttcctaccatcaaactacttaatcaatgttcaaaaagtagaaaacacgtttgcaaaactgagcacctttttcacttaagaataagttaggtcagatatttgcctttccttggtcagctctagaccaaggggaaatgcaagatgtaactactgaaacatagtggttggcatttggtggaatatttttgtttaaaacatggaagttattttatcatgagttacttctatagttctaactaattttagttagacaatgtattataaatgcagtgtagaattttgaacctcaaagaatctcatctagtatcatgaaatctatgccagtatgatgtaatcagtagaatgttgcttaactgggagcctttggcataccaacagaacagaacaaaacaaaaatctttcgcgtgtggaagaagaggtttttaagttcttctgaaaattatcatttcatttagattgctaacttcaaatgaatgagacattaccgtttcttgctatcaagatatttttcagagcttagcccaaataattttgagtattattntattgtaggaaaaaattgaaattacttccttttctggatagttttctgtttgagtgagatttgtgcattgattccctgatgttgatttttgttatgggggaaaaactggggacataatgggaagaggtatgtgactagcttgaaataggtttttctacatactaatctttgctattgagttctgtgtattacagcaaaatgaattttctaaaatacttaccatactacaatagttttgccttgcatgaaaacattctaataaatgaacaattactaattttgtttaatagataaatgtatctgataggtcttggcacatgggctttattcttaacagttttaaacctttagttttttgttcttttgctttacaatgtttctttctttttcttagaatgcatctactcatgcctcgaaatctcctgacagtgttaatggaagtgaaccaagcattcctcaggtctgttactaattgttattttagaaaataacaagtcatttcagagtgttggtcagtctgtgttaattattagcatctgactttacattgaaatggtgatgtccaaatattcagtacagtatatatggtaaacacaggtttgctcatggtttcttggaaaaagttttaaatgaaagcaagactgtattatttctcattttaaaaattaatgcaaggccaggcactgtggctcccgcctgtctgtaatcccagcactttgggaggctgaggtgggcggatcgcttgaggccaagagttcgagactagcttggccaacatggcaaaactctgtctctactaaaaatagaaaaagtcagccaggagtggcgcatgcctgaaatcccagctacttagttggctgaagcgtgagaatcgcttgaacccgggaggcatacgttgtcatgagctgagtttgtgccactgcactccagcctgagcaacagagtgaggctctgtctca

SEQ ID NO: 300188 - DNA, 8178 bp, Homo sapiens
ccctggcgcctggtatcagggacttcccgacgctggaagagttcagggaagggaagcgggcccctctggcaccgaagacacagaatcctagctacagctactaaagaaaagaacactatcaattagggcccgcgtcaggttctctggatctccccttctcccatccttgacgctcatccctgtgttctttgcggtgggcccgtcggccctgctgccatcgatagaagcagcactctccccgtctgatttcgcagggccaaagcccaggtgagagtcagggtagtgttcagactagcccacgctccggttctgagccgcgacggcggtctccgcacgcaacgaaatcaggcaggaccgaaccttgcgtcctccagtgcagcgagttcggaagcgaccggccgagcgcgcatgtgcgggacccgacattgtgcttgtcccatccggtgctccgtagttagcctctgtgagctccacgtaggccgcgcaagcgcccttggcgcacagttcacctgctgccgttgtcgtcgccgccgcggctcccggggctggatggggggccgaggccagccagtggcacccggaagaaagagacgcggcggcggcgacgccgacaccctcaggacgagtgtccggacttgcccacagcctcaaggaggagacggcgaggcccggcccccgctgtccctggtgtaaagaagtcgccgtagccgtcgcggccgggactccccgggctctcgcccttcaggtttcgttgacactcaggaccgtacgtacgctgcgccatgttcaagaaactgaagcaaaagatcagcgaggagcagcagcagctccagcaggcgctggctcctgctcaggcgtcctccaattcttcaacaccaacaagaatgaggagcaggacatcttcatttacagagcaacttgatgaaggtacacccaatagagagtcaggtgacacacagtcttttgcacagaagctccagctccgggtgccctccgtggagtctttgtttcgaagtccgataaaggaatctctattccggtcttcttctaaagagtctttggtacgaacatcttccagagaatccctgaatcgacttgacctggacagttctactgccagttttgatccaccctctgatatggatagcgaggctgaagacttggtagggaattcagacagtctcaacaaagaacagttgattcagcggttgcgaagaatggaacgaagcttaagtagctacaggggaaaatattctgagcttgttacagcttatcagatgcttcagagagagaagaaaaagctacaaggtatattaagtcagagtcaggataaatcacttcggagaatagcagaattaagagaggagctccaaatggaccagcaggcaaagaaacatctgcaagaggagtttgatgcatctttagaggagaaagatcagtatatcagtgttctccaaactcaggtttctctactgaaacaacgattacgaaatggcccgatgaatgttgatgtactgaaaccacttcctcagctggaaccacaggctgaagtcttcactaaagaagagaatccagaaagtgatggagagccagtagtggaagatggaacttctgtaaaaacactggaaacactccagcaaagagtgaagcgtcaagagaacctacttaagcgttgtaaggaaacaattcagtcacataaggaacaatgtacactattaactagtgaaaaagaagctctgcaagaacaactggatgaaagacttcaagaactagaaaagataaaggaccttcatatggccgagaagactaaacttatcactcagttgcgtgatgcaaagaacttaattgaacagcttgaacaagataagggaatggtaatcgcagagacaaaacgtcagatgcatgaaaccctggaaatgaaagaagaagaaattgctcaactccgtagtcgcatcaaacagatgactacccagggagaggaattacgggaacagaaagaaaagtccgaaagagctgcttttgaggaacttgaaaaagctttgagtacagcccaaaaaacagaggaagcacggagaaaactgaaggcagaaatggatgaacaaataaaaactatcgaaaaaacaagtgaggaggaacgcatcagtcttcaacaggaattaagtcgggtgaaacaggaggttgttgatgtaatgaaaaaatcctcagaagaacaaattgctaagctacagaagcttcatgaaaaggagctggccagaaaagagcaggaactgaccaagaagcttcagacccgagaaagggaatttcaggaacaaatgaaagtagctcttgaaaagagtcaatcagaatatttgaagatcagccaagaaaaagaacagcaagaatctttggccctagaagagttagagttgcagaaaaaagcaatcctcacagaaagtgaaaataaacttcgggaccttcagcaagaagcagagacttacagaactagaattcttgaattggaaagttctttggaaaaaagcttacaagaaaacaaaaatcagtcaaaagatttggctgttcatctggaagctgaaaaaaataagcacaataaggagattacagtcatggttgaaaaacacaagacagaattggaaagccttaagcatcagcaggatgccctttggactgaaaaactccaagtcttaaagcaacaatatcagactgaaatggaaaaacttagggaaaagtgtgaacaagaaaaagaaacattgttgaaagacaaagagattatcttccaggcccacatagaagaaatgaatgaaaagactttagaaaagcttgatgtgaagcaaacagaactagaatcattatcttctgaactgtcagaagtattaaaagcccgtcacaaactagaagaggaactttctgttctgaaagatcaaacagataaaatgaagcaggaattagaggccaagatggatgaacagaaaaatcatcaccagcagcaagttgacagtatcattaaagaacacgaggtatctatccagaggactgagaaggcattaaaagatcaaattaatcaacttgagcttctcttgaaggaaagggacaagcatttgaaagagcatcaggctcatgtagaaaatttagaggcagatattaaaaggtctgaaggggaactccagcaggcatctgctaagctggacgtttttcagtcttaccagagtgccacacatgagcagacaaaagcatatgaggaacagttggcccaattgcagcagaagttgttggatttggaaacagaaagaattcttcttaccaaacaggttgctgaagttgaagcacaaaagaaagatgtttgtactgagttagatgctcacaaaatccaggtgcaggacttaatgcagcaacttgaaaaacaaaatagtgaaatggagcaaaaagtaaaatctttaacccaagtctatgagtccaaacttgaagatggtaacaaagaacaggaacagacaaagcaaatcttggtggaaaaggaaaatatgattttacaaatgagagaaggacagaagaaagaaattgagatactcacacagaaattgtcagccaaggaggacagtattcatattttgaatgaggaatatgaaaccaaatttaaaaaccaagaaaaaaagatggaaaaagttaagcagaaagcaaaggagatgcaagaaacgttaaagaaaaaattactggatcaggaagccaaacttaagaaagagcttgaaaatactgctctagagcttagtcagaaagaaaaacagtttaatgccaaaatgctggaaatggcacaggctaactcagctggaatcagtgatgcagtgtcaagactggaaacaaaccaaaaagaacaaatagaaagtcttactgaggttcatcgacgagaactcaatgatgtcatatcaatctgggaaaagaaacttaatcagcaagctgaagaacttcaggaaatacatgaaatccaattacaggaaaaagaacaagaggtagcagaactgaaacaaaagatcctcctatttgggtgtgaaaaagaagagatgaacaaggaaataacatggctgaaggaagaaggtgttaagcaggatacaacattaaatgaattacaggaacagttaaagcagaagtctgcccatgtgaattctcttgcacaagatgaaactaaactgaaagctcatcttgaaaagctagaggttgacttgaataagtctctgaaggaaaatacttttcttcaagagcagctagttgaactgaagatgctggcagaagaagataagcggaaggtttctgagttgactagcaagttgaaaaccacagatgaagaattccagagtttgaaatcttcacatgaaaaaagtaacaaaagcctagaggacaagagcttggaatttaaaaaactgtctgaggaactagcgattcagctagatatttgctgtaagaaaaccgaagccttattagaagctaaaacaaatgagctaatcaacattagtagtagtaaaactaatgccattctttctaggatttctcattgtcagcaccgtacaactaaagttaaggaggcactgttaattaaaacttgcacagtttctgaattagaagcacaacttagacagttgacagaggagcaaaatacactaaatatttcttttcaacaggctactcatcagttagaagaaaaagaaaatcaaattaagagcatgaaggctgatattgaaagtcttgtaacagaaaaagaagccttacagaaggaaggaggcaatcagcaacaggctgcttctgaaaaggagtcttgtataacacagttgaagaaagagttatctgaaaacatcaatgctgtcacattgatgaaagaagagcttaaagaaaaaaaagttgagattagcagtcttagtaaacaactaactgatttgaatgttcagcttcaaaatagcatcagcctatccgaaaaagaagcagccatttcatcactaagaaagcagtatgatgaagaaaaatgtgaattgctggatcaggtgcaagatttatcttttaaagttgacactctgagtaaagagaaaatttctgctcttgagcaggtagatgactggtccaataaattctcagaatggaagaagaaagcacagtcaagatttacacagcatcaaaacactgttaaagaattgcagatccagcttgagttaaaatcaaaggaagcttatgaaaaggatgagcagataaatttattgaaggaagagcttgatcagcaaaataaaagatttgattgtttaaagggtgaaatggaagacgacaagagcaagatggagaaaaaggagtctaatttagaaacagagttaaagtctcaaacagcaagaattatggaattagaggaccatattacccagaaaactattgaaatagagtccttaaatgaagttcttaaaaattacaatcaacaaaaggatattgaacacaaagaattggttcagaaacttcaacattttcaagagttaggagaagaaaaggacaacagggttaaagaagctgaagaaaaaatcttaacacttgaaaaccaagtttattccatgaaagctgaacttgaaactaagaagaaagaattagaacatgtgaatttaagtgtgaaaagcaaagaggaggagttaaaggcattggaagataggcttgagtcagaaagtgctgcaaaattagcagagttgaagagaaaagctgaacaaaaaattgctgccattaagaagcagttgttatctcaaatggaagagaaagaagaacagtataaaaaaggtacagaaagccatttgagtgagctaaatacaaaattgcaggaaagagaaagggaagttcacatcttggaagaaaaacttaagtcagtggaaagttcacagtcagaaacattaattgtacccagatcagcaaaaaatgtggcagcatatactgaacaagaagaagcagattcccaaggctgtgtgcagaagacatatgaagaaaaaatcagtgttttacaaagaaacttaactgaaaaagaaaagctattgcagagggtagggcaggaaaaagaagagacagtttcttctcattttgaaatgcgatgccaataccaggagcgcttaataaagctagaacatgctgaggcaaagcaacatgaagatcaaagtatgataggtcatcttcaagaggagcttgaagaaaaaaacaagaaatattccttgatagtagcccagcatgtggaaaaagaaggaggtaaaaataacatacaggcaaagcaaaacttggaaaatgtgtttgacgacgtccagaaaaccctccaggagaaggaactaacctgtcagattttggagcaaaagataaaagagctggattcctgcttagtaagacagaaagaagtacatagagttgaaatggaagagttgacctcaaaatatgaaaaattacaggctttacaacagatggatggaagaaataaacccacagaacttttggaagaaaacactgaagaaaagtccaaatcacatttggtccaacccaaattgcttagtaacatggaagcccagcacaatgatctggagtttaaattagccggggcagaacgggagaaacagaaactgggcaaggagattgttagattgcagaaagaccttcgaatgttgagaaaggagcatcagcaagaattggaaatactaaagaaagaatatgatcaagaaagggaagagaaaatcaaacaggagcaggaagatcttgaactgaagcacaattccacattaaaacagctgatgagggagtttaatacacagctggcacaaaaggaacaagagctggaaatgaccataaaagaaactatcaataaggcccaggaggtggaggctgaacttttagaaagccatcaagaagagacaaatcagttacttaaaaaaattgctgagaaagatgatgatctaaaacgaacagccaaaagatatgaagaaatccttgatgctcgtgaagaagaaatgactgcaaaagtaagggacctgcagactcaacttgaggagctgcagaagaaataccagcaaaagctagagcaggaggagaaccctggcaatgataatgtaacaattatggagctacagacacagctagcacagaagacgactttaatcagtgattcgaaattgaaagagcaagagttcagagaacagattcacaatttagaagaccgtttgaagaaatatgaaaagaatgtatatgcaacaactgtggggacaccttacaaaggtggcaatttgtaccatacggatgtctcactctttggagaacctaccgaatttgagtatttgcgaaaagtgctttttgagtatatgatgggtcgtgagactaagaccatggcaaaagttataaccaccgtactgaagttccctgatgatcagactcagaaaattttggaaagagaagatgctcggctgatgtttacttcacctcgcagtggtatcttctgagtaaaccatcagtctgtgcttagttaacatgtgtcatggctccgatcttcatcttgaagaagagtgacattgggtgactgctgcttggaaaactgtccacacttgctactctttgagaatgaagttgtcattcagggcccctcatgtagccaaaagaccaagaaaaatctggcccacagataagttgcagactgcctttaaaatagattttatcagtggagaaatggtgatagttttttcttcagttttctcttgggaagagttttatgttgtttaaaagatattttgataacttaacctgctttatgggcttacataatattcctttcatccattctttttaaagaacggcttacctttcctatttatttttagggtgattttttaaaaagacttgtgcaatacattttgaggtgaaacttagtggattttttctgataaattagagcatttaattgactattttattcaggttgatctgttgaatatttgctaaagaccagttctttaagctaagacatgtaaaaaatcccaaatggcagtacctcattgtttacttagcttttgtacttatatttttcagaggaaaaaacactactgtaaattgtgaatagccaatacataactgtattgtatgcaaatctgtgattgttggcagtgtcatctctgagaaacagataaataaagtttatttactatataa

SEQ ID NO: 300189 - DNA, 1549 bp, Homo sapiens
ccctggcgcctggtatcagggacttcccgacgctggaagagttcagggaagggaagcgggcccctctggcaccgaagacacagaatcctagctacagctactaaagaaaagaacactatcaattagggcccgcgtcaggttctctggatctccccttctcccatccttgacgctcatccctgtgttctttgcggtgggcccgtcggccctgctgccatcgatagaagcagcactctccccgtctgatttcgcagggccaaagcccaggtgagagtcagggtagtgttcagactagcccacgctccggttctgagccgcgacggcggtctccgcacgcaacgaaatcaggcaggaccgaaccttgcgtcctccagtgcagcgagttcggaagcgaccggccgagcgcgcatgtgcgggacccgacattgtgcttgtcccatccggtgctccgtagttagcctctgtgagctccacgtaggccgcgcaagcgcccttggcgcacagttcacctgctgccgttgtcgtcgccgccgcggctcccggggctggatggggggccgaggccagccagtggcacccggaagaaagagacgcggcggcggcgacgccgacaccctcaggacgagtgtccggacttgcccacagcctcaaggaggagacggcgaggcccggcccccgctgtccctggtgtaaagaagtcgccgtagccgtcgcggccgggactccccgggctctcgcccttcaggtttcgttgacactcaggaccgtacgtacgctgcgccatgttcaagaaactgaagcaaaagatcagcgaggagcagcagcagctccagcaggcgctggctcctgctcaggtacgatggccgccgctctcctccctggttccgaatatctcttgaaccggcccgcggacgaaagaggcggggggagtggggaagttcttccgtgacctttaacccctaacccgcacttttcccaaactccggacccagaaggagctccgggcggtgcaggtcgtccgtaactcctgacctggattttcccatcgcaaaacttcatccagtcaatgagtggatgggggtggctggatccctcgtgacattccatctccgttaagagttttctcctaaggccagagtccgaacttgcatgatttctgatccatatttgaggttttcccactcatctgagaccccacgctgggaatgagggcggggtggaaaaacccgggtcccttgtgatatctgacctctgctcgaggtgtccccctctcttttgccagtcgtgagattttgtatggaatggccaggatcccgcacaattgaccctcgacggaagtctcctaattccaaacccaggtccagggattgaaggctggggagtagagccatcctgggtcaggctgctggtaggagcggtgggacctgaaagacgtggcggcgtggccgcgtccagcgcccgaggctgttcacgagttagtcacttcgcataacttggttaatccgggactgggcgggcggaggggcagacactctgcctgtccggagct

SEQ ID NO: 300190 - DNA, 1524 bp, Homo sapiens
ccctggcgcctggtatcagggacttcccgacgctggaagagttcagggaagggaagcgggcccctctggcaccgaagacacagaatcctagctacagctactaaagaaaagaacactatcaattagggcccgcgtcaggttctctggatctccccttctcccatccttgacgctcatccctgtgttctttgcggtgggcccgtcggccctgctgccatcgatagaagcagcactctccccgtctgatttcgcagggccaaagcccaggtgagagtcagggtagtgttcagactagcccacgctccggttctgagccgcgacggcggtctccgcacgcaacgaaatcaggcaggaccgaaccttgcgtcctccagtgcagcgagttcggaagcgaccggccgagcgcgcatgtgcgggacccgacattgtgcttgtcccatccggtgctccgtagttagcctctgtgagctccacgtaggccgcgcaagcgcccttggcgcacagttcacctgctgccgttgtcgtcgccgccgcggctcccggggctggatggggggccgaggccagccagtggcacccggaagaaagagacgcggcggcggcgacgccgacaccctcaggacgagtgtccggacttgcccacagcctcaaggaggagacggcgaggcccggcccccgctgtccctggtgtaaagaagtcgccgtagccgtcgcggccgggactccccgggctctcgcccttcaggtttcgttgacactcaggaccgtacgtacgctgcgccatgttcaagaaactgaagcaaaagatcagcgaggagcagcagcagctccagcaggcgctggctcctgctcaggcgtcctccaattcttcaacaccaacaagaatgaggagcaggacatcttcatttacagagcaacttgatgaaggtacacccaatagagagaatgcatctactcatgcctcgaaatctcctgacagtgttaatggaagtgaaccaagcattcctcagtcaggtgacacacagtctttgcacagaagctccagctccgggtgccctccgtggagtctttgtttcgaagtccgataaaggaatctctattccggtcttcttctaaagagtctttggtacgaacatcttccagagaatccctgaatcgacttgacctggacagttctactgccagttttgatccaccctctgatatggatagcgaggctgaagacttggtagggaattcagacagtctcaacaaagaacagttgattcagcggtgcgaagaatggaacgaagcttaagtagctacagggggaaatatacgggaggggatataaggtcgagtcagggataatcacttgcgggcatagcggcacatagagggagtccccaggggccactgcggccaagacaacttttgtcacagaggaccatggaggcccctttcagcgggcacaccagcattcggggtgtccgaaccagcgtctttacgacaacgccatacgaaggagccgagcagttagttact

SEQ ID NO: 300191 - DNA, 1286 bp, Homo sapiens
ccctggcgcctggtatcagggacttcccgacgctggaagagttcagggaagggaagcgggcccctctggcaccgaagacacagaatcctagctacagctactaaagaaaagaacactatcaattagggcccgcgtcaggttctctggatctccccttctcccatccttgacgctcatccctgtgttctttgcggtgggcccgtcggccctgctgccatcgatagaagcagcactctccccgtctgatttcgcagggccaaagcccaggtgagagtcagggtagtgttcagactagcccacgctccggttctgagccgcgacggcggtctccgcacgcaacgaaatcaggcaggaccgaaccttgcgtcctccagtgcagcgagttcggaagcgaccggccgagcgcgcatgtgcgggacccgacattgtgcttgtcccatccggtgctccgtagttagcctctgtgagctccacgtaggccgcgcaagcgcccttggcgcacagttcacctgctgccgttgtcgtcgccgccgcggctcccggggctggatggggggccgaggccagccagtggcacccggaagaaagagacgcggcggcggcgacgccgacaccctcaggacgagtgtccggacttgcccacagcctcaaggaggagacggcgaggcccggcccccgctgtccctggtgtaaagaagtcgccgtagccgtcgcggccgggactccccgggctctcgcccttcaggtttcgttgacactcaggaccgtacgtacgctgcgccatgttcaagaaactgaagcaaaagatcagcgaggagcagcagcagctccagcaggcgctggctcctgctcaggcgtcctccaattcttcaacaccaacaagaatgaggagcaggacatcttcatttacagagcaacttgatgaaggtacacccaatagagaggtaagtttggaattccttttctagtatacctctcaaaagaaactaatctaaaatgtatgctgttgataacaaaatgggaaacttttgacaggtcagctatttaattcctaggtagagtttttattagtaacacaattggtcttttttttttttttttcacaaatagcagttatgatttatgtctgtctgtctgtctgtatgtatgtatgtatgtttttgagacagggtctggttctgtcacccaggctagagtgtggtggcacgatcactgcacattgcagccttgaccttctggattcaagtgatcctctaacttcagcctcctgagtagctgggactata

SEQ ID NO: 300192 - DNA, 1075 bp, Homo sapiens
ccctggcgcctggtatcagggacttcccgacgctggaagagttcagggaagggaagcgggcccctctggcaccgaagacacagaatcctagctacagctactaaagaaaagaacactatcaattagggcccgcgtcaggttctctggatctccccttctcccatccttgacgctcatccctgtgttctttgcggtgggcccgtcggccctgctgccatcgatagaagcagcactctccccgtctgatttcgcagggccaaagcccaggtgagagtcagggtagtgttcagactagcccacgctccggttctgagccgcgacggcggtctccgcacgcaacgaaatcaggcaggaccgaaccttgcgtcctccagtgcagcgagttcggaagcgaccggccgagcgcgcatgtgcgggacccgacattgtgcttgtcccatccggtgctccgtagttagcctctgtgagctccacgtaggccgcgcaagcgcccttggcgcacagttcacctgctgccgttgtcgtcgccgccgcggctcccggggctggatggggggccgaggccagccagtggcacccggaagaaagagacgcggcggcggcgacgccgacaccctcaggacgagtgtccggacttgcccacagcctcaaggaggagacggcgaggcccggcccccgctgtccctggtgtaaagaagtcgccgtagccgtcgcggccgggactccccgggctctcgcccttcaggtttcgttgacactcaggaccgtacgtacgctgcgccatgttcaagaaactgaagcaaaagatcagcgaggagcagcagcagctccagcaggcgctggctcctgctcagatgaaggagtgaggctcgaagaggtgaagtaacttgcctaatgttacgcagctagtgttagagtcttcagaaaagtattaacacagaaggatatttgtgttaaaagacagaagcagcaggtgttggagttcttggttgtaagcaacaaaaagtcaatctaggtaagcagaaaaataatttattgaagactctttaccctacagaatttccctgaggtccca

SEQ ID NO: 300193 - DNA, 559 bp, Homo sapiens
  misc_feature (312)..(312): n is a, c, g, or t
aagacccgtctgagcagctgggaagaaaaatcaaacaggagcaggaagatcttgaactgaagcacaattccacattaaaacagctgatgagggagtttaatacacagctggcacaaaaggaacaagagctggaaatgaccataaaagaaactatcaataaggcccaggaggtggaggctgaccatgtccttggggaacaggaagtctcatactatggccaggacctggacctgggcccgggcctgggcctggacctgggcccgggcctgggcctggacctggcattggaggcataaacattccaggaggtgngggaggaggaagcccaggaggagggggtgggaaaggaatcatacttggcagagcaacttcatcaacaactaggggatcatttccatgatcaaactgacaaaggtcaccaagtacacaaaatcctctttcatcataatctctgcatcgcctcttggggggtaggtttcgaccaaaagaatgggaagagctatgattgttatagtaattagaccaactctcagttgtgttttcagagtggggagcggtg

SEQ ID NO: 300194 - DNA, 8181 bp, Homo sapiens
ccctggcgcctggtatcagggacttcccgacgctggaagagttcagggaagggaagcgggcccctctggcaccgaagacacagaatcctagctacagctactaaagaaaagaacactatcaattagggcccgcgtcaggttctctggatctccccttctcccatccttgacgctcatccctgtgttctttgcggtgggcccgtcggccctgctgccatcgatagaagcagcactctccccgtctgatttcgcagggccaaagcccaggtgagagtcagggtagtgttcagactagcccacgctccggttctgagccgcgacggcggtctccgcacgcaacgaaatcaggcaggaccgaaccttgcgtcctccagtgcagcgagttcggaagcgaccggccgagcgcgcatgtgcgggacccgacattgtgcttgtcccatccggtgctccgtagttagcctctgtgagctccacgtaggccgcgcaagcgcccttggcgcacagttcacctgctgccgttgtcgtcgccgccgcggctcccggggctggatggggggccgaggccagccagtggcacccggaagaaagagacgcggcggcggcgacgccgacaccctcaggacgagtgtccggacttgcccacagcctcaaggaggagacggcgaggcccggcccccgctgtccctggtgtaaagaagtcgccgtagccgtcgcggccgggactccccgggctctcgcccttcaggtttcgttgacactcaggaccgtacgtacgctgcgccatgttcaagaaactgaagcaaaagatcagcgaggagcagcagcagctccagcaggcgctggctcctgctcaggcgtcctccaattcttcaacaccaacaagaatgaggagcaggacatcttcatttacagagcaacttgatgaaggtacacccaatagagagaatgcatctactcatgcctcgaaatctcctgacagtgttaatggaagtgaaccaagcattcctcagtcaggtgacacacagtcttttgcacagaagctccagctccgggtgccctccgtggagtctttgtttcgaagtccgataaaggaatctctattccggtcttcttctaaagagtctttggtacgaacatcttccagagaatccctgaatcgacttgacctggacagttctactgccagttttgatccaccctctgatatggatagcgaggctgaagacttggtagggaattcagacagtctcaacaaagaacagttgattcagcggttgcgaagaatggaacgaagcttaagtagctacaggggaaaatattctgagcttgttacagcttatcagatgcttcagagagagaagaaaaagctacaaggtatattaagtcagagtcaggataaatcacttcggagaatagcagaattaagagaggagctccaaatggaccagcaggcaaagaaacatctgcaagaggagtttgatgcatctttagaggagaaagatcagtatatcagtgttctccaaactcaggtttctctactgaaacaacgattacgaaatggcccgatgaatgttgatgtactgaaaccacttcctcagctggaaccacaggctgaagtcttcactaaagaagagaatccagaaagtgatggagagccagtagtggaagatggaacttctgtaaaaacactggaaacactccagcaaagagtgaagcgtcaagagaacctacttaagcgttgtaaggaaacaattcagtcacataaggaacaatgtacactattaactagtgaaaaagaagctctgcaagaacaactggatgaaagacttcaagaactagaaaagataaaggaccttcatatggccgagaagactaaacttatcactcagttgcgtgatgcaaagaacttaattgaacagcttgaacaagataagggaatggtaatcgcagagacaaaacgtcagatgcatgaaaccctggaaatgaaagaagaagaaattgctcaactccgtagtcgcatcaaacagatgactacccagggagaggaattacgggaacagaaagaaaagtccgaaagagctgcttttgaggaacttgaaaaagctttgagtacagcccaaaaaacagaggaagcacggagaaaactgaaggcagaaatggatgaacaaataaaaactatcgaaaaaacaagtgaggaggaacgcatcagtcttcaacaggaattaagtcgggtgaaacaggaggttgttgatgtaatgaaaaaatcctcagaagaacaaattgctaagctacagaagcttcatgaaaaggagctggccagaaaagagcaggaactgaccaagaagcttcagacccgagaaagggaatttcaggaacaaatgaaagtagctcttgaaaagagtcaatcagaatatttgaagatcagccaagaaaaagaacagcaagaatctttggccctagaagagttagagttgcagaaaaaagcaatcctcacagaaagtgaaaataaacttcgggaccttcagcaagaagcagagacttacagaactagaattcttgaattggaaagttctttggaaaaaagcttacaagaaaacaaaaatcagtcaaaagatttggctgttcatctggaagctgaaaaaaataagcacaataaggagattacagtcatggttgaaaaacacaagacagaattggaaagccttaagcatcagcaggatgccctttggactgaaaaactccaagtcttaaagcaacaatatcagactgaaatggaaaaacttagggaaaagtgtgaacaagaaaaagaaacattgttgaaagacaaagagattatcttccaggcccacatagaagaaatgaatgaaaagactttagaaaagcttgatgtgaagcaaacagaactagaatcattatcttctgaactgtcagaagtattaaaagcccgtcacaaactagaagaggaactttctgttctgaaagatcaaacagataaaatgaagcaggaattagaggccaagatggatgaacagaaaaatcatcaccagcagcaagttgacagtatcattaaagaacacgaggtatctatccagaggactgagaaggcattaaaagatcaaattaatcaacttgagcttctcttgaaggaaagggacaagcatttgaaagagcatcaggctcatgtagaaaatttagaggcagatattaaaaggtctgaaggggaactccagcaggcatctgctaagctggacgtttttcagtcttaccagagtgccacacatgagcagacaaaagcatatgaggaacagttggcccaattgcagcagaagttgttggatttggaaacagaaagaattcttcttaccaaacaggttgctgaagttgaagcacaaaagaaagatgtttgtactgagttagatgctcacaaaatccaggtgcaggacttaatgcagcaacttgaaaaacaaaatagtgaaatggagcaaaaagtaaaatctttaacccaagtctatgagtccaaacttgaagatggtaacaaagaacaggaacagacaaagcaaatcttggtggaaaaggaaaatatgattttacaaatgagagaaggacagaagaaagaaattgagatactcacacagaaattgtcagccaaggaggacagtattcatattttgaatgaggaatatgaaaccaaatttaaaaaccaagaaaaaaagatggaaaaagttaagcagaaagcaaaggagatgcaagaaacgttaaagaaaaaattactggatcaggaagccaaacttaagaaagagcttgaaaatactgctctagagcttagtcagaaagaaaaacagtttaatgccaaaatgctggaaatggcacaggctaactcagctggaatcagtgatgcagtgtcaagactggaaacaaaccaaaaagaacaaatagaaagtcttactgaggttcatcgacgagaactcaatgatgtcatatcaatctgggaaaagaaacttaatcagcaagctgaagaacttcaggaaatacatgaaatccaattacaggaaaaagaacaagaggtagcagaactgaaacaaaagatcctcctatttgggtgtgaaaaagaagagatgaacaaggaaataacatggctgaaggaagaaggtgttaagcaggatacaacattaaatgaattacaggaacagttaaagcagaagtctgcccatgtgaattctcttgcacaagatgaaactaaactgaaagctcatcttgaaaagctagaggttgacttgaataagtctctgaaggaaaatacttttcttcaagagcagctagttgaactgaagatgctggcagaagaagataagcggaaggtttctgagttgactagcaagttgaaaaccacagatgaagaattccagagtttgaaatcttcacatgaaaaaagtaacaaaagcctagaggacaagagcttggaatttaaaaaactgtctgaggaactagcgattcagctagatatttgctgtaagaaaaccgaagccttattagaagctaaaacaaatgagctaatcaacattagtagtagtaaaactaatgccattctttctaggatttctcattgtcagcaccgtacaactaaagttaaggaggcactgttaattaaaacttgcacagtttctgaattagaagcacaacttagacagttgacagaggagcaaaatacactaaatatttcttttcaacaggctactcatcagttagaagaaaaagaaaatcaaattaagagcatgaaggctgatattgaaagtcttgtaacagaaaaagaagccttacagaaggaaggaggcaatcagcaacaggctgcttctgaaaaggagtcttgtataacacagttgaagaaagagttatctgaaaacatcaatgctgtcacattgatgaaagaagagcttaaagaaaaaaaagttgagattagcagtcttagtaaacaactaactgatttgaatgttcagcttcaaaatagcatcagcctatccgaaaaagaagcagccatttcatcactaagaaagcagtatgatgaagaaaaatgtgaattgctggatcaggtgcaagatttatcttttaaagttgacactctgagtaaagagaaaatttctgctcttgagcaggtagatgactggtccaataaattctcagaatggaagaagaaagcacagtcaagatttacacagcatcaaaacactgttaaagaattgcagatccagcttgagttaaaatcaaaggaagcttatgaaaaggatgagcagataaatttattgaaggaagagcttgatcagcaaaataaaagatttgattgtttaaagggtgaaatggaagacgacaagagcaagatggagaaaaaggagtctaatttagaaacagagttaaagtctcaaacagcaagaattatggaattagaggaccatattacccagaaaactattgaaatagagtccttaaatgaagttcttaaaaattacaatcaacaaaaggatattgaacacaaagaattggttcagaaacttcaacattttcaagagttaggagaagaaaaggacaacagggttaaagaagctgaagaaaaaatcttaacacttgaaaaccaagtttattccatgaaagctgaacttgaaactaagaagaaagaattagaacatgtgaatttaagtgtgaaaagcaaagaggaggagttaaaggcattggaagataggcttgagtcagaaagtgctgcaaaattagcagagttgaagagaaaagctgaacaaaaaattgctgccattaagaagcagttgttatctcaaatggaagagaaagaagaacagtataaaaaaggtacagaaagccatttgagtgagctaaatacaaaattgcaggaaagagaaagggaagttcacatcttggaagaaaaacttaagtcagtggaaagttcacagtcagaaacattaattgtacccagatcagcaaaaaatgtggcagcatatactgaacaagaagaagcagattcccaaggctgtgtgcagaagacatatgaagaaaaaatcagtgttttacaaagaaacttaactgaaaaagaaaagctattgcagagggtagggcaggaaaaagaagagacagtttcttctcattttgaaatgcgatgccaataccaggagcgcttaataaagctagaacatgctgaggcaaagcaacatgaagatcaaagtatgataggtcatcttcaagaggagcttgaagaaaaaaacaagaaatattccttgatagtagcccagcatgtggaaaaagaaggaggtaaaaataacatacaggcaaagcaaaacttggaaaatgtgtttgacgacgtccagaaaaccctccaggagaaggaactaacctgtcagattttggagcaaaagataaaagagctggattcctgcttagtaagacagaaagaagtacatagagttgaaatggaagagttgacctcaaaatatgaaaaattacaggctttacaacagatggatggaagaaataaacccacagaacttttggaagaaaacactgaagaaaagtccaaatcacatttggtccaacccaaattgcttagtaacatggaagcccagcacaatgatctggagtttaaattagccggggcagaacgggagaaacagaaactgggcaaggagattgttagattgcagaaagaccttcgaatgttgagaaaggagcatcagcaagaattggaaatactaaagaaagaatatgatcaagaaagggaagagaaaatcaaacaggagcaggaagatcttgaactgaagcacaattccacattaaaacagctgatgagggagtttaatacacagctggcacaaaaggaacaagagctggaaatgaccataaaagaaactatcaataaggcccaggaggtggaggctgaacttttagaaagccatcaagaagagacaaatcagttacttaaaaaaattgctgagaaagatgatgatctaaaacgaacagccaaaagatatgaagaaatccttgatgctcgtgaagaagaaatgactgcaaaagtaagggacctgcagactcaacttgaggagctgcagaagaaataccagcaaaagctagagcaggaggagaaccctggcaatgataatgtaacaattatggagctacagacacagctagcacagaagacgactttaatcagtgattcgaaattgaaagagcaagagttcagagaacagattcacaatttagaagaccgtttgaagaaatatgaaaagaatgtatatgcaacaactgtggggacaccttacaaaggtggcaatttgtaccatacggatgtctcactctttggagaacctaccgaatttgagtatttgcgaaaagtgctttttgagtatatgatgggtcgtgagactaagaccatggcaaaagttataaccaccgtactgaagttccctgatgatcagactcagaaaattttggaaagagaagatgctcggctgatgtcatggctccgatcttcatcttgaagaagagtgacattgggtgactgctgcttggaaaactgtccacacttgctactctttgagaatgaagttgtcattcagggcccctcatgtagccaaaagaccaagaaaaatctggcccacagataagttgcagactgcctttaaaatagattttatcagtggagaaatggtgatagttttttcttcagttttctcttgggaagagttttatgttgtttaaaagatattttgataacttaacctgctttatgggcttacataatattcctttcatccattctttttaaagaacggcttacctttcctatttatttttagggtgattttttaaaaagacttgtgcaatacattttgaggtgaaacttagtggattttttctgataaattagagcatttaattgactattttattcaggttgatctgttgaatatttgctaaagaccagttctttaagctaagacatgtaaaaaatcccaaatggcagtacctcattgtttacttagcttttgtacttatatttttcagaggaaaaaacactactgtaaattgtgaatagccaatacataactgtattgtatgcaaatctgtgattgttggcagtgtcatctctgagaaacagataaataaagtttatttactatataa

SEQ ID NO: 300195 - DNA, 8180 bp, Homo sapiens
ccctggcgcctggtatcagggacttcccgacgctggaagagttcagggaagggaagcgggcccctctggcaccgaagacacagaatcctagctacagctactaaagaaaagaacactatcaattagggcccgcgtcaggttctctggatctccccttctcccatccttgacgctcatccctgtgttctttgcggtgggcccgtcggccctgctgccatcgatagaagcagcactctccccgtctgatttcgcagggccaaagcccaggtgagagtcagggtagtgttcagactagcccacgctccggttctgagccgcgacggcggtctccgcacgcaacgaaatcaggcaggaccgaaccttgcgtcctccagtgcagcgagttcggaagcgaccggccgagcgcgcatgtgcgggacccgacattgtgcttgtcccatccggtgctccgtagttagcctctgtgagctccacgtaggccgcgcaagcgcccttggcgcacagttcacctgctgccgttgtcgtcgccgccgcggctcccggggctggatggggggccgaggccagccagtggcacccggaagaaagagacgcggcggcggcgacgccgacaccctcaggacgagtgtccggacttgcccacagcctcaaggaggagacggcgaggcccggcccccgctgtccctggtgtaaagaagtcgccgtagccgtcgcggccgggactccccgggctctcgcccttcaggtttcgttgacactcaggaccgtacgtacgctgcgccatgttcaagaaactgaagcaaaagatcagcgaggagcagcagcagctccagcaggcgctggctcctgctcaggcgtcctccaattcttcaacaccaacaagaatgaggagcaggacatcttcatttacagagcaacttgatgaaggtacacccaatagagagaatgcatctactcatgcctcgaaatctcctgacagtgttaatggaagtgaaccaagcattcctcagtcaggtgacacacagtctttgcacagaagctccagctccgggtgccctccgtggagtctttgtttcgaagtccgataaaggaatctctattccggtcttcttctaaagagtctttggtacgaacatcttccagagaatccctgaatcgacttgacctggacagttctactgccagttttgatccaccctctgatatggatagcgaggctgaagacttggtagggaattcagacagtctcaacaaagaacagttgattcagcggttgcgaagaatggaacgaagcttaagtagctacaggggaaaatattctgagcttgttacagcttatcagatgcttcagagagagaagaaaaagctacaaggtatattaagtcagagtcaggataaatcacttcggagaatagcagaattaagagaggagctccaaatggaccagcaggcaaagaaacatctgcaagaggagtttgatgcatctttagaggagaaagatcagtatatcagtgttctccaaactcaggtttctctactgaaacaacgattacgaaatggcccgatgaatgttgatgtactgaaaccacttcctcagctggaaccacaggctgaagtcttcactaaagaagagaatccagaaagtgatggagagccagtagtggaagatggaacttctgtaaaaacactggaaacactccagcaaagagtgaagcgtcaagagaacctacttaagcgttgtaaggaaacaattcagtcacataaggaacaatgtacactattaactagtgaaaaagaagctctgcaagaacaactggatgaaagacttcaagaactagaaaagataaaggaccttcatatggccgagaagactaaacttatcactcagttgcgtgatgcaaagaacttaattgaacagcttgaacaagataagggaatggtaatcgcagagacaaaacgtcagatgcatgaaaccctggaaatgaaagaagaagaaattgctcaactccgtagtcgcatcaaacagatgactacccagggagaggaattacgggaacagaaagaaaagtccgaaagagctgcttttgaggaacttgaaaaagctttgagtacagcccaaaaaacagaggaagcacggagaaaactgaaggcagaaatggatgaacaaataaaaactatcgaaaaaacaagtgaggaggaacgcatcagtcttcaacaggaattaagtcgggtgaaacaggaggttgttgatgtaatgaaaaaatcctcagaagaacaaattgctaagctacagaagcttcatgaaaaggagctggccagaaaagagcaggaactgaccaagaagcttcagacccgagaaagggaatttcaggaacaaatgaaagtagctcttgaaaagagtcaatcagaatatttgaagatcagccaagaaaaagaacagcaagaatctttggccctagaagagttagagttgcagaaaaaagcaatcctcacagaaagtgaaaataaacttcgggaccttcagcaagaagcagagacttacagaactagaattcttgaattggaaagttctttggaaaaaagcttacaagaaaacaaaaatcagtcaaaagatttggctgttcatctggaagctgaaaaaaataagcacaataaggagattacagtcatggttgaaaaacacaagacagaattggaaagccttaagcatcagcaggatgccctttggactgaaaaactccaagtcttaaagcaacaatatcagactgaaatggaaaaacttagggaaaagtgtgaacaagaaaaagaaacattgttgaaagacaaagagattatcttccaggcccacatagaagaaatgaatgaaaagactttagaaaagcttgatgtgaagcaaacagaactagaatcattatcttctgaactgtcagaagtattaaaagcccgtcacaaactagaagaggaactttctgttctgaaagatcaaacagataaaatgaagcaggaattagaggccaagatggatgaacagaaaaatcatcaccagcagcaagttgacagtatcattaaagaacacgaggtatctatccagaggactgagaaggcattaaaagatcaaattaatcaacttgagcttctcttgaaggaaagggacaagcatttgaaagagcatcaggctcatgtagaaaatttagaggcagatattaaaaggtctgaaggggaactccagcaggcatctgctaagctggacgtttttcagtcttaccagagtgccacacatgagcagacaaaagcatatgaggaacagttggcccaattgcagcagaagttgttggatttggaaacagaaagaattcttcttaccaaacaggttgctgaagttgaagcacaaaagaaagatgtttgtactgagttagatgctcacaaaatccaggtgcaggacttaatgcagcaacttgaaaaacaaaatagtgaaatggagcaaaaagtaaaatctttaacccaagtctatgagtccaaacttgaagatggtaacaaagaacaggaacagacaaagcaaatcttggtggaaaaggaaaatatgattttacaaatgagagaaggacagaagaaagaaattgagatactcacacagaaattgtcagccaaggaggacagtattcatattttgaatgaggaatatgaaaccaaatttaaaaaccaagaaaaaaagatggaaaaagttaagcagaaagcaaaggagatgcaagaaacgttaaagaaaaaattactggatcaggaagccaaacttaagaaagagcttgaaaatactgctctagagcttagtcagaaagaaaaacagtttaatgccaaaatgctggaaatggcacaggctaactcagctggaatcagtgatgcagtgtcaagactggaaacaaaccaaaaagaacaaatagaaagtcttactgaggttcatcgacgagaactcaatgatgtcatatcaatctgggaaaagaaacttaatcagcaagctgaagaacttcaggaaatacatgaaatccaattacaggaaaaagaacaagaggtagcagaactgaaacaaaagatcctcctatttgggtgtgaaaaagaagagatgaacaaggaaataacatggctgaaggaagaaggtgttaagcaggatacaacattaaatgaattacaggaacagttaaagcagaagtctgcccatgtgaattctcttgcacaagatgaaactaaactgaaagctcatcttgaaaagctagaggttgacttgaataagtctctgaaggaaaatacttttcttcaagagcagctagttgaactgaagatgctggcagaagaagataagcggaaggtttctgagttgactagcaagttgaaaaccacagatgaagaattccagagtttgaaatcttcacatgaaaaaagtaacaaaagcctagaggacaagagcttggaatttaaaaaactgtctgaggaactagcgattcagctagatatttgctgtaagaaaaccgaagccttattagaagctaaaacaaatgagctaatcaacattagtagtagtaaaactaatgccattctttctaggatttctcattgtcagcaccgtacaactaaagttaaggaggcactgttaattaaaacttgcacagtttctgaattagaagcacaacttagacagttgacagaggagcaaaatacactaaatatttcttttcaacaggctactcatcagttagaagaaaaagaaaatcaaattaagagcatgaaggctgatattgaaagtcttgtaacagaaaaagaagccttacagaaggaaggaggcaatcagcaacaggctgcttctgaaaaggagtcttgtataacacagttgaagaaagagttatctgaaaacatcaatgctgtcacattgatgaaagaagagcttaaagaaaaaaaagttgagattagcagtcttagtaaacaactaactgatttgaatgttcagcttcaaaatagcatcagcctatccgaaaaagaagcagccatttcatcactaagaaagcagtatgatgaagaaaaatgtgaattgctggatcaggtgcaagatttatcttttaaagttgacactctgagtaaagagaaaatttctgctcttgagcaggtagatgactggtccaataaattctcagaatggaagaagaaagcacagtcaagatttacacagcatcaaaacactgttaaagaattgcagatccagcttgagttaaaatcaaaggaagcttatgaaaaggatgagcagataaatttattgaaggaagagcttgatcagcaaaataaaagatttgattgtttaaagggtgaaatggaagacgacaagagcaagatggagaaaaaggagtctaatttagaaacagagttaaagtctcaaacagcaagaattatggaattagaggaccatattacccagaaaactattgaaatagagtccttaaatgaagttcttaaaaattacaatcaacaaaaggatattgaacacaaagaattggttcagaaacttcaacattttcaagagttaggagaagaaaaggacaacagggttaaagaagctgaagaaaaaatcttaacacttgaaaaccaagtttattccatgaaagctgaacttgaaactaagaagaaagaattagaacatgtgaatttaagtgtgaaaagcaaagaggaggagttaaaggcattggaagataggcttgagtcagaaagtgctgcaaaattagcagagttgaagagaaaagctgaacaaaaaattgctgccattaagaagcagttgttatctcaaatggaagagaaagaagaacagtataaaaaaggtacagaaagccatttgagtgagctaaatacaaaattgcaggaaagagaaagggaagttcacatcttggaagaaaaacttaagtcagtggaaagttcacagtcagaaacattaattgtacccagatcagcaaaaaatgtggcagcatatactgaacaagaagaagcagattcccaaggctgtgtgcagaagacatatgaagaaaaaatcagtgttttacaaagaaacttaactgaaaaagaaaagctattgcagagggtagggcaggaaaaagaagagacagtttcttctcattttgaaatgcgatgccaataccaggagcgcttaataaagctagaacatgctgaggcaaagcaacatgaagatcaaagtatgataggtcatcttcaagaggagcttgaagaaaaaaacaagaaatattccttgatagtagcccagcatgtggaaaaagaaggaggtaaaaataacatacaggcaaagcaaaacttggaaaatgtgtttgacgacgtccagaaaaccctccaggagaaggaactaacctgtcagattttggagcaaaagataaaagagctggattcctgcttagtaagacagaaagaagtacatagagttgaaatggaagagttgacctcaaaatatgaaaaattacaggctttacaacagatggatggaagaaataaacccacagaacttttggaagaaaacactgaagaaaagtccaaatcacatttggtccaacccaaattgcttagtaacatggaagcccagcacaatgatctggagtttaaattagccggggcagaacgggagaaacagaaactgggcaaggagattgttagattgcagaaagaccttcgaatgttgagaaaggagcatcagcaagaattggaaatactaaagaaagaatatgatcaagaaagggaagagaaaatcaaacaggagcaggaagatcttgaactgaagcacaattccacattaaaacagctgatgagggagtttaatacacagctggcacaaaaggaacaagagctggaaatgaccataaaagaaactatcaataaggcccaggaggtggaggctgaacttttagaaagccatcaagaagagacaaatcagttacttaaaaaaattgctgagaaagatgatgatctaaaacgaacagccaaaagatatgaagaaatccttgatgctcgtgaagaagaaatgactgcaaaagtaagggacctgcagactcaacttgaggagctgcagaagaaataccagcaaaagctagagcaggaggagaaccctggcaatgataatgtaacaattatggagctacagacacagctagcacagaagacgactttaatcagtgattcgaaattgaaagagcaagagttcagagaacagattcacaatttagaagaccgtttgaagaaatatgaaaagaatgtatatgcaacaactgtggggacaccttacaaaggtggcaatttgtaccatacggatgtctcactctttggagaacctaccgaatttgagtatttgcgaaaagtgctttttgagtatatgatgggtcgtgagactaagaccatggcaaaagttataaccaccgtactgaagttccctgatgatcagactcagaaaattttggaaagagaagatgctcggctgatgtcatggctccgatcttcatcttgaagaagagtgacattgggtgactgctgcttggaaaactgtccacacttgctactctttgagaatgaagttgtcattcagggcccctcatgtagccaaaagaccaagaaaaatctggcccacagataagttgcagactgcctttaaaatagattttatcagtggagaaatggtgatagttttttcttcagttttctcttgggaagagttttatgttgtttaaaagatattttgataacttaacctgctttatgggcttacataatattcctttcatccattctttttaaagaacggcttacctttcctatttatttttagggtgattttttaaaaagacttgtgcaatacattttgaggtgaaacttagtggattttttctgataaattagagcatttaattgactattttattcaggttgatctgttgaatatttgctaaagaccagttctttaagctaagacatgtaaaaaatcccaaatggcagtacctcattgtttacttagcttttgtacttatatttttcagaggaaaaaacactactgtaaattgtgaatagccaatacataactgtattgtatgcaaatctgtgattgttggcagtgtcatctctgagaaacagataaataaagtttatttactatataa

SEQ ID NO: 300196 - DNA, 7583 bp, Homo sapiens
ccttacgctaggtacgaggctgggtttatgtccggacttgcccacagcctcaaggaggagacggcgaggcccggcccccgctgtccctggtgtaaagaagtcgccgtagccgtcgcggccgggactccccgggctctcgcccttcaggtttcgttgacactcaggaccgtacgtacgctgcgccatgttcaagaaactgaagcaaaagatcagcgaggagcagcagcagctccagcaggcgctggctcctgctcaggcgtcctccaattcttcaacaccaacaagaatgaggagcaggacatcttcatttacagagcaacttgatgaaggtacacccaatagagagaatgcatctactcatgcctcgaaatctcctgacagtgttaatggaagtgaaccaagcattcctcagtcaggtgacacacagtcttttgcacagaagctccagctccgggtgccctccgtggagtctttgtttcgaagtccgataaaggaatctctattccggtcttcttctaaagagtctttggtacgaacatcttccagagaatccctgaatcgacttgacctggacagttctactgccagttttgatccaccctctgatatggatagcgaggctgaagacttggtagggaattcagacagtctcaacaaagaacagttgattcagcggttgcgaagaatggaacgaagcttaagtagctacaggggaaaatattctgagcttgttacagcttatcagatgcttcagagagagaagaaaaagctacaaggtatattaagtcagagtcaggataaatcacttcggagaatagcagaattaagagaggagctccaaatggaccagcaggcaaagaaacatctgcaagaggagtttgatgcatctttagaggagaaagatcagtatatcagtgttctccaaactcaggtttctctactgaaacaacgattacgaaatggcccgatgaatgttgatgtactgaaaccacttcctcagctggaaccacaggctgaagtcttcactaaagaagagaatccagaaagtgatggagagccagtagtggaagatggaacttctgtaaaaacactggaaacactccagcaaagagtgaagcgtcaagagaacctacttaagcgttgtaaggaaacaattcagtcacataaggaacaatgtacactattaactagtgaaaaagaagctctgcaagaacaactggatgaaagacttcaagaactagaaaagataaaggaccttcatatggccgagaagactaaacttatcactcagttgcgtgatgcaaagaacttaattgaacagcttgaacaagataagggaatggtaatcgcagagacaaaacgtcagatgcatgaaaccctggaaatgaaagaagaagaaattgctcaactccgtagtcgcatcaaacagatgactacccagggagaggaattacgggaacagaaagaaaagtccgaaagagctgcttttgaggaacttgaaaaagctttgagtacagcccaaaaaacagaggaagcacggagaaaactgaaggcagaaatggatgaacaaataaaaactatcgaaaaaacaagtgaggaggaacgcatcagtcttcaacaggaattaagtcgggtgaaacaggaggttgttgatgtaatgaaaaaatcctcagaagaacaaattgctaagctacagaagcttcatgaaaaggagctggccagaaaagagcaggaactgaccaagaagcttcagacccgagaaagggaatttcaggaacaaatgaaagtagctcttgaaaagagtcaatcagaatatttgaagatcagccaagaaaaagaacagcaagaatctttggccctagaagagttagagttgcagaaaaaagcaatcctcacagaaagtgaaaataaacttcgggaccttcagcaagaagcagagacttacagaactagaattcttgaattggaaagttctttggaaaaaagcttacaagaaaacaaaaatcagtcaaaagatttggctgttcatctggaagctgaaaaaaataagcacaataaggagattacagtcatggttgaaaaacacaagacagaattggaaagccttaagcatcagcaggatgccctttggactgaaaaactccaagtcttaaagcaacaatatcagactgaaatggaaaaacttagggaaaagtgtgaacaagaaaaagaaacattgttgaaagacaaagagattatcttccaggcccacatagaagaaatgaatgaaaagactttagaaaagcttgatgtgaagcaaacagaactagaatcattatcttctgaactgtcagaagtattaaaagcccgtcacaaactagaagaggaactttctgttctgaaagatcaaacagataaaatgaagcaggaattagaggccaagatggatgaacagaaaaatcatcaccagcagcaagttgacagtatcattaaagaacacgaggtatctatccagaggactgagaaggcattaaaagatcaaattaatcaacttgagcttctcttgaaggaaagggacaagcatttgaaagagcatcaggctcatgtagaaaatttagaggcagatattaaaaggtctgaaggggaactccagcaggcatctgctaagctggacgtttttcagtcttaccagagtgccacacatgagcagacaaaagcatatgaggaacagttggcccaattgcagcagaagttgttggatttggaaacagaaagaattcttcttaccaaacaggttgctgaagttgaagcacaaaagaaagatgtttgtactgagttagatgctcacaaaatccaggtgcaggacttaatgcagcaacttgaaaaacaaaatagtgaaatggagcaaaaagtaaaatctttaacccaagtctatgagtccaaacttgaagatggtaacaaagaacaggaacagacaaagcaaatcttggtggaaaaggaaaatatgattttacaaatgagagaaggacagaagaaagaaattgagatactcacacagaaattgtcagccaaggaggacagtattcatattttgaatgaggaatatgaaaccaaatttaaaaaccaagaaaaaaagatggaaaaagttaagcagaaagcaaaggagatgcaagaaacgttaaagaaaaaattactggatcaggaagccaaacttaagaaagagcttgaaaatactgctctagagcttagtcagaaagaaaaacagtttaatgccaaaatgctggaaatggcacaggctaactcagctggaatcagtgatgcagtgtcaagactggaaacaaaccaaaaagaacaaatagaaagtcttactgaggttcatcgacgagaactcaatgatgtcatatcaatctgggaaaagaaacttaatcagcaagctgaagaacttcaggaaatacatgaaatccaattacaggaaaaagaacaagaggtagcagaactgaaacaaaagatcctcctatttgggtgtgaaaaagaagagatgaacaaggaaataacatggctgaaggaagaaggtgttaagcaggatacaacattaaatgaattacaggaacagttaaagcagaagtctgcccatgtgaattctcttgcacaagatgaaactaaactgaaagctcatcttgaaaagctagaggttgacttgaataagtctctgaaggaaaatacttttcttcaagagcagctagttgaactgaagatgctggcagaagaagataagcggaaggtttctgagttgactagcaagttgaaaaccacagatgaagaattccagagtttgaaatcttcacatgaaaaaagtaacaaaagcctagaggacaagagcttggaatttaaaaaactgtctgaggaactagcgattcagctagatatttgctgtaagaaaaccgaagccttattagaagctaaaacaaatgagctaatcaacattagtagtagtaaaactaatgccattctttctaggatttctcattgtcagcaccgtacaactaaagttaaggaggcactgttaattaaaacttgcacagtttctgaattagaagcacaacttagacagttgacagaggagcaaaatacactaaatatttcttttcaacaggctactcatcagttagaagaaaaagaaaatcaaattaagagcatgaaggctgatattgaaagtcttgtaacagaaaaagaagccttacagaaggaaggaggcaatcagcaacaggctgcttctgaaaaggagtcttgtataacacagttgaagaaagagttatctgaaaacatcaatgctgtcacattgatgaaagaagagcttaaagaaaaaaaagttgagattagcagtcttagtaaacaactaactgatttgaatgttcagcttcaaaatagcatcagcctatccgaaaaagaagcagccatttcatcactaagaaagcagtatgatgaagaaaaatgtgaattgctggatcaggtgcaagatttatcttttaaagttgacactctgagtaaagagaaaatttctgctcttgagcaggtagatgactggtccaataaattctcagaatggaagaagaaagcacagtcaagatttacacagcatcaaaacactgttaaagaattgcagatccagcttgagttaaaatcaaaggaagcttatgaaaaggatgagcagataaatttattgaaggaagagcttgatcagcaaaataaaagatttgattgtttaaagggtgaaatggaagacgacaagagcaagatggagaaaaaggagtctaatttagaaacagagttaaagtctcaaacagcaagaattatggaattagaggaccatattacccagaaaactattgaaatagagtccttaaatgaagttcttaaaaattacaatcaacaaaaggatattgaacacaaagaattggttcagaaacttcaacattttcaagagttaggagaagaaaaggacaacagggttaaagaagctgaagaaaaaatcttaacacttgaaaaccaagtttattccatgaaagctgaacttgaaactaagaagaaagaattagaacatgtgaatttaagtgtgaaaagcaaagaggaggagttaaaggcattggaagataggcttgagtcagaaagtgctgcaaaattagcagagttgaagagaaaagctgaacaaaaaattgctgccattaagaagcagttgttatctcaaatggaagagaaagaagaacagtataaaaaaggtacagaaagccatttgagtgagctaaatacaaaattgcaggaaagagaaagggaagttcacatcttggaagaaaaacttaagtcagtggaaagttcacagtcagaaacattaattgtacccagatcagcaaaaaatgtggcagcatatactgaacaagaagaagcagattcccaaggctgtgtgcagaagacatatgaagaaaaaatcagtgttttacaaagaaacttaactgaaaaagaaaagctattgcagagggtagggcaggaaaaagaagagacagtttcttctcattttgaaatgcgatgccaataccaggagcgcttaataaagctagaacatgctgaggcaaagcaacatgaagatcaaagtatgataggtcatcttcaagaggagcttgaagaaaaaaacaagaaatattccttgatagtagcccagcatgtggaaaaagaaggaggtaaaaataacatacaggcaaagcaaaacttggaaaatgtgtttgacgacgtccagaaaaccctccaggagaaggaactaacctgtcagattttggagcaaaagataaaagagctggattcctgcttagtaagacagaaagaagtacatagagttgaaatggaagagttgacctcaaaatatgaaaaattacaggctttacaacagatggatggaagaaataaacccacagaacttttggaagaaaacactgaagaaaagtccaaatcacatttggtccaacccaaattgcttagtaacatggaagcccagcacaatgatctggagtttaaattagccggggcagaacgggagaaacagaaactgggcaaggagattgttagattgcagaaagaccttcgaatgttgagaaaggagcatcagcaagaattggaaatactaaagaaagaatatgatcaagaaagggaagagaaaatcaaacaggagcaggaagatcttgaactgaagcacaattccacattaaaacagctgatgagggagtttaatacacagctggcacaaaaggaacaagagctggaaatgaccataaaagaaactatcaataaggcccaggaggtggaggctgaacttttagaaagccatcaagaagagacaaatcagttacttaaaaaaattgctgagaaagatgatgatctaaaacgaacagccaaaagatatgaagaaatccttgatgctcgtgaagaagaaatgactgcaaaagtaagggacctgcagactcaacttgaggagctgcagaagaaataccagcaaaagctagagcaggaggagaaccctggcaatgataatgtaacaattatggagctacagacacagctagcacagaagacgactttaatcagtgattcgaaattgaaagagcaagagttcagagaacagattcacaatttagaagaccgtttgaagaaatatgaaaagaatgtatatgcaacaactgtggggacaccttacaaaggtggcaatttgtaccatacggatgtctcactctttggagaacctaccgaatttgagtatttgcgaaaagtgctttttgagtatatgatgggtcgtgagactaagaccatggcaaaagttataaccaccgtactgaagttccctgatgatcagactcagaaaattttggaaagagaagatgctcggctgatgtcatggctccgatcttcatcttgaagaagagtgacattgggtgactgctgcttggaaaactgtccacacttgctactctttgagaatgaagttgtcattcagggcccctcatgtagccaaaagaccaagaaaaatctggcccacagataagttgcagactgcctttaaaatagattttatcagtggagaaatggtgatagttttttcttcagttttctcttgggaagagttttatgttgtttaaaagatattttgataacttaacctgctttatgggcttacataatattcctttcatccattctttttaaagaacggcttacctttcctatttatttttagggtgattttttaaaaagacttgtgcaatacattttgaggtgaaacttagtggattttttctgataaattagagcatttaattgactattttattcaggttgatctgttgaatatttgctaaagaccagttctttaagctaagacatgtaaaaaatcccaaatggcagtacctcattgtttacttagcttttgtacttatatttttcagaggaaaaaacactactgtaaattgtgaatagccaatacataactgtattgtatgcaaatctgtgattgttggcagtgtcatctctgagaaacagataaataaagtttatttactatataa

SEQ ID NO: 300197 - DNA, 8639 bp, Homo sapiens
  misc_feature (1008)..(1008): n is a, c, g, or t
gtgcacaataaatgtaatgcatttgaatcatcccaaaaccatccctgcacccccggtctgtagaaaaattgtctttcatgaaacccgtccctggtgccaaaaaggttggagaccactactctaaaagataaagatggttgggcatggtggctcacacttgtggtcccagcattttgggaagctgaggagggcagatcacctgagaccagcctgggcaacatggggaaaccctgtttctacaaaaagtacaaaaattagctggacctggtaatgcacacctgtagtctcagctactgaggaggctgaggtgagaggatcccttgagactgggagcttgaggctgtagtcagctgtgagcatgtcattgcactccatcttgggcaatggagcaagaccctgtctcagaaaaaaaggattaaaaaattttagccacaatattatttatcacacctaaaaattaataatttcctaccatcaaactacttaatcaatgttcaaaaagtagaaaacacgtttgcaaaactgagcacctttttcacttaagaataagttaggtcagatatttgcctttccttggtcagctctagaccaaggggaaatgcaagatgtaactactgaaacatagtggttggcatttggtggaatatttttgtttaaaacatggaagttattttatcatgagttacttctatagttctaactaattttagttagacaatgtattataaatgcagtgtagaattttgaacctcaaagaatctcatctagtatcatgaaatctatgccagtatgatgtaatcagtagaatgttgcttaactgggagcctttggcataccaacagaacagaacaaaacaaaaatctttcgcgtgtggaagaagaggtttttaagttcttctgaaaattatcatttcatttagattgctaacttcaaatgaatgagacattaccgtttcttgctatcaagatatttttcagagcttagcccaaataattttgagtattattntattgtaggaaaaaattgaaattacttccttttctggatagttttctgtttgagtgagatttgtgcattgattccctgatgttgatttttgttatgggggaaaaactggggacataatgggaagaggtatgtgactagcttgaaataggtttttctacatactaatctttgctattgagttctgtgtattacagcaaaatgaattttctaaaatacttaccatactacaatagttttgccttgcatgaaaacattctaataaatgaacaattactaattttgtttaatagataaatgtatctgataggtcttggcacatgggctttattcttaacagttttaaacctttagttttttgttcttttgctttacaatgtttctttctttttcttagaatgcatctactcatgcctcgaaatctcctgacagtgttaatggaagtgaaccaagcattcctcagtcaggtgacacacagtcttttgcacagaagctccagctccgggtgccctccgtggagtctttgtttcgaagtccgataaaggaatctctattccggtcttcttctaaagagtctttggtacgaacatcttccagagaatccctgaatcgacttgacctggacagttctactgccagttttgatccaccctctgatatggatagcgaggctgaagacttggtagggaattcagacagtctcaacaaagaacagttgattcagcggttgcgaagaatggaacgaagcttaagtagctacaggggaaaatattctgagcttgttacagcttatcagatgcttcagagagagaagaaaaagctacaaggtatattaagtcagagtcaggataaatcacttcggagaatagcagaattaagagaggagctccaaatggaccagcaggcaaagaaacatctgcaagaggagtttgatgcatctttagaggagaaagatcagtatatcagtgttctccaaactcaggtttctctactgaaacaacgattacgaaatggcccgatgaatgttgatgtactgaaaccacttcctcagctggaaccacaggctgaagtcttcactaaagaagagaatccagaaagtgatggagagccagtagtggaagatggaacttctgtaaaaacactggaaacactccagcaaagagtgaagcgtcaagagaacctacttaagcgttgtaaggaaacaattcagtcacataaggaacaatgtacactattaactagtgaaaaagaagctctgcaagaacaactggatgaaagacttcaagaactagaaaagataaaggaccttcatatggccgagaagactaaacttatcactcagttgcgtgatgcaaagaacttaattgaacagcttgaacaagataagggaatggtaatcgcagagacaaaacgtcagatgcatgaaaccctggaaatgaaagaagaagaaattgctcaactccgtagtcgcatcaaacagatgactacccagggagaggaattacgggaacagaaagaaaagtccgaaagagctgcttttgaggaacttgaaaaagctttgagtacagcccaaaaaacagaggaagcacggagaaaactgaaggcagaaatggatgaacaaataaaaactatcgaaaaaacaagtgaggaggaacgcatcagtcttcaacaggaattaagtcgggtgaaacaggaggttgttgatgtaatgaaaaaatcctcagaagaacaaattgctaagctacagaagcttcatgaaaaggagctggccagaaaagagcaggaactgaccaagaagcttcagacccgagaaagggaatttcaggaacaaatgaaagtagctcttgaaaagagtcaatcagaatatttgaagatcagccaagaaaaagaacagcaagaatctttggccctagaagagttagagttgcagaaaaaagcaatcctcacagaaagtgaaaataaacttcgggaccttcagcaagaagcagagacttacagaactagaattcttgaattggaaagttctttggaaaaaagcttacaagaaaacaaaaatcagtcaaaagatttggctgttcatctggaagctgaaaaaaataagcacaataaggagattacagtcatggttgaaaaacacaagacagaattggaaagccttaagcatcagcaggatgccctttggactgaaaaactccaagtcttaaagcaacaatatcagactgaaatggaaaaacttagggaaaagtgtgaacaagaaaaagaaacattgttgaaagacaaagagattatcttccaggcccacatagaagaaatgaatgaaaagactttagaaaagcttgatgtgaagcaaacagaactagaatcattatcttctgaactgtcagaagtattaaaagcccgtcacaaactagaagaggaactttctgttctgaaagatcaaacagataaaatgaagcaggaattagaggccaagatggatgaacagaaaaatcatcaccagcagcaagttgacagtatcattaaagaacacgaggtatctatccagaggactgagaaggcattaaaagatcaaattaatcaacttgagcttctcttgaaggaaagggacaagcatttgaaagagcatcaggctcatgtagaaaatttagaggcagatattaaaaggtctgaaggggaactccagcaggcatctgctaagctggacgtttttcagtcttaccagagtgccacacatgagcagacaaaagcatatgaggaacagttggcccaattgcagcagaagttgttggatttggaaacagaaagaattcttcttaccaaacaggttgctgaagttgaagcacaaaagaaagatgtttgtactgagttagatgctcacaaaatccaggtgcaggacttaatgcagcaacttgaaaaacaaaatagtgaaatggagcaaaaagtaaaatctttaacccaagtctatgagtccaaacttgaagatggtaacaaagaacaggaacagacaaagcaaatcttggtggaaaaggaaaatatgattttacaaatgagagaaggacagaagaaagaaattgagatactcacacagaaattgtcagccaaggaggacagtattcatattttgaatgaggaatatgaaaccaaatttaaaaaccaagaaaaaaagatggaaaaagttaagcagaaagcaaaggagatgcaagaaacgttaaagaaaaaattactggatcaggaagccaaacttaagaaagagcttgaaaatactgctctagagcttagtcagaaagaaaaacagtttaatgccaaaatgctggaaatggcacaggctaactcagctggaatcagtgatgcagtgtcaagactggaaacaaaccaaaaagaacaaatagaaagtcttactgaggttcatcgacgagaactcaatgatgtcatatcaatctgggaaaagaaacttaatcagcaagctgaagaacttcaggaaatacatgaaatccaattacaggaaaaagaacaagaggtagcagaactgaaacaaaagatcctcctatttgggtgtgaaaaagaagagatgaacaaggaaataacatggctgaaggaagaaggtgttaagcaggatacaacattaaatgaattacaggaacagttaaagcagaagtctgcccatgtgaattctcttgcacaagatgaaactaaactgaaagctcatcttgaaaagctagaggttgacttgaataagtctctgaaggaaaatacttttcttcaagagcagctagttgaactgaagatgctggcagaagaagataagcggaaggtttctgagttgactagcaagttgaaaaccacagatgaagaattccagagtttgaaatcttcacatgaaaaaagtaacaaaagcctagaggacaagagcttggaatttaaaaaactgtctgaggaactagcgattcagctagatatttgctgtaagaaaaccgaagccttattagaagctaaaacaaatgagctaatcaacattagtagtagtaaaactaatgccattctttctaggatttctcattgtcagcaccgtacaactaaagttaaggaggcactgttaattaaaacttgcacagtttctgaattagaagcacaacttagacagttgacagaggagcaaaatacactaaatatttcttttcaacaggctactcatcagttagaagaaaaagaaaatcaaattaagagcatgaaggctgatattgaaagtcttgtaacagaaaaagaagccttacagaaggaaggaggcaatcagcaacaggctgcttctgaaaaggagtcttgtataacacagttgaagaaagagttatctgaaaacatcaatgctgtcacattgatgaaagaagagcttaaagaaaaaaaagttgagattagcagtcttagtaaacaactaactgatttgaatgttcagcttcaaaatagcatcagcctatccgaaaaagaagcagccatttcatcactaagaaagcagtatgatgaagaaaaatgtgaattgctggatcaggtgcaagatttatcttttaaagttgacactctgagtaaagagaaaatttctgctcttgagcaggtagatgactggtccaataaattctcagaatggaagaagaaagcacagtcaagatttacacagcatcaaaacactgttaaagaattgcagatccagcttgagttaaaatcaaaggaagcttatgaaaaggatgagcagataaatttattgaaggaagagcttgatcagcaaaataaaagatttgattgtttaaagggtgaaatggaagacgacaagagcaagatggagaaaaaggagtctaatttagaaacagagttaaagtctcaaacagcaagaattatggaattagaggaccatattacccagaaaactattgaaatagagtccttaaatgaagttcttaaaaattacaatcaacaaaaggatattgaacacaaagaattggttcagaaacttcaacattttcaagagttaggagaagaaaaggacaacagggttaaagaagctgaagaaaaaatcttaacacttgaaaaccaagtttattccatgaaagctgaacttgaaactaagaagaaagaattagaacatgtgaatttaagtgtgaaaagcaaagaggaggagttaaaggcattggaagataggcttgagtcagaaagtgctgcaaaattagcagagttgaagagaaaagctgaacaaaaaattgctgccattaagaagcagttgttatctcaaatggaagagaaagaagaacagtataaaaaaggtacagaaagccatttgagtgagctaaatacaaaattgcaggaaagagaaagggaagttcacatcttggaagaaaaacttaagtcagtggaaagttcacagtcagaaacattaattgtacccagatcagcaaaaaatgtggcagcatatactgaacaagaagaagcagattcccaaggctgtgtgcagaagacatatgaagaaaaaatcagtgttttacaaagaaacttaactgaaaaagaaaagctattgcagagggtagggcaggaaaaagaagagacagtttcttctcattttgaaatgcgatgccaataccaggagcgcttaataaagctagaacatgctgaggcaaagcaacatgaagatcaaagtatgataggtcatcttcaagaggagcttgaagaaaaaaacaagaaatattccttgatagtagcccagcatgtggaaaaagaaggaggtaaaaataacatacaggcaaagcaaaacttggaaaatgtgtttgacgacgtccagaaaaccctccaggagaaggaactaacctgtcagattttggagcaaaagataaaagagctggattcctgcttagtaagacagaaagaagtacatagagttgaaatggaagagttgacctcaaaatatgaaaaattacaggctttacaacagatggatggaagaaataaacccacagaacttttggaagaaaacactgaagaaaagtccaaatcacatttggtccaacccaaattgcttagtaacatggaagcccagcacaatgatctggagtttaaattagccggggcagaacgggagaaacagaaactgggcaaggagattgttagattgcagaaagaccttcgaatgttgagaaaggagcatcagcaagaattggaaatactaaagaaagaatatgatcaagaaagggaagagaaaatcaaacaggagcaggaagatcttgaactgaagcacaattccacattaaaacagctgatgagggagtttaatacacagctggcacaaaaggaacaagagctggaaatgaccataaaagaaactatcaataaggcccaggaggtggaggctgaacttttagaaagccatcaagaagagacaaatcagttacttaaaaaaattgctgagaaagatgatgatctaaaacgaacagccaaaagatatgaagaaatccttgatgctcgtgaagaagaaatgactgcaaaagtaagggacctgcagactcaacttgaggagctgcagaagaaataccagcaaaagctagagcaggaggagaaccctggcaatgataatgtaacaattatggagctacagacacagctagcacagaagacgactttaatcagtgattcgaaattgaaagagcaagagttcagagaacagattcacaatttagaagaccgtttgaagaaatatgaaaagaatgtatatgcaacaactgtggggacaccttacaaaggtggcaatttgtaccatacggatgtctcactctttggagaacctaccgaatttgagtatttgcgaaaagtgctttttgagtatatgatgggtcgtgagactaagaccatggcaaaagttataaccaccgtactgaagttccctgatgatcagactcagaaaattttggaaagagaagatgctcggctgatgtcatggctccgatcttcatcttgaagaagagtgacattgggtgactgctgcttggaaaactgtccacacttgctactctttgagaatgaagttgtcattcagggcccctcatgtagccaaaagaccaagaaaaatctggcccacagataagttgcagactgcctttaaaatagattttatcagtggagaaatggtgatagttttttcttcagttttctcttgggaagagttttatgttgtttaaaagatattttgataacttaacctgctttatgggcttacataatattcctttcatccattctttttaaagaacggcttacctttcctatttatttttagggtgattttttaaaaagacttgtgcaatacattttgaggtgaaacttagtggattttttctgataaattagagcatttaattgactattttattcaggttgatctgttgaatatttgctaaagaccagttctttaagctaagacatgtaaaaaatcccaaatggcagtacctcattgtttacttagcttttgtacttatatttttcagaggaaaaaacactactgtaaattgtgaatagccaatacataactgtattgtatgcaaatctgtgattgttggcagtgtcatctctgagaaacagataaataaagtttatttactatataa

SEQ ID NO: 300198 - DNA, 4420 bp, Homo sapiens
atgctgaggccgactctaaggatcccatgctcatcctcctgtgcacaggctaactcagctggaatcagtgatgcagtgtcaagactggaaacaaaccaaaaagaacaaatagaaagtcttactgaggttcatcgacgagaactcaatgatgtcatatcaatctgggaaaagaaacttaatcagcaagctgaagaacttcaggaaatacatgaaatccaattacaggaaaaagaacaagaggtagcagaactgaaacaaaagatcctcctatttgggtgtgaaaaagaagagatgaacaaggaaataacatggctgaaggaagaaggtgttaagcaggatacaacattaaatgaattacaggaacagttaaagcagaagtctgcccatgtgaattctcttgcacaagatgaaactaaactgaaagctcatcttgaaaagctagaggttgacttgaataagtctctgaaggaaaatacttttcttcaagagcagctagttgaactgaagatgctggcagaagaagataagcggaaggtttctgagttgactagcaagttgaaaaccacagatgaagaattccagagtttgaaatcttcacatgaaaaaagtaacaaaagcctagaggacaagagcttggaatttaaaaaactgtctgaggaactagcgattcagctagatatttgctgtaagaaaaccgaagccttattagaagctaaaacaaatgagctaatcaacattagtagtagtaaaactaatgccattctttctaggatttctcattgtcagcaccgtacaactaaagttaaggaggcactgttaattaaaacttgcacagtttctgaattagaagcacaacttagacagttgacagaggagcaaaatacactaaatatttcttttcaacaggctactcatcagttagaagaaaaagaaaatcaaattaagagcatgaaggctgatattgaaagtcttgtaacagaaaaagaagccttacagaaggaaggaggcaatcagcaacaggctgcttctgaaaaggagtcttgtataacacagttgaagaaagagttatctgaaaacatcaatgctgtcacattgatgaaagaagagcttaaagaaaaaaaagttgagattagcagtcttagtaaacaactaactgatttgaatgttcagcttcaaaatagcatcagcctatccgaaaaagaagcagccatttcatcactaagaaagcagtatgatgaagaaaaatgtgaattgctggatcaggtgcaagatttatcttttaaagttgacactctgagtaaagagaaaatttctgctcttgagcaggtagatgactggtccaataaattctcagaatggaagaagaaagcacagtcaagatttacacagcatcaaaacactgttaaagaattgcagatccagcttgagttaaaatcaaaggaagcttatgaaaaggatgagcagataaatttattgaaggaagagcttgatcagcaaaataaaagatttgattgtttaaagggtgaaatggaagacgacaagagcaagatggagaaaaaggagtctaatttagaaacagagttaaagtctcaaacagcaagaattatggaattagaggaccatattacccagaaaactattgaaatagagtccttaaatgaagttcttaaaaattacaatcaacaaaaggatattgaacacaaagaattggttcagaaacttcaacattttcaagagttaggagaagaaaaggacaacagggttaaagaagctgaagaaaaaatcttaacacttgaaaaccaagtttattccatgaaagctgaacttgaaactaagaagaaagaattagaacatgtgaatttaagtgtgaaaagcaaagaggaggagttaaaggcattggaagataggcttgagtcagaaagtgctgcaaaattagcagagttgaagagaaaagctgaacaaaaaattgctgccattaagaagcagttgttatctcaaatggaagagaaagaagaacagtataaaaaaggtacagaaagccatttgagtgagctaaatacaaaattgcaggaaagagaaagggaagttcacatcttggaagaaaaacttaagtcagtggaaagttcacagtcagaaacattaattgtacccagatcagcaaaaaatgtggcagcatatactgaacaagaagaagcagattcccaaggctgtgtgcagaagacatatgaagaaaaaatcagtgttttacaaagaaacttaactgaaaaagaaaagctattgcagagggtagggcaggaaaaagaagagacagtttcttctcattttgaaatgcgatgccaataccaggagcgcttaataaagctagaacatgctgaggcaaagcaacatgaagatcaaagtatgataggtcatcttcaagaggagcttgaagaaaaaaacaagaaatattccttgatagtagcccagcatgtggaaaaagaaggaggtaaaaataacatacaggcaaagcaaaacttggaaaatgtgtttgacgacgtccagaaaaccctccaggagaaggaactaacctgtcagattttggagcaaaagataaaagagctggattcctgcttagtaagacagaaagaagtacatagagttgaaatggaagagttgacctcaaaatatgaaaaattacaggctttacaacagatggatggaagaaataaacccacagaacttttggaagaaaacactgaagaaaagtccaaatcacatttggtccaacccaaattgcttagtaacatggaagcccagcacaatgatctggagtttaaattagccggggcagaacgggagaaacagaaactgggcaaggagattgttagattgcagaaagaccttcgaatgttgagaaaggagcatcagcaagaattggaaatactaaagaaagaatatgatcaagaaagggaagagaaaatcaaacaggagcaggaagatcttgaactgaagcacaattccacattaaaacagctgatgagggagtttaatacacagctggcacaaaaggaacaagagctggaaatgaccataaaagaaactatcaataaggcccaggaggtggaggctgaacttttagaaagccatcaagaagagacaaatcagttacttaaaaaaattgctgagaaagatgatgatctaaaacgaacagccaaaagatatgaagaaatccttgatgctcgtgaagaagaaatgactgcaaaagtaagggacctgcagactcaacttgaggagctgcagaagaaataccagcaaaagctagagcaggaggagaaccctggcaatgataatgtaacaattatggagctacagacacagctagcacagaagacgactttaatcagtgattcgaaattgaaagagcaagagttcagagaacagattcacaatttagaagaccgtttgaagaaatatgaaaagaatgtatatgcaacaactgtggggacaccttacaaaggtggcaatttgtaccatacggatgtctcactctttggagaacctaccgaatttgagtatttgcgaaaagtgctttttgagtatatgatgggtcgtgagactaagaccatggcaaaagttataaccaccgtactgaagttccctgatgatcagactcagaaaattttggaaagagaagatgctcggctgatgtttacttcacctcgcagtggtatcttctgagtaaaccatcagtctgtgcttagttaacatgtgtcatggctccgatcttcatcttgaagaagagtgacattgggtgactgctgcttggaaaactgtccacacttgctactctttgagaatgaagttgtcattcagggcccctcatgtagccaaaagaccaagaaaaatctggcccacagataagttgcagactgcctttaaaatagattttatcagtggagaaatggtgatagttttttcttcagttttctcttgggaagagttttatgttgtttaaaagatattttgataacttaacctgctttatgggcttacataatattcctttcatccattctttttaaagaacggcttacctttcctatttatttttagggtgattttttaaaaagacttgtgcaatacattttgaggtgaaacttagtggattttttctgataaattagagcatttaattgactattttattcaggttgatctgttgaatatttgctaaagaccagttctttaagctaagacatgtaaaaaatcccaaatggcagtacctcattgtttacttagcttttgtacttatatttttcagaggaaaaaacactactgtaaattgtgaatagccaatacataactgtattgtatgcaaatctgtgattgttggcagtgtcatctctgagaaacagataaataaagtttatttactatataa

SEQ ID NO: 300199 - DNA, 4363 bp, Homo sapiens
cccgccctagcttatcaggacacagaaagcaaaacaccataagtgaaaaaaatagaaagtcttactgaggttcatcgacgagaactcaatgatgtcatatcaatctgggaaaagaaacttaatcagcaagctgaagaacttcaggaaatacatgaaatccaattacaggaaaaagaacaagaggtagcagaactgaaacaaaagatcctcctatttgggtgtgaaaaagaagagatgaacaaggaaataacatggctgaaggaagaaggtgttaagcaggatacaacattaaatgaattacaggaacagttaaagcagaagtctgcccatgtgaattctcttgcacaagatgaaactaaactgaaagctcatcttgaaaagctagaggttgacttgaataagtctctgaaggaaaatacttttcttcaagagcagctagttgaactgaagatgctggcagaagaagataagcggaaggtttctgagttgactagcaagttgaaaaccacagatgaagaattccagagtttgaaatcttcacatgaaaaaagtaacaaaagcctagaggacaagagcttggaatttaaaaaactgtctgaggaactagcgattcagctagatatttgctgtaagaaaaccgaagccttattagaagctaaaacaaatgagctaatcaacattagtagtagtaaaactaatgccattctttctaggatttctcattgtcagcaccgtacaactaaagttaaggaggcactgttaattaaaacttgcacagtttctgaattagaagcacaacttagacagttgacagaggagcaaaatacactaaatatttcttttcaacaggctactcatcagttagaagaaaaagaaaatcaaattaagagcatgaaggctgatattgaaagtcttgtaacagaaaaagaagccttacagaaggaaggaggcaatcagcaacaggctgcttctgaaaaggagtcttgtataacacagttgaagaaagagttatctgaaaacatcaatgctgtcacattgatgaaagaagagcttaaagaaaaaaaagttgagattagcagtcttagtaaacaactaactgatttgaatgttcagcttcaaaatagcatcagcctatccgaaaaagaagcagccatttcatcactaagaaagcagtatgatgaagaaaaatgtgaattgctggatcaggtgcaagatttatcttttaaagttgacactctgagtaaagagaaaatttctgctcttgagcaggtagatgactggtccaataaattctcagaatggaagaagaaagcacagtcaagatttacacagcatcaaaacactgttaaagaattgcagatccagcttgagttaaaatcaaaggaagcttatgaaaaggatgagcagataaatttattgaaggaagagcttgatcagcaaaataaaagatttgattgtttaaagggtgaaatggaagacgacaagagcaagatggagaaaaaggagtctaatttagaaacagagttaaagtctcaaacagcaagaattatggaattagaggaccatattacccagaaaactattgaaatagagtccttaaatgaagttcttaaaaattacaatcaacaaaaggatattgaacacaaagaattggttcagaaacttcaacattttcaagagttaggagaagaaaaggacaacagggttaaagaagctgaagaaaaaatcttaacacttgaaaaccaagtttattccatgaaagctgaacttgaaactaagaagaaagaattagaacatgtgaatttaagtgtgaaaagcaaagaggaggagttaaaggcattggaagataggcttgagtcagaaagtgctgcaaaattagcagagttgaagagaaaagctgaacaaaaaattgctgccattaagaagcagttgttatctcaaatggaagagaaagaagaacagtataaaaaaggtacagaaagccatttgagtgagctaaatacaaaattgcaggaaagagaaagggaagttcacatcttggaagaaaaacttaagtcagtggaaagttcacagtcagaaacattaattgtacccagatcagcaaaaaatgtggcagcatatactgaacaagaagaagcagattcccaaggctgtgtgcagaagacatatgaagaaaaaatcagtgttttacaaagaaacttaactgaaaaagaaaagctattgcagagggtagggcaggaaaaagaagagacagtttcttctcattttgaaatgcgatgccaataccaggagcgcttaataaagctagaacatgctgaggcaaagcaacatgaagatcaaagtatgataggtcatcttcaagaggagcttgaagaaaaaaacaagaaatattccttgatagtagcccagcatgtggaaaaagaaggaggtaaaaataacatacaggcaaagcaaaacttggaaaatgtgtttgacgacgtccagaaaaccctccaggagaaggaactaacctgtcagattttggagcaaaagataaaagagctggattcctgcttagtaagacagaaagaagtacatagagttgaaatggaagagttgacctcaaaatatgaaaaattacaggctttacaacagatggatggaagaaataaacccacagaacttttggaagaaaacactgaagaaaagtccaaatcacatttggtccaacccaaattgcttagtaacatggaagcccagcacaatgatctggagtttaaattagccggggcagaacgggagaaacagaaactgggcaaggagattgttagattgcagaaagaccttcgaatgttgagaaaggagcatcagcaagaattggaaatactaaagaaagaatatgatcaagaaagggaagagaaaatcaaacaggagcaggaagatcttgaactgaagcacaattccacattaaaacagctgatgagggagtttaatacacagctggcacaaaaggaacaagagctggaaatgaccataaaagaaactatcaataaggcccaggaggtggaggctgaacttttagaaagccatcaagaagagacaaatcagttacttaaaaaaattgctgagaaagatgatgatctaaaacgaacagccaaaagatatgaagaaatccttgatgctcgtgaagaagaaatgactgcaaaagtaagggacctgcagactcaacttgaggagctgcagaagaaataccagcaaaagctagagcaggaggagaaccctggcaatgataatgtaacaattatggagctacagacacagctagcacagaagacgactttaatcagtgattcgaaattgaaagagcaagagttcagagaacagattcacaatttagaagaccgtttgaagaaatatgaaaagaatgtatatgcaacaactgtggggacaccttacaaaggtggcaatttgtaccatacggatgtctcactctttggagaacctaccgaatttgagtatttgcgaaaagtgctttttgagtatatgatgggtcgtgagactaagaccatggcaaaagttataaccaccgtactgaagttccctgatgatcagactcagaaaattttggaaagagaagatgctcggctgatgtttacttcacctcgcagtggtatcttctgagtaaaccatcagtctgtgcttagttaacatgtgtcatggctccgatcttcatcttgaagaagagtgacattgggtgactgctgcttggaaaactgtccacacttgctactctttgagaatgaagttgtcattcagggcccctcatgtagccaaaagaccaagaaaaatctggcccacagataagttgcagactgcctttaaaatagattttatcagtggagaaatggtgatagttttttcttcagttttctcttgggaagagttttatgttgtttaaaagatattttgataacttaacctgctttatgggcttacataatattcctttcatccattctttttaaagaacggcttacctttcctatttatttttagggtgattttttaaaaagacttgtgcaatacattttgaggtgaaacttagtggattttttctgataaattagagcatttaattgactattttattcaggttgatctgttgaatatttgctaaagaccagttctttaagctaagacatgtaaaaaatcccaaatggcagtacctcattgtttacttagcttttgtacttatatttttcagaggaaaaaacactactgtaaattgtgaatagccaatacataactgtattgtatgcaaatctgtgattgttggcagtgtcatctctgagaaacagataaataaagtttatttactatataa

SEQ ID NO: 300200 - DNA, 4044 bp, Homo sapiens
ttagcgtggtcgcggccgaggtacgcggggatgaaactaaactgaaagctcatcttgaaaagctagaggttgacttgaataagtctctgaaggaaaatacttttcttcaagagcagctagttgaactgaagatgctggcagaagaagataagcggaaggtttctgagttgactagcaagttgaaaaccacagatgaagaattccagagtttgaaatcttcacatgaaaaaagtaacaaaagcctagaggacaagagcttggaatttaaaaaactgtctgaggaactagcgattcagctagatatttgctgtaagaaaaccgaagccttattagaagctaaaacaaatgagctaatcaacattagtagtagtaaaactaatgccattctttctaggatttctcattgtcagcaccgtacaactaaagttaaggaggcactgttaattaaaacttgcacagtttctgaattagaagcacaacttagacagttgacagaggagcaaaatacactaaatatttcttttcaacaggctactcatcagttagaagaaaaagaaaatcaaattaagagcatgaaggctgatattgaaagtcttgtaacagaaaaagaagccttacagaaggaaggaggcaatcagcaacaggctgcttctgaaaaggagtcttgtataacacagttgaagaaagagttatctgaaaacatcaatgctgtcacattgatgaaagaagagcttaaagaaaaaaaagttgagattagcagtcttagtaaacaactaactgatttgaatgttcagcttcaaaatagcatcagcctatccgaaaaagaagcagccatttcatcactaagaaagcagtatgatgaagaaaaatgtgaattgctggatcaggtgcaagatttatcttttaaagttgacactctgagtaaagagaaaatttctgctcttgagcaggtagatgactggtccaataaattctcagaatggaagaagaaagcacagtcaagatttacacagcatcaaaacactgttaaagaattgcagatccagcttgagttaaaatcaaaggaagcttatgaaaaggatgagcagataaatttattgaaggaagagcttgatcagcaaaataaaagatttgattgtttaaagggtgaaatggaagacgacaagagcaagatggagaaaaaggagtctaatttagaaacagagttaaagtctcaaacagcaagaattatggaattagaggaccatattacccagaaaactattgaaatagagtccttaaatgaagttcttaaaaattacaatcaacaaaaggatattgaacacaaagaattggttcagaaacttcaacattttcaagagttaggagaagaaaaggacaacagggttaaagaagctgaagaaaaaatcttaacacttgaaaaccaagtttattccatgaaagctgaacttgaaactaagaagaaagaattagaacatgtgaatttaagtgtgaaaagcaaagaggaggagttaaaggcattggaagataggcttgagtcagaaagtgctgcaaaattagcagagttgaagagaaaagctgaacaaaaaattgctgccattaagaagcagttgttatctcaaatggaagagaaagaagaacagtataaaaaaggtacagaaagccatttgagtgagctaaatacaaaattgcaggaaagagaaagggaagttcacatcttggaagaaaaacttaagtcagtggaaagttcacagtcagaaacattaattgtacccagatcagcaaaaaatgtggcagcatatactgaacaagaagaagcagattcccaaggctgtgtgcagaagacatatgaagaaaaaatcagtgttttacaaagaaacttaactgaaaaagaaaagctattgcagagggtagggcaggaaaaagaagagacagtttcttctcattttgaaatgcgatgccaataccaggagcgcttaataaagctagaacatgctgaggcaaagcaacatgaagatcaaagtatgataggtcatcttcaagaggagcttgaagaaaaaaacaagaaatattccttgatagtagcccagcatgtggaaaaagaaggaggtaaaaataacatacaggcaaagcaaaacttggaaaatgtgtttgacgacgtccagaaaaccctccaggagaaggaactaacctgtcagattttggagcaaaagataaaagagctggattcctgcttagtaagacagaaagaagtacatagagttgaaatggaagagttgacctcaaaatatgaaaaattacaggctttacaacagatggatggaagaaataaacccacagaacttttggaagaaaacactgaagaaaagtccaaatcacatttggtccaacccaaattgcttagtaacatggaagcccagcacaatgatctggagtttaaattagccggggcagaacgggagaaacagaaactgggcaaggagattgttagattgcagaaagaccttcgaatgttgagaaaggagcatcagcaagaattggaaatactaaagaaagaatatgatcaagaaagggaagagaaaatcaaacaggagcaggaagatcttgaactgaagcacaattccacattaaaacagctgatgagggagtttaatacacagctggcacaaaaggaacaagagctggaaatgaccataaaagaaactatcaataaggcccaggaggtggaggctgaacttttagaaagccatcaagaagagacaaatcagttacttaaaaaaattgctgagaaagatgatgatctaaaacgaacagccaaaagatatgaagaaatccttgatgctcgtgaagaagaaatgactgcaaaagtaagggacctgcagactcaacttgaggagctgcagaagaaataccagcaaaagctagagcaggaggagaaccctggcaatgataatgtaacaattatggagctacagacacagctagcacagaagacgactttaatcagtgattcgaaattgaaagagcaagagttcagagaacagattcacaatttagaagaccgtttgaagaaatatgaaaagaatgtatatgcaacaactgtggggacaccttacaaaggtggcaatttgtaccatacggatgtctcactctttggagaacctaccgaatttgagtatttgcgaaaagtgctttttgagtatatgatgggtcgtgagactaagaccatggcaaaagttataaccaccgtactgaagttccctgatgatcagactcagaaaattttggaaagagaagatgctcggctgatgtttacttcacctcgcagtggtatcttctgagtaaaccatcagtctgtgcttagttaacatgtgtcatggctccgatcttcatcttgaagaagagtgacattgggtgactgctgcttggaaaactgtccacacttgctactctttgagaatgaagttgtcattcagggcccctcatgtagccaaaagaccaagaaaaatctggcccacagataagttgcagactgcctttaaaatagattttatcagtggagaaatggtgatagttttttcttcagttttctcttgggaagagttttatgttgtttaaaagatattttgataacttaacctgctttatgggcttacataatattcctttcatccattctttttaaagaacggcttacctttcctatttatttttagggtgattttttaaaaagacttgtgcaatacattttgaggtgaaacttagtggattttttctgataaattagagcatttaattgactattttattcaggttgatctgttgaatatttgctaaagaccagttctttaagctaagacatgtaaaaaatcccaaatggcagtacctcattgtttacttagcttttgtacttatatttttcagaggaaaaaacactactgtaaattgtgaatagccaatacataactgtattgtatgcaaatctgtgattgttggcagtgtcatctctgagaaacagataaataaagtttatttactatataa

SEQ ID NO: 300201 - DNA, 8699 bp, Homo sapiens
ccctggcgcctggtatcagggacttcccgacgctggaagagttcagggaagggaagcgggcccctctggcaccgaagacacagaatcctagctacagctactaaagaaaagaacactatcaattagggcccgcgtcaggttctctggatctccccttctcccatccttgacgctcatccctgtgttctttgcggtgggcccgtcggccctgctgccatcgatagaagcagcactctccccgtctgatttcgcagggccaaagcccaggtgagagtcagggtagtgttcagactagcccacgctccggttctgagccgcgacggcggtctccgcacgcaacgaaatcaggcaggaccgaaccttgcgtcctccagtgcagcgagttcggaagcgaccggccgagcgcgcatgtgcgggacccgacattgtgcttgtcccatccggtgctccgtagttagcctctgtgagctccacgtaggccgcgcaagcgcccttggcgcacagttcacctgctgccgttgtcgtcgccgccgcggctcccggggctggatggggggccgaggccagccagtggcacccggaagaaagagacgcggcggcggcgacgccgacaccctcaggacgagtgtccggacttgcccacagcctcaaggaggagacggcgaggcccggcccccgctgtccctggtgtaaagaagtcgccgtagccgtcgcggccgggactccccgggctctcgcccttcaggtttcgttgacactcaggaccgtacgtacgctgcgccatgttcaagaaactgaagcaaaagatcagcgaggagcagcagcagctccagcaggcgctggctcctgctcaggcgtcctccaattcttcaacaccaacaagaatgaggagcaggacatcttcatttacagagcaacttgatgaaggtacacccaatagagagaatgcatctactcatgcctcgaaatctcctgacagtgttaatggaagtgaaccaagcattcctcagtcaggtgacacacagtcttttgcacagaagctccagctccgggtgccctccgtggagtctttgtttcgaagtccgataaaggaatctctattccggtcttcttctaaagagtctttggtacgaacatcttccagagaatccctgaatcgacttgacctggacagttctactgccagttttgatccaccctctgatatggatagcgaggctgaagacttggtagggaattcagacagtctcaacaaagaacagttgattcagcggttgcgaagaatggaacgaagcttaagtagctacaggggaaaatattctgagcttgttacagcttatcagatgcttcagagagagaagaaaaagctacaaggtatattaagtcagagtcaggataaatcacttcggagaatagcagaattaagagaggagctccaaatggaccagcaggcaaagaaacatctgcaagaggagtttgatgcatctttagaggagaaagatcagtatatcagtgttctccaaactcaggtttctctactgaaacaacgattacgaaatggcccgatgaatgttgatgtactgaaaccacttcctcagctggaaccacaggctgaagtcttcactaaagaagagaatccagaaagtgatggagagccagtagtggaagatggaacttctgtaaaaacactggaaacactccagcaaagagtgaagcgtcaagagaacctacttaagcgttgtaaggaaacaattcagtcacataaggaacaatgtacactattaactagtgaaaaagaagctctgcaagaacaactggatgaaagacttcaagaactagaaaagataaaggaccttcatatggccgagaagactaaacttatcactcagttgcgtgatgcaaagaacttaattgaacagcttgaacaagataagggaatggtaatcgcagagacaaaacgtcagatgcatgaaaccctggaaatgaaagaagaagaaattgctcaactccgtagtcgcatcaaacagatgactacccagggagaggaattacgggaacagaaagaaaagtccgaaagagctgcttttgaggaacttgaaaaagctttgagtacagcccaaaaaacagaggaagcacggagaaaactgaaggcagaaatggatgaacaaataaaaactatcgaaaaaacaagtgaggaggaacgcatcagtcttcaacaggaattaagtcgggtgaaacaggaggttgttgatgtaatgaaaaaatcctcagaagaacaaattgctaagctacagaagcttcatgaaaaggagctggccagaaaagagcaggaactgaccaagaagcttcagacccgagaaagggaatttcaggaacaaatgaaagtagctcttgaaaagagtcaatcagaatatttgaagatcagccaagaaaaagaacagcaagaatctttggccctagaagagttagagttgcagaaaaaagcaatcctcacagaaagtgaaaataaacttcgggaccttcagcaagaagcagagacttacagaactagaattcttgaattggaaagttctttggaaaaaagcttacaagaaaacaaaaatcagtcaaaagatttggctgttcatctggaagctgaaaaaaataagcacaataaggagattacagtcatggttgaaaaacacaagacagaattggaaagccttaagcatcagcaggatgccctttggactgaaaaactccaagtcttaaagcaacaatatcagactgaaatggaaaaacttagggaaaagtgtgaacaagaaaaagaaacattgttgaaagacaaagagattatcttccaggcccacatagaagaaatgaatgaaaagactttagaaaagcttgatgtgaagcaaacagaactagaatcattatcttctgaactgtcagaagtattaaaagcccgtcacaaactagaagaggaactttctgttctgaaagatcaaacagataaaatgaagcaggaattagaggccaagatggatgaacagaaaaatcatcaccagcagcaagttgacagtatcattaaagaacacgaggtatctatccagaggactgagaaggcattaaaagatcaaattaatcaacttgagcttctcttgaaggaaagggacaagcatttgaaagagcatcaggctcatgtagaaaatttagaggcagatattaaaaggtctgaaggggaactccagcaggcatctgctaagctggacgtttttcagtcttaccagagtgccacacatgagcagacaaaagcatatgaggaacagttggcccaattgcagcagaagttgttggatttggaaacagaaagaattcttcttaccaaacaggttgctgaagttgaagcacaaaagaaagatgtttgtactgagttagatgctcacaaaatccaggtgcaggacttaatgcagcaacttgaaaaacaaaatagtgaaatggagcaaaaagtaaaatctttaacccaagtctatgagtccaaacttgaagatggtaacaaagaacaggaacagacaaagcaaatcttggtggaaaaggaaaatatgattttacaaatgagagaaggacagaagaaagaaattgagatactcacacagaaattgtcagccaaggaggacagtattcatattttgaatgaggaatatgaaaccaaatttaaaaaccaagaaaaaaagatggaaaaagttaagcagaaagcaaaggagatgcaagaaacgttaaagaaaaaattactggatcaggaagccaaacttaagaaagagcttgaaaatactgctctagagcttagtcagaaagaaaaacagtttaatgccaaaatgctggaaatggcacaggctaactcagctggaatcagtgatgcagtgtcaagactggaaacaaaccaaaaagaacaaatagaaagtcttactgaggttcatcgacgagaactcaatgatgtcatatcaatctgggaaaagaaacttaatcagcaagctgaagaacttcaggaaatacatgaaatccaattacaggaaaaagaacaagaggtagcagaactgaaacaaaagatcctcctatttgggtgtgaaaaagaagagatgaacaaggaaataacatggctgaaggaagaaggtgttaagcaggatacaacattaaatgaattacaggaacagttaaagcagaagtctgcccatgtgaattctcttgcacaagatgaaactaaactgaaagctcatcttgaaaagctagaggttgacttgaataagtctctgaaggaaaatacttttcttcaagagcagctagttgaactgaagatgctggcagaagaagataagcggaaggtttctgagttgactagcaagttgaaaaccacagatgaagaattccagagtttgaaatcttcacatgaaaaaagtaacaaaagcctagaggacaagagcttggaatttaaaaaactgtctgaggaactagcgattcagctagatatttgctgtaagaaaaccgaagccttattagaagctaaaacaaatgagctaatcaacattagtagtagtaaaactaatgccattctttctaggatttctcattgtcagcaccgtacaactaaagttaaggaggcactgttaattaaaacttgcacagtttctgaattagaagcacaacttagacagttgacagaggagcaaaatacactaaatatttcttttcaacaggctactcatcagttagaagaaaaagaaaatcaaattaagagcatgaaggctgatattgaaagtcttgtaacagaaaaagaagccttacagaaggaaggaggcaatcagcaacaggctgcttctgaaaaggagtcttgtataacacagttgaagaaagagttatctgaaaacatcaatgctgtcacattgatgaaagaagagcttaaagaaaaaaaagttgagattagcagtcttagtaaacaactaactgatttgaatgttcagcttcaaaatagcatcagcctatccgaaaaagaagcagccatttcatcactaagaaagcagtatgatgaagaaaaatgtgaattgctggatcaggtgcaagatttatcttttaaagttgacactctgagtaaagagaaaatttctgctcttgagcaggtagatgactggtccaataaattctcagaatggaagaagaaagcacagtcaagatttacacagcatcaaaacactgttaaagaattgcagatccagcttgagttaaaatcaaaggaagcttatgaaaaggatgagcagataaatttattgaaggaagagcttgatcagcaaaataaaagatttgattgtttaaagggtgaaatggaagacgacaagagcaagatggagaaaaaggagtctaatttagaaacagagttaaagtctcaaacagcaagaattatggaattagaggaccatattacccagaaaactattgaaatagagtccttaaatgaagttcttaaaaattacaatcaacaaaaggatattgaacacaaagaattggttcagaaacttcaacattttcaagagttaggagaagaaaaggacaacagggttaaagaagctgaagaaaaaatcttaacacttgaaaaccaagtttattccatgaaagctgaacttgaaactaagaagaaagaattagaacatgtgaatttaagtgtgaaaagcaaagaggaggagttaaaggcattggaagataggcttgagtcagaaagtgctgcaaaattagcagagttgaagagaaaagctgaacaaaaaattgctgccattaagaagcagttgttatctcaaatggaagagaaagaagaacagtataaaaaaggtacagaaagccatttgagtgagctaaatacaaaattgcaggaaagagaaagggaagttcacatcttggaagaaaaacttaagtcagtggaaagttcacagtcagaaacattaattgtacccagatcagcaaaaaatgtggcagcatatactgaacaagaagaagcagattcccaaggctgtgtgcagaagacatatgaagaaaaaatcagtgttttacaaagaaacttaactgaaaaagaaaagctattgcagagggtagggcaggaaaaagaagagacagtttcttctcattttgaaatgcgatgccaataccaggagcgcttaataaagctagaacatgctgaggcaaagcaacatgaagatcaaagtatgataggtcatcttcaagaggagcttgaagaaaaaaacaagaaatattccttgatagtagcccagcatgtggaaaaagaaggaggtaaaaataacatacaggcaaagcaaaacttggaaaatgtgtttgacgacgtccagaaaaccctccaggagaaggaactaacctgtcagattttggagcaaaagataaaagagctggattcctgcttagtaagacagaaagaagtacatagagttgaaatggaagagttgacctcaaaatatgaaaaattacaggctttacaacagatggatggaagaaataaacccacagaacttttggaagaaaacactgaagaaaagtccaaatcacatttggtccaacccaaattgcttagtaacatggaagcccagcacaatgatctggagtttaaattagccggggcagaacgggagaaacagaaactgggcaaggagattgttagattgcagaaagaccttcgaatgttgagaaaggagcatcagcaagaattggaaatactaaagaaagaatatgatcaagaaagggaagagaaaatcaaacaggagcaggaagatcttgaactgaagcacaattccacattaaaacagctgatgagggagtttaatacacagctggcacaaaaggaacaagagctggaaatgaccataaaagaaactatcaataaggcccaggaggtggaggctgaacttttagaaagccatcaagaagagacaaatcagttacttaaaaaaattgctgagaaagatgatgatctaaaacgaacagccaaaagatatgaagaaatccttgatgctcgtgaagaagaaatgactgcaaaagtaagggacctgcagactcaacttgaggagctgcagaagaaataccagcaaaagctagagcaggaggagaaccctggcaatgataatgtaacaattatggagctacagacacagctagcacagaagacgactttaatcagtgattcgaaattgaaagagcaagagttcagagaacagattcacaatttagaagaccgtttgaagaaatatgaaaagaatgtatatgcaacaactgtggggacaccttacaaaggtggcaatttgtaccatacggatgtctcactctttggagaacctaccgaatttgagtatttgcgaaaagtgctttttgagtatatgatgggtcgtgagactaagaccatggcaaaagttataaccaccgtactgaagttccctgatgatcagactcagaaaattttggaaagagaagatgctcggctgatgtttacttcacctcgcagtggtatcttctgagtaaaccatcagtctgtgcttagttaacatgtgtcatggctccgatcttcatcttgaagaagagtgacattgggtgactgctgcttggaaaactgtccacacttgctactctttgagaatgaagttgtcattcagggcccctcatgtagccaaaagaccaagaaaaatctggcccacagataagttgcagactgcctttaaaatagattttatcagtggagaaatggtgatagttttttcttcagttttctcttgggaagagttttatgttgtttaaaagatattttgataacttaacctgctttatgggcttacataatattcctttcatccattctttttaaagaacggcttacctttcctatttatttttagggtgattttttaaaaagacttgtgcaatacattttgaggtgaaacttagtggattttttctgataaattagagcatttaattgactattttattcaggttgatctgttgaatatttgctaaagaccagttctttaagctaagacatgtaaaaaatcccaaatggcagtacctcattgtttacttagcttttgtacttatatttttcagaggaaaaaacactactgtaaattgtgaatagccaatacataactgtattgtatgcaaatctgtgattgttggcagtgtcatctctgagaaacagataaataaagtttatttactatataaaaaaaaaaaaaaaagacaaaacaaaacaaacacaaagaaaacacaaacagaaaaagaccagcaacaacgaagcaacagagcaaaagagaacacaccagacgagggcgcccacaggtagacaggaacgggcccccccccgcggccccgcgatccgcggcacgcggggcccctacagacacagccgtgtcacgagcgaatcacggagagtcaccactcgtgactcatagatacgaacggagagatccaaagcacacgggaccgacaaccaacctgtggggaaaaacaacaaaacatcacgcatgggcagcacatacaaaggcaagaaaaccacaaacgactcgacgaggtaaaacagccattacaagcacataccagtcacactagacgatcgacaaataaaagttgaccgcaaaacaacgaagctaacgtacggaagatagaatacccgtccgtgc

SEQ ID NO: 300202 - DNA, 8455 bp, Homo sapiens
ccctggcgcctggtatcagggacttcccgacgctggaagagttcagggaagggaagcgggcccctctggcaccgaagacacagaatcctagctacagctactaaagaaaagaacactatcaattagggcccgcgtcaggttctctggatctccccttctcccatccttgacgctcatccctgtgttctttgcggtgggcccgtcggccctgctgccatcgatagaagcagcactctccccgtctgatttcgcagggccaaagcccaggtgagagtcagggtagtgttcagactagcccacgctccggttctgagccgcgacggcggtctccgcacgcaacgaaatcaggcaggaccgaaccttgcgtcctccagtgcagcgagttcggaagcgaccggccgagcgcgcatgtgcgggacccgacattgtgcttgtcccatccggtgctccgtagttagcctctgtgagctccacgtaggccgcgcaagcgcccttggcgcacagttcacctgctgccgttgtcgtcgccgccgcggctcccggggctggatggggggccgaggccagccagtggcacccggaagaaagagacgcggcggcggcgacgccgacaccctcaggacgagtgtccggacttgcccacagcctcaaggaggagacggcgaggcccggcccccgctgtccctggtgtaaagaagtcgccgtagccgtcgcggccgggactccccgggctctcgcccttcaggtttcgttgacactcaggaccgtacgtacgctgcgccatgttcaagaaactgaagcaaaagatcagcgaggagcagcagcagctccagcaggcgctggctcctgctcaggcgtcctccaattcttcaacaccaacaagaatgaggagcaggacatcttcatttacagagcaacttgatgaaggtacacccaatagagagaatgcatctactcatgcctcgaaatctcctgacagtgttaatggaagtgaaccaagcattcctcagtcaggtgacacacagtcttttgcacagaagctccagctccgggtgccctccgtggagtctttgtttcgaagtccgataaaggaatctctattccggtcttcttctaaagagtctttggtacgaacatcttccagagaatccctgaatcgacttgacctggacagttctactgccagttttgatccaccctctgatatggatagcgaggctgaagacttggtagggaattcagacagtctcaacaaagaacagttgattcagcggttgcgaagaatggaacgaagcttaagtagctacaggggaaaatattctgagcttgttacagcttatcagatgcttcagagagagaagaaaaagctacaaggtatattaagtcagagtcaggataaatcacttcggagaatagcagaattaagagaggagctccaaatggaccagcaggcaaagaaacatctgcaagaggagtttgatgcatctttagaggagaaagatcagtatatcagtgttctccaaactcaggtttctctactgaaacaacgattacgaaatggcccgatgaatgttgatgtactgaaaccacttcctcagctggaaccacaggctgaagtcttcactaaagaagagaatccagaaagtgatggagagccagtagtggaagatggaacttctgtaaaaacactggaaacactccagcaaagagtgaagcgtcaagagaacctacttaagcgttgtaaggaaacaattcagtcacataaggaacaatgtacactattaactagtgaaaaagaagctctgcaagaacaactggatgaaagacttcaagaactagaaaagataaaggaccttcatatggccgagaagactaaacttatcactcagttgcgtgatgcaaagaacttaattgaacagcttgaacaagataagggaatggtaatcgcagagacaaaacgtcagatgcatgaaaccctggaaatgaaagaagaagaaattgctcaactccgtagtcgcatcaaacagatgactacccagggagaggaattacgggaacagaaagaaaagtccgaaagagctgcttttgaggaacttgaaaaagctttgagtacagcccaaaaaacagaggaagcacggagaaaactgaaggcagaaatggatgaacaaataaaaactatcgaaaaaacaagtgaggaggaacgcatcagtcttcaacaggaattaagtcgggtgaaacaggaggttgttgatgtaatgaaaaaatcctcagaagaacaaattgctaagctacagaagcttcatgaaaaggagctggccagaaaagagcaggaactgaccaagaagcttcagacccgagaaagggaatttcaggaacaaatgaaagtagctcttgaaaagagtcaatcagaatatttgaagatcagccaagaaaaagaacagcaagaatctttggccctagaagagttagagttgcagaaaaaagcaatcctcacagaaagtgaaaataaacttcgggaccttcagcaagaagcagagacttacagaactagaattcttgaattggaaagttctttggaaaaaagcttacaagaaaacaaaaatcagtcaaaagatttggctgttcatctggaagctgaaaaaaataagcacaataaggagattacagtcatggttgaaaaacacaagacagaattggaaagccttaagcatcagcaggatgccctttggactgaaaaactccaagtcttaaagcaacaatatcagactgaaatggaaaaacttagggaaaagtgtgaacaagaaaaagaaacattgttgaaagacaaagagattatcttccaggcccacatagaagaaatgaatgaaaagactttagaaaagcttgatgtgaagcaaacagaactagaatcattatcttctgaactgtcagaagtattaaaagcccgtcacaaactagaagaggaactttctgttctgaaagatcaaacagataaaatgaagcaggaattagaggccaagatggatgaacagaaaaatcatcaccagcagcaagttgacagtatcattaaagaacacgaggtatctatccagaggactgagaaggcattaaaagatcaaattaatcaacttgagcttctcttgaaggaaagggacaagcatttgaaagagcatcaggctcatgtagaaaatttagaggcagatattaaaaggtctgaaggggaactccagcaggcatctgctaagctggacgtttttcagtcttaccagagtgccacacatgagcagacaaaagcatatgaggaacagttggcccaattgcagcagaagttgttggatttggaaacagaaagaattcttcttaccaaacaggttgctgaagttgaagcacaaaagaaagatgtttgtactgagttagatgctcacaaaatccaggtgcaggacttaatgcagcaacttgaaaaacaaaatagtgaaatggagcaaaaagtaaaatctttaacccaagtctatgagtccaaacttgaagatggtaacaaagaacaggaacagacaaagcaaatcttggtggaaaaggaaaatatgattttacaaatgagagaaggacagaagaaagaaattgagatactcacacagaaattgtcagccaaggaggacagtattcatattttgaatgaggaatatgaaaccaaatttaaaaaccaagaaaaaaagatggaaaaagttaagcagaaagcaaaggagatgcaagaaacgttaaagaaaaaattactggatcaggaagccaaacttaagaaagagcttgaaaatactgctctagagcttagtcagaaagaaaaacagtttaatgccaaaatgctggaaatggcacaggctaactcagctggaatcagtgatgcagtgtcaagactggaaacaaaccaaaaagaacaaatagaaagtcttactgaggttcatcgacgagaactcaatgatgtcatatcaatctgggaaaagaaacttaatcagcaagctgaagaacttcaggaaatacatgaaatccaattacaggaaaaagaacaagaggtagcagaactgaaacaaaagatcctcctatttgggtgtgaaaaagaagagatgaacaaggaaataacatggctgaaggaagaaggtgttaagcaggatacaacattaaatgaattacaggaacagttaaagcagaagtctgcccatgtgaattctcttgcacaagatgaaactaaactgaaagctcatcttgaaaagctagaggttgacttgaataagtctctgaaggaaaatacttttcttcaagagcagctagttgaactgaagatgctggcagaagaagataagcggaaggtttctgagttgactagcaagttgaaaaccacagatgaagaattccagagtttgaaatcttcacatgaaaaaagtaacaaaagcctagaggacaagagcttggaatttaaaaaactgtctgaggaactagcgattcagctagatatttgctgtaagaaaaccgaagccttattagaagctaaaacaaatgagctaatcaacattagtagtagtaaaactaatgccattctttctaggatttctcattgtcagcaccgtacaactaaagttaaggaggcactgttaattaaaacttgcacagtttctgaattagaagcacaacttagacagttgacagaggagcaaaatacactaaatatttcttttcaacaggctactcatcagttagaagaaaaagaaaatcaaattaagagcatgaaggctgatattgaaagtcttgtaacagaaaaagaagccttacagaaggaaggaggcaatcagcaacaggctgcttctgaaaaggagtcttgtataacacagttgaagaaagagttatctgaaaacatcaatgctgtcacattgatgaaagaagagcttaaagaaaaaaaagttgagattagcagtcttagtaaacaactaactgatttgaatgttcagcttcaaaatagcatcagcctatccgaaaaagaagcagccatttcatcactaagaaagcagtatgatgaagaaaaatgtgaattgctggatcaggtgcaagatttatcttttaaagttgacactctgagtaaagagaaaatttctgctcttgagcaggtagatgactggtccaataaattctcagaatggaagaagaaagcacagtcaagatttacacagcatcaaaacactgttaaagaattgcagatccagcttgagttaaaatcaaaggaagcttatgaaaaggatgagcagataaatttattgaaggaagagcttgatcagcaaaataaaagatttgattgtttaaagggtgaaatggaagacgacaagagcaagatggagaaaaaggagtctaatttagaaacagagttaaagtctcaaacagcaagaattatggaattagaggaccatattacccagaaaactattgaaatagagtccttaaatgaagttcttaaaaattacaatcaacaaaaggatattgaacacaaagaattggttcagaaacttcaacattttcaagagttaggagaagaaaaggacaacagggttaaagaagctgaagaaaaaatcttaacacttgaaaaccaagtttattccatgaaagctgaacttgaaactaagaagaaagaattagaacatgtgaatttaagtgtgaaaagcaaagaggaggagttaaaggcattggaagataggcttgagtcagaaagtgctgcaaaattagcagagttgaagagaaaagctgaacaaaaaattgctgccattaagaagcagttgttatctcaaatggaagagaaagaagaacagtataaaaaaggtacagaaagccatttgagtgagctaaatacaaaattgcaggaaagagaaagggaagttcacatcttggaagaaaaacttaagtcagtggaaagttcacagtcagaaacattaattgtacccagatcagcaaaaaatgtggcagcatatactgaacaagaagaagcagattcccaaggctgtgtgcagaagacatatgaagaaaaaatcagtgttttacaaagaaacttaactgaaaaagaaaagctattgcagagggtagggcaggaaaaagaagagacagtttcttctcattttgaaatgcgatgccaataccaggagcgcttaataaagctagaacatgctgaggcaaagcaacatgaagatcaaagtatgataggtcatcttcaagaggagcttgaagaaaaaaacaagaaatattccttgatagtagcccagcatgtggaaaaagaaggaggtaaaaataacatacaggcaaagcaaaacttggaaaatgtgtttgacgacgtccagaaaaccctccaggagaaggaactaacctgtcagattttggagcaaaagataaaagagctggattcctgcttagtaagacagaaagaagtacatagagttgaaatggaagagttgacctcaaaatatgaaaaattacaggctttacaacagatggatggaagaaataaacccacagaacttttggaagaaaacactgaagaaaagtccaaatcacatttggtccaacccaaattgcttagtaacatggaagcccagcacaatgatctggagtttaaattagccggggcagaacgggagaaacagaaactgggcaaggagattgttagattgcagaaagaccttcgaatgttgagaaaggagcatcagcaagaattggaaatactaaagaaagaatatgatcaagaaagggaagagaaaatcaaacaggagcaggaagatcttgaactgaagcacaattccacattaaaacagctgatgagggagtttaatacacagctggcacaaaaggaacaagagctggaaatgaccataaaagaaactatcaataaggcccaggaggtggaggctgaacttttagaaagccatcaagaagagacaaatcagttacttaaaaaaattgctgagaaagatgatgatctaaaacgaacagccaaaagatatgaagaaatccttgatgctcgtgaagaagaaatgactgcaaaagtaagggacctgcagactcaacttgaggagctgcagaagaaataccagcaaaagctagagcaggaggagaaccctggcaatgataatgtaacaattatggagctacagacacagctagcacagaagacgactttaatcagtgattcgaaattgaaagagcaagagttcagagaacagattcacaatttagaagaccgtttgaagaaatatgaaaagaatgtatatgcaacaactgtggggacaccttacaaaggtggcaatttgtaccatacggatgtctcactctttggagaacctaccgaatttgagtatttgcgaaaagtgctttttgagtatatgatgggtcgtgagactaagaccatggcaaaagttataaccaccgtactgaagttccctgatgatcagactcagaaaattttggaaagagaagatgctcggctgatgtttacttcacctcgcagtggtatcttctgagtaaaccatcagtctgtgcttagttaacatgtgtcatggctccgatcttcatcttgaagaagagtgacattgggtgactgctgcttggaaaactgtccacacttgctactctttgagaatgaagttgtcattcagggcccctcatgtagccaaaagaccaagaaaaatctggcccacagataagttgcagactgcctttaaaatagattttatcagtggagaaatggtgatagttttttcttcagttttctcttgggaagagttttatgttgtttaaaagatattttgataacttaacctgctttatgggcttacataatattcctttcatccattctttttaaagaacggcttacctttcctatttatttttagggtgattttttaaaaagacttgtgcaatacattttgaggtgaaacttagtggattttttctgataaattagagcatttaattgactattttattcaggttgatctgttgaatatttgctaaagaccagttctttaagctaagacatgtaaaaaatcccaaatggcagtacctcattgtttacttagcttttgtacttatatttttcagaggaaaaaacactactgtaaattgtgaatagccaatacataactgtattgtatgcaaatctgtgattgttggcagtgtcatctctgagaaacagataaataaagtttatttactatataaacatttgtttattgtacttgttcctcagttgaaatctattttaaaatgtttaagaatgcatattctatttggatgaatttagtgaggaattatttgtcaatataactaaatgctgagcatttgaaaagaattttcacgttcaaatttggtatgaccaagttagaaggagcatggaaataaatactccatgatgtctgctttaggattctga

SEQ ID NO: 300203 - DNA, 8199 bp, Homo sapiens
ccctggcgcctggtatcagggacttcccgacgctggaagagttcagggaagggaagcgggcccctctggcaccgaagacacagaatcctagctacagctactaaagaaaagaacactatcaattagggcccgcgtcaggttctctggatctccccttctcccatccttgacgctcatccctgtgttctttgcggtgggcccgtcggccctgctgccatcgatagaagcagcactctccccgtctgatttcgcagggccaaagcccaggtgagagtcagggtagtgttcagactagcccacgctccggttctgagccgcgacggcggtctccgcacgcaacgaaatcaggcaggaccgaaccttgcgtcctccagtgcagcgagttcggaagcgaccggccgagcgcgcatgtgcgggacccgacattgtgcttgtcccatccggtgctccgtagttagcctctgtgagctccacgtaggccgcgcaagcgcccttggcgcacagttcacctgctgccgttgtcgtcgccgccgcggctcccggggctggatggggggccgaggccagccagtggcacccggaagaaagagacgcggcggcggcgacgccgacaccctcaggacgagtgtccggacttgcccacagcctcaaggaggagacggcgaggcccggcccccgctgtccctggtgtaaagaagtcgccgtagccgtcgcggccgggactccccgggctctcgcccttcaggtttcgttgacactcaggaccgtacgtacgctgcgccatgttcaagaaactgaagcaaaagatcagcgaggagcagcagcagctccagcaggcgctggctcctgctcaggcgtcctccaattcttcaacaccaacaagaatgaggagcaggacatcttcatttacagagcaacttgatgaaggtacacccaatagagagaatgcatctactcatgcctcgaaatctcctgacagtgttaatggaagtgaaccaagcattcctcagtcaggtgacacacagtcttttgcacagaagctccagctccgggtgccctccgtggagtctttgtttcgaagtccgataaaggaatctctattccggtcttcttctaaagagtctttggtacgaacatcttccagagaatccctgaatcgacttgacctggacagttctactgccagttttgatccaccctctgatatggatagcgaggctgaagacttggtagggaattcagacagtctcaacaaagaacagttgattcagcggttgcgaagaatggaacgaagcttaagtagctacaggggaaaatattctgagcttgttacagcttatcagatgcttcagagagagaagaaaaagctacaaggtatattaagtcagagtcaggataaatcacttcggagaatagcagaattaagagaggagctccaaatggaccagcaggcaaagaaacatctgcaagaggagtttgatgcatctttagaggagaaagatcagtatatcagtgttctccaaactcaggtttctctactgaaacaacgattacgaaatggcccgatgaatgttgatgtactgaaaccacttcctcagctggaaccacaggctgaagtcttcactaaagaagagaatccagaaagtgatggagagccagtagtggaagatggaacttctgtaaaaacactggaaacactccagcaaagagtgaagcgtcaagagaacctacttaagcgttgtaaggaaacaattcagtcacataaggaacaatgtacactattaactagtgaaaaagaagctctgcaagaacaactggatgaaagacttcaagaactagaaaagataaaggaccttcatatggccgagaagactaaacttatcactcagttgcgtgatgcaaagaacttaattgaacagcttgaacaagataagggaatggtaatcgcagagacaaaacgtcagatgcatgaaaccctggaaatgaaagaagaagaaattgctcaactccgtagtcgcatcaaacagatgactacccagggagaggaattacgggaacagaaagaaaagtccgaaagagctgcttttgaggaacttgaaaaagctttgagtacagcccaaaaaacagaggaagcacggagaaaactgaaggcagaaatggatgaacaaataaaaactatcgaaaaaacaagtgaggaggaacgcatcagtcttcaacaggaattaagtcgggtgaaacaggaggttgttgatgtaatgaaaaaatcctcagaagaacaaattgctaagctacagaagcttcatgaaaaggagctggccagaaaagagcaggaactgaccaagaagcttcagacccgagaaagggaatttcaggaacaaatgaaagtagctcttgaaaagagtcaatcagaatatttgaagatcagccaagaaaaagaacagcaagaatctttggccctagaagagttagagttgcagaaaaaagcaatcctcacagaaagtgaaaataaacttcgggaccttcagcaagaagcagagacttacagaactagaattcttgaattggaaagttctttggaaaaaagcttacaagaaaacaaaaatcagtcaaaagatttggctgttcatctggaagctgaaaaaaataagcacaataaggagattacagtcatggttgaaaaacacaagacagaattggaaagccttaagcatcagcaggatgccctttggactgaaaaactccaagtcttaaagcaacaatatcagactgaaatggaaaaacttagggaaaagtgtgaacaagaaaaagaaacattgttgaaagacaaagagattatcttccaggcccacatagaagaaatgaatgaaaagactttagaaaagcttgatgtgaagcaaacagaactagaatcattatcttctgaactgtcagaagtattaaaagcccgtcacaaactagaagaggaactttctgttctgaaagatcaaacagataaaatgaagcaggaattagaggccaagatggatgaacagaaaaatcatcaccagcagcaagttgacagtatcattaaagaacacgaggtatctatccagaggactgagaaggcattaaaagatcaaattaatcaacttgagcttctcttgaaggaaagggacaagcatttgaaagagcatcaggctcatgtagaaaatttagaggcagatattaaaaggtctgaaggggaactccagcaggcatctgctaagctggacgtttttcagtcttaccagagtgccacacatgagcagacaaaagcatatgaggaacagttggcccaattgcagcagaagttgttggatttggaaacagaaagaattcttcttaccaaacaggttgctgaagttgaagcacaaaagaaagatgtttgtactgagttagatgctcacaaaatccaggtgcaggacttaatgcagcaacttgaaaaacaaaatagtgaaatggagcaaaaagtaaaatctttaacccaagtctatgagtccaaacttgaagatggtaacaaagaacaggaacagacaaagcaaatcttggtggaaaaggaaaatatgattttacaaatgagagaaggacagaagaaagaaattgagatactcacacagaaattgtcagccaaggaggacagtattcatattttgaatgaggaatatgaaaccaaatttaaaaaccaagaaaaaaagatggaaaaagttaagcagaaagcaaaggagatgcaagaaacgttaaagaaaaaattactggatcaggaagccaaacttaagaaagagcttgaaaatactgctctagagcttagtcagaaagaaaaacagtttaatgccaaaatgctggaaatggcacaggctaactcagctggaatcagtgatgcagtgtcaagactggaaacaaaccaaaaagaacaaatagaaagtcttactgaggttcatcgacgagaactcaatgatgtcatatcaatctgggaaaagaaacttaatcagcaagctgaagaacttcaggaaatacatgaaatccaattacaggaaaaagaacaagaggtagcagaactgaaacaaaagatcctcctatttgggtgtgaaaaagaagagatgaacaaggaaataacatggctgaaggaagaaggtgttaagcaggatacaacattaaatgaattacaggaacagttaaagcagaagtctgcccatgtgaattctcttgcacaagatgaaactaaactgaaagctcatcttgaaaagctagaggttgacttgaataagtctctgaaggaaaatacttttcttcaagagcagctagttgaactgaagatgctggcagaagaagataagcggaaggtttctgagttgactagcaagttgaaaaccacagatgaagaattccagagtttgaaatcttcacatgaaaaaagtaacaaaagcctagaggacaagagcttggaatttaaaaaactgtctgaggaactagcgattcagctagatatttgctgtaagaaaaccgaagccttattagaagctaaaacaaatgagctaatcaacattagtagtagtaaaactaatgccattctttctaggatttctcattgtcagcaccgtacaactaaagttaaggaggcactgttaattaaaacttgcacagtttctgaattagaagcacaacttagacagttgacagaggagcaaaatacactaaatatttcttttcaacaggctactcatcagttagaagaaaaagaaaatcaaattaagagcatgaaggctgatattgaaagtcttgtaacagaaaaagaagccttacagaaggaaggaggcaatcagcaacaggctgcttctgaaaaggagtcttgtataacacagttgaagaaagagttatctgaaaacatcaatgctgtcacattgatgaaagaagagcttaaagaaaaaaaagttgagattagcagtcttagtaaacaactaactgatttgaatgttcagcttcaaaatagcatcagcctatccgaaaaagaagcagccatttcatcactaagaaagcagtatgatgaagaaaaatgtgaattgctggatcaggtgcaagatttatcttttaaagttgacactctgagtaaagagaaaatttctgctcttgagcaggtagatgactggtccaataaattctcagaatggaagaagaaagcacagtcaagatttacacagcatcaaaacactgttaaagaattgcagatccagcttgagttaaaatcaaaggaagcttatgaaaaggatgagcagataaatttattgaaggaagagcttgatcagcaaaataaaagatttgattgtttaaagggtgaaatggaagacgacaagagcaagatggagaaaaaggagtctaatttagaaacagagttaaagtctcaaacagcaagaattatggaattagaggaccatattacccagaaaactattgaaatagagtccttaaatgaagttcttaaaaattacaatcaacaaaaggatattgaacacaaagaattggttcagaaacttcaacattttcaagagttaggagaagaaaaggacaacagggttaaagaagctgaagaaaaaatcttaacacttgaaaaccaagtttattccatgaaagctgaacttgaaactaagaagaaagaattagaacatgtgaatttaagtgtgaaaagcaaagaggaggagttaaaggcattggaagataggcttgagtcagaaagtgctgcaaaattagcagagttgaagagaaaagctgaacaaaaaattgctgccattaagaagcagttgttatctcaaatggaagagaaagaagaacagtataaaaaaggtacagaaagccatttgagtgagctaaatacaaaattgcaggaaagagaaagggaagttcacatcttggaagaaaaacttaagtcagtggaaagttcacagtcagaaacattaattgtacccagatcagcaaaaaatgtggcagcatatactgaacaagaagaagcagattcccaaggctgtgtgcagaagacatatgaagaaaaaatcagtgttttacaaagaaacttaactgaaaaagaaaagctattgcagagggtagggcaggaaaaagaagagacagtttcttctcattttgaaatgcgatgccaataccaggagcgcttaataaagctagaacatgctgaggcaaagcaacatgaagatcaaagtatgataggtcatcttcaagaggagcttgaagaaaaaaacaagaaatattccttgatagtagcccagcatgtggaaaaagaaggaggtaaaaataacatacaggcaaagcaaaacttggaaaatgtgtttgacgacgtccagaaaaccctccaggagaaggaactaacctgtcagattttggagcaaaagataaaagagctggattcctgcttagtaagacagaaagaagtacatagagttgaaatggaagagttgacctcaaaatatgaaaaattacaggctttacaacagatggatggaagaaataaacccacagaacttttggaagaaaacactgaagaaaagtccaaatcacatttggtccaacccaaattgcttagtaacatggaagcccagcacaatgatctggagtttaaattagccggggcagaacgggagaaacagaaactgggcaaggagattgttagattgcagaaagaccttcgaatgttgagaaaggagcatcagcaagaattggaaatactaaagaaagaatatgatcaagaaagggaagagaaaatcaaacaggagcaggaagatcttgaactgaagcacaattccacattaaaacagctgatgagggagtttaatacacagctggcacaaaaggaacaagagctggaaatgaccataaaagaaactatcaataaggcccaggaggtggaggctgaacttttagaaagccatcaagaagagacaaatcagttacttaaaaaaattgctgagaaagatgatgatctaaaacgaacagccaaaagatatgaagaaatccttgatgctcgtgaagaagaaatgactgcaaaagtaagggacctgcagactcaacttgaggagctgcagaagaaataccagcaaaagctagagcaggaggagaaccctggcaatgataatgtaacaattatggagctacagacacagctagcacagaagacgactttaatcagtgattcgaaattgaaagagcaagagttcagagaacagattcacaatttagaagaccgtttgaagaaatatgaaaagaatgtatatgcaacaactgtggggacaccttacaaaggtggcaatttgtaccatacggatgtctcactctttggagaacctaccgaatttgagtatttgcgaaaagtgctttttgagtatatgatgggtcgtgagactaagaccatggcaaaagttataaccaccgtactgaagttccctgatgatcagactcagaaaattttggaaagagaagatgctcggctgatgtttacttcacctcgcagtggtatcttctgagtaaaccatcagtctgtgcttagttaacatgtgtcatggctccgatcttcatcttgaagaagagtgacattgggtgactgctgcttggaaaactgtccacacttgctactctttgagaatgaagttgtcattcagggcccctcatgtagccaaaagaccaagaaaaatctggcccacagataagttgcagactgcctttaaaatagattttatcagtggagaaatggtgatagttttttcttcagttttctcttgggaagagttttatgttgtttaaaagatattttgataacttaacctgctttatgggcttacataatattcctttcatccattctttttaaagaacggcttacctttcctatttatttttagggtgattttttaaaaagacttgtgcaatacattttgaggtgaaacttagtggattttttctgataaattagagcatttaattgactattttattcaggttgatctgttgaatatttgctaaagaccagttctttaagctaagacatgtaaaaaatcccaaatggcagtacctcattgtttacttagcttttgtacttatatttttcagaggaaaaaacactactgtgattgttggcagtgtcatctctgagaaacagataaataaagtttatttactatataa

SEQ ID NO: 300204 - DNA, 7826 bp, Homo sapiens
ccctggcgcctggtatcagggacttcccgacgctggaagagttcagggaagggaagcgggcccctctggcaccgaagacacagaatcctagctacagctactaaagaaaagaacactatcaattagggcccgcgtcaggttctctggatctccccttctcccatccttgacgctcatccctgtgttctttgcggtgggcccgtcggccctgctgccatcgatagaagcagcactctccccgtctgatttcgcagggccaaagcccaggtgagagtcagggtagtgttcagactagcccacgctccggttctgagccgcgacggcggtctccgcacgcaacgaaatcaggcaggaccgaaccttgcgtcctccagtgcagcgagttcggaagcgaccggccgagcgcgcatgtgcgggacccgacattgtgcttgtcccatccggtgctccgtagttagcctctgtgagctccacgtaggccgcgcaagcgcccttggcgcacagttcacctgctgccgttgtcgtcgccgccgcggctcccggggctggatggggggccgaggccagccagtggcacccggaagaaagagacgcggcggcggcgacgccgacaccctcaggacgagtgtccggacttgcccacagcctcaaggaggagacggcgaggcccggcccccgctgtccctggtgtaaagaagtcgccgtagccgtcgcggccgggactccccgggctctcgcccttcaggtttcgttgacactcaggaccgtacgtacgctgcgccatgttcaagaaactgaagcaaaagatcagcgaggagcagcagcagctccagcaggcgctggctcctgctcaggcgtcctccaattcttcaacaccaacaagaatgaggagcaggacatcttcatttacagagcaacttgatgaaggtacacccaatagagagaatgcatctactcatgcctcgaaatctcctgacagtgttaatggaagtgaaccaagcattcctcagtcaggtgacacacagtcttttgcacagaagctccagctccgggtgccctccgtggagtctttgtttcgaagtccgataaaggaatctctattccggtcttcttctaaagagtctttggtacgaacatcttccagagaatccctgaatcgacttgacctggacagttctactgccagttttgatccaccctctgatatggatagcgaggctgaagacttggtagggaattcagacagtctcaacaaagaacagttgattcagcggttgcgaagaatggaacgaagcttaagtagctacaggggaaaatattctgagcttgttacagcttatcagatgcttcagagagagaagaaaaagctacaaggtatattaagtcagagtcaggataaatcacttcggagaatagcagaattaagagaggagctccaaatggaccagcaggcaaagaaacatctgcaagaggagtttgatgcatctttagaggagaaagatcagtatatcagtgttctccaaactcaggtttctctactgaaacaacgattacgaaatggcccgatgaatgttgatgtactgaaaccacttcctcagctggaaccacaggctgaagtcttcactaaagaagagaatccagaaagtgatggagagccagtagtggaagatggaacttctgtaaaaacactggaaacactccagcaaagagtgaagcgtcaagagaacctacttaagcgttgtaaggaaacaattcagtcacataaggaacaatgtacactattaactagtgaaaaagaagctctgcaagaacaactggatgaaagacttcaagaactagaaaagataaaggaccttcatatggccgagaagactaaacttatcactcagttgcgtgatgcaaagaacttaattgaacagcttgaacaagataagggaatggtaatcgcagagacaaaacgtcagatgcatgaaaccctggaaatgaaagaagaagaaattgctcaactccgtagtcgcatcaaacagatgactacccagggagaggaattacgggaacagaaagaaaagtccgaaagagctgcttttgaggaacttgaaaaagctttgagtacagcccaaaaaacagaggaagcacggagaaaactgaaggcagaaatggatgaacaaataaaaactatcgaaaaaacaagtgaggaggaacgcatcagtcttcaacaggaattaagtcgggtgaaacaggaggttgttgatgtaatgaaaaaatcctcagaagaacaaattgctaagctacagaagcttcatgaaaaggagctggccagaaaagagcaggaactgaccaagaagcttcagacccgagaaagggaatttcaggaacaaatgaaagtagctcttgaaaagagtcaatcagaatatttgaagatcagccaagaaaaagaacagcaagaatctttggccctagaagagttagagttgcagaaaaaagcaatcctcacagaaagtgaaaataaacttcgggaccttcagcaagaagcagagacttacagaactagaattcttgaattggaaagttctttggaaaaaagcttacaagaaaacaaaaatcagtcaaaagatttggctgttcatctggaagctgaaaaaaataagcacaataaggagattacagtcatggttgaaaaacacaagacagaattggaaagccttaagcatcagcaggatgccctttggactgaaaaactccaagtcttaaagcaacaatatcagactgaaatggaaaaacttagggaaaagtgtgaacaagaaaaagaaacattgttgaaagacaaagagattatcttccaggcccacatagaagaaatgaatgaaaagactttagaaaagcttgatgtgaagcaaacagaactagaatcattatcttctgaactgtcagaagtattaaaagcccgtcacaaactagaagaggaactttctgttctgaaagatcaaacagataaaatgaagcaggaattagaggccaagatggatgaacagaaaaatcatcaccagcagcaagttgacagtatcattaaagaacacgaggtatctatccagaggactgagaaggcattaaaagatcaaattaatcaacttgagcttctcttgaaggaaagggacaagcatttgaaagagcatcaggctcatgtagaaaatttagaggcagatattaaaaggtctgaaggggaactccagcaggcatctgctaagctggacgtttttcagtcttaccagagtgccacacatgagcagacaaaagcatatgaggaacagttggcccaattgcagcagaagttgttggatttggaaacagaaagaattcttcttaccaaacaggttgctgaagttgaagcacaaaagaaagatgtttgtactgagttagatgctcacaaaatccaggtgcaggacttaatgcagcaacttgaaaaacaaaatagtgaaatggagcaaaaagtaaaatctttaacccaagtctatgagtccaaacttgaagatggtaacaaagaacaggaacagacaaagcaaatcttggtggaaaaggaaaatatgattttacaaatgagagaaggacagaagaaagaaattgagatactcacacagaaattgtcagccaaggaggacagtattcatattttgaatgaggaatatgaaaccaaatttaaaaaccaagaaaaaaagatggaaaaagttaagcagaaagcaaaggagatgcaagaaacgttaaagaaaaaattactggatcaggaagccaaacttaagaaagagcttgaaaatactgctctagagcttagtcagaaagaaaaacagtttaatgccaaaatgctggaaatggcacaggctaactcagctggaatcagtgatgcagtgtcaagactggaaacaaaccaaaaagaacaaatagaaagtcttactgaggttcatcgacgagaactcaatgatgtcatatcaatctgggaaaagaaacttaatcagcaagctgaagaacttcaggaaatacatgaaatccaattacaggaaaaagaacaagaggtagcagaactgaaacaaaagatcctcctatttgggtgtgaaaaagaagagatgaacaaggaaataacatggctgaaggaagaaggtgttaagcaggatacaacattaaatgaattacaggaacagttaaagcagaagtctgcccatgtgaattctcttgcacaagatgaaactaaactgaaagctcatcttgaaaagctagaggttgacttgaataagtctctgaaggaaaatacttttcttcaagagcagctagttgaactgaagatgctggcagaagaagataagcggaaggtttctgagttgactagcaagttgaaaaccacagatgaagaattccagagtttgaaatcttcacatgaaaaaagtaacaaaagcctagaggacaagagcttggaatttaaaaaactgtctgaggaactagcgattcagctagatatttgctgtaagaaaaccgaagccttattagaagctaaaacaaatgagctaatcaacattagtagtagtaaaactaatgccattctttctaggatttctcattgtcagcaccgtacaactaaagttaaggaggcactgttaattaaaacttgcacagtttctgaattagaagcacaacttagacagttgacagaggagcaaaatacactaaatatttcttttcaacaggctactcatcagttagaagaaaaagaaaatcaaattaagagcatgaaggctgatattgaaagtcttgtaacagaaaaagaagccttacagaaggaaggaggcaatcagcaacaggctgcttctgaaaaggagtcttgtataacacagttgaagaaagagttatctgaaaacatcaatgctgtcacattgatgaaagaagagcttaaagaaaaaaaagttgagattagcagtcttagtaaacaactaactgatttgaatgttcagcttcaaaatagcatcagcctatccgaaaaagaagcagccatttcatcactaagaaagcagtatgatgaagaaaaatgtgaattgctggatcaggtgcaagatttatcttttaaagttgacactctgagtaaagagaaaatttctgctcttgagcaggtagatgactggtccaataaattctcagaatggaagaagaaagcacagtcaagatttacacagcatcaaaacactgttaaagaattgcagatccagcttgagttaaaatcaaaggaagcttatgaaaaggatgagcagataaatttattgaaggaagagcttgatcagcaaaataaaagatttgattgtttaaagggtgaaatggaagacgacaagagcaagatggagaaaaaggagtctaatttagaaacagagttaaagtctcaaacagcaagaattatggaattagaggaccatattacccagaaaactattgaaatagagtccttaaatgaagttcttaaaaattacaatcaacaaaaggatattgaacacaaagaattggttcagaaacttcaacattttcaagagttaggagaagaaaaggacaacagggttaaagaagctgaagaaaaaatcttaacacttgaaaaccaagtttattccatgaaagctgaacttgaaactaagaagaaagaattagaacatgtgaatttaagtgtgaaaagcaaagaggaggagttaaaggcattggaagataggcttgagtcagaaagtgctgcaaaattagcagagttgaagagaaaagctgaacaaaaaattgctgccattaagaagcagttgttatctcaaatggaagagaaagaagaacagtataaaaaaggtacagaaagccatttgagtgagctaaatacaaaattgcaggaaagagaaagggaagttcacatcttggaagaaaaacttaagtcagtggaaagttcacagtcagaaacattaattgtacccagatcagcaaaaaatgtggcagcatatactgaacaagaagaagcagattcccaaggctgtgtgcagaagacatatgaagaaaaaatcagtgttttacaaagaaacttaactgaaaaagaaaagctattgcagagggtagggcaggaaaaagaagagacagtttcttctcattttgaaatgcgatgccaataccaggagcgcttaataaagctagaacatgctgaggcaaagcaacatgaagatcaaagtatgataggtcatcttcaagaggagcttgaagaaaaaaacaagaaatattccttgatagtagcccagcatgtggaaaaagaaggaggtaaaaataacatacaggcaaagcaaaacttggaaaatgtgtttgacgacgtccagaaaaccctccaggagaaggaactaacctgtcagattttggagcaaaagataaaagagctggattcctgcttagtaagacagaaagaagtacatagagttgaaatggaagagttgacctcaaaatatgaaaaattacaggctttacaacagatggatggaagaaataaacccacagaacttttggaagaaaacactgaagaaaagtccaaatcacatttggtccaacccaaattgcttagtaacatggaagcccagcacaatgatctggagtttaaattagccggggcagaacgggagaaacagaaactgggcaaggagattgttagattgcagaaagaccttcgaatgttgagaaaggagcatcagcaagaattggaaatactaaagaaagaatatgatcaagaaagggaagagaaaatcaaacaggagcaggaagatcttgaactgaagcacaattccacattaaaacagctgatgagggagtttaatacacagctggcacaaaaggaacaagagctggaaatgaccataaaagaaactatcaataaggcccaggaggtggaggctgaacttttagaaagccatcaagaagagacaaatcagttacttaaaaaaattgctgagaaagatgatgatctaaaacgaacagccaaaagatatgaagaaatccttgatgctcgtgaagaagaaatgactgcaaaagtaagggacctgcagactcaacttgaggagctgcagaagaaataccagcaaaagctagagcaggaggagaaccctggcaatgataatgtaacaattatggagctacagacacagctagcacagaagacgactttaatcagtgattcgaaattgaaagagcaagagttcagagaacagattcacaatttagaagaccgtttgaagaaatatgaaaagaatgtatatgcaacaactgtggggacaccttacaaaggtggcaatttgtaccatacggatgtctcactctttggagaacctaccgaatttgagtatttgcgaaaagtgctttttgagtatatgatgggtcgtgagactaagaccatggcaaaagttataaccaccgtactgaagttccctgatgatcagactcagaaaattttggaaagagaagatgctcggctgatgtttacttcacctcgcagtggtatcttctgagtaaaccatcagtctgtgcttagttaacatgtgtcatggctccgatcttcatcttgaagaagagtgacattgggtgactgctgcttggaaaactgtccacacttgctactctttgagaatgaagttgtcattcagggcccctcatgtagccaaaagacgagcactccctagggagtgctgttttaagattattttgttttcagcttctctgttcaaataatccactgttcaggttttaatcctagacacttaagacaaagaagtttcattcccaaagacgagcac

SEQ ID NO: 300205 - DNA, 8096 bp, Homo sapiens
ccctggcgcctggtatcagggacttcccgacgctggaagagttcagggaagggaagcgggcccctctggcaccgaagacacagaatcctagctacagctactaaagaaaagaacactatcaattagggcccgcgtcaggttctctggatctccccttctcccatccttgacgctcatccctgtgttctttgcggtgggcccgtcggccctgctgccatcgatagaagcagcactctccccgtctgatttcgcagggccaaagcccaggtgagagtcagggtagtgttcagactagcccacgctccggttctgagccgcgacggcggtctccgcacgcaacgaaatcaggcaggaccgaaccttgcgtcctccagtgcagcgagttcggaagcgaccggccgagcgcgcatgtgcgggacccgacattgtgcttgtcccatccggtgctccgtagttagcctctgtgagctccacgtaggccgcgcaagcgcccttggcgcacagttcacctgctgccgttgtcgtcgccgccgcggctcccggggctggatggggggccgaggccagccagtggcacccggaagaaagagacgcggcggcggcgacgccgacaccctcaggacgagtgtccggacttgcccacagcctcaaggaggagacggcgaggcccggcccccgctgtccctggtgtaaagaagtcgccgtagccgtcgcggccgggactccccgggctctcgcccttcaggtttcgttgacactcaggaccgtacgtacgctgcgccatgttcaagaaactgaagcaaaagatcagcgaggagcagcagcagctccagcaggcgctggctcctgctcaggcgtcctccaattcttcaacaccaacaagaatgaggagcaggacatcttcatttacagagcaacttgatgaaggtacacccaatagagagaatgcatctactcatgcctcgaaatctcctgacagtgttaatggaagtgaaccaagcattcctcagtcaggtgacacacagtcttttgcacagaagctccagctccgggtgccctccgtggagtctttgtttcgaagtccgataaaggaatctctattccggtcttcttctaaagagtctttggtacgaacatcttccagagaatccctgaatcgacttgacctggacagttctactgccagttttgatccaccctctgatatggatagcgaggctgaagacttggtagggaattcagacagtctcaacaaagaacagttgattcagcggttgcgaagaatggaacgaagcttaagtagctacaggggaaaatattctgagcttgttacagcttatcagatgcttcagagagagaagaaaaagctacaaggtatattaagtcagagtcaggataaatcacttcggagaatagcagaattaagagaggagctccaaatggaccagcaggcaaagaaacatctgcaagaggagtttgatgcatctttagaggagaaagatcagtatatcagtgttctccaaactcaggtttctctactgaaacaacgattacgaaatggcccgatgaatgttgatgtactgaaaccacttcctcagctggaaccacaggctgaagtcttcactaaagaagagaatccagaaagtgatggagagccagtagtggaagatggaacttctgtaaaaacactggaaacactccagcaaagagtgaagcgtcaagagaacctacttaagcgttgtaaggaaacaattcagtcacataaggaacaatgtacactattaactagtgaaaaagaagctctgcaagaacaactggatgaaagacttcaagaactagaaaagataaaggaccttcatatggccgagaagactaaacttatcactcagttgcgtgatgcaaagaacttaattgaacagcttgaacaagataagggaatggtaatcgcagagacaaaacgtcagatgcatgaaaccctggaaatgaaagaagaagaaattgctcaactccgtagtcgcatcaaacagatgactacccagggagaggaattacgggaacagaaagaaaagtccgaaagagctgcttttgaggaacttgaaaaagctttgagtacagcccaaaaaacagaggaagcacggagaaaactgaaggcagaaatggatgaacaaataaaaactatcgaaaaaacaagtgaggaggaacgcatcagtcttcaacaggaattaagtcgggtgaaacaggaggttgttgatgtaatgaaaaaatcctcagaagaacaaattgctaagctacagaagcttcatgaaaaggagctggccagaaaagagcaggaactgaccaagaagcttcagacccgagaaagggaatttcaggaacaaatgaaagtagctcttgaaaagagtcaatcagaatatttgaagatcagccaagaaaaagaacagcaagaatctttggccctagaagagttagagttgcagaaaaaagcaatcctcacagaaagtgaaaataaacttcgggaccttcagcaagaagcagagacttacagaactagaattcttgaattggaaagttctttggaaaaaagcttacaagaaaacaaaaatcagtcaaaagatttggctgttcatctggaagctgaaaaaaataagcacaataaggagattacagtcatggttgaaaaacacaagacagaattggaaagccttaagcatcagcaggatgccctttggactgaaaaactccaagtcttaaagcaacaatatcagactgaaatggaaaaacttagggaaaagtgtgaacaagaaaaagaaacattgttgaaagacaaagagattatcttccaggcccacatagaagaaatgaatgaaaagactttagaaaagcttgatgtgaagcaaacagaactagaatcattatcttctgaactgtcagaagtattaaaagcccgtcacaaactagaagaggaactttctgttctgaaagatcaaacagataaaatgaagcaggaattagaggccaagatggatgaacagaaaaatcatcaccagcagcaagttgacagtatcattaaagaacacgaggtatctatccagaggactgagaaggcattaaaagatcaaattaatcaacttgagcttctcttgaaggaaagggacaagcatttgaaagagcatcaggctcatgtagaaaatttagaggcagatattaaaaggtctgaaggggaactccagcaggcatctgctaagctggacgtttttcagtcttaccagagtgccacacatgagcagacaaaagcatatgaggaacagttggcccaattgcagcagaagttgttggatttggaaacagaaagaattcttcttaccaaacaggttgctgaagttgaagcacaaaagaaagatgtttgtactgagttagatgctcacaaaatccaggtgcaggacttaatgcagcaacttgaaaaacaaaatagtgaaatggagcaaaaagtaaaatctttaacccaagtctatgagtccaaacttgaagatggtaacaaagaacaggaacagacaaagcaaatcttggtggaaaaggaaaatatgattttacaaatgagagaaggacagaagaaagaaattgagatactcacacagaaattgtcagccaaggaggacagtattcatattttgaatgaggaatatgaaaccaaatttaaaaaccaagaaaaaaagatggaaaaagttaagcagaaagcaaaggagatgcaagaaacgttaaagaaaaaattactggatcaggaagccaaacttaagaaagagcttgaaaatactgctctagagcttagtcagaaagaaaaacagtttaatgccaaaatgctggaaatggcacaggctaactcagctggaatcagtgatgcagtgtcaagactggaaacaaaccaaaaagaacaaatagaaagtcttactgaggttcatcgacgagaactcaatgatgtcatatcaatctgggaaaagaaacttaatcagcaagctgaagaacttcaggaaatacatgaaatccaattacaggaaaaagaacaagaggtagcagaactgaaacaaaagatcctcctatttgggtgtgaaaaagaagagatgaacaaggaaataacatggctgaaggaagaaggtgttaagcaggatacaacattaaatgaattacaggaacagttaaagcagaagtctgcccatgtgaattctcttgcacaagatgaaactaaactgaaagctcatcttgaaaagctagaggttgacttgaataagtctctgaaggaaaatacttttcttcaagagcagctagttgaactgaagatgctggcagaagaagataagcggaaggtttctgagttgactagcaagttgaaaaccacagatgaagaattccagagtttgaaatcttcacatgaaaaaagtaacaaaagcctagaggacaagagcttggaatttaaaaaactgtctgaggaactagcgattcagctagatatttgctgtaagaaaaccgaagccttattagaagctaaaacaaatgagctaatcaacattagtagtagtaaaactaatgccattctttctaggatttctcattgtcagcaccgtacaactaaagttaaggaggcactgttaattaaaacttgcacagtttctgaattagaagcacaacttagacagttgacagaggagcaaaatacactaaatatttcttttcaacaggctactcatcagttagaagaaaaagaaaatcaaattaagagcatgaaggctgatattgaaagtcttgtaacagaaaaagaagccttacagaaggaaggaggcaatcagcaacaggctgcttctgaaaaggagtcttgtataacacagttgaagaaagagttatctgaaaacatcaatgctgtcacattgatgaaagaagagcttaaagaaaaaaaagttgagattagcagtcttagtaaacaactaactgatttgaatgttcagcttcaaaatagcatcagcctatccgaaaaagaagcagccatttcatcactaagaaagcagtatgatgaagaaaaatgtgaattgctggatcaggtgcaagatttatcttttaaagttgacactctgagtaaagagaaaatttctgctcttgagcaggtagatgactggtccaataaattctcagaatggaagaagaaagcacagtcaagatttacacagcatcaaaacactgttaaagaattgcagatccagcttgagttaaaatcaaaggaagcttatgaaaaggatgagcagataaatttattgaaggaagagcttgatcagcaaaataaaagatttgattgtttaaagggtgaaatggaagacgacaagagcaagatggagaaaaaggagtctaatttagaaacagagttaaagtctcaaacagcaagaattatggaattagaggaccatattacccagaaaactattgaaatagagtccttaaatgaagttcttaaaaattacaatcaacaaaaggatattgaacacaaagaattggttcagaaacttcaacattttcaagagttaggagaagaaaaggacaacagggttaaagaagctgaagaaaaaatcttaacacttgaaaaccaagtttattccatgaaagctgaacttgaaactaagaagaaagaattagaacatgtgaatttaagtgtgaaaagcaaagaggaggagttaaaggcattggaagataggcttgagtcagaaagtgctgcaaaattagcagagttgaagagaaaagctgaacaaaaaattgctgccattaagaagcagttgttatctcaaatggaagagaaagaagaacagtataaaaaaggtacagaaagccatttgagtgagctaaatacaaaattgcaggaaagagaaagggaagttcacatcttggaagaaaaacttaagtcagtggaaagttcacagtcagaaacattaattgtacccagatcagcaaaaaatgtggcagcatatactgaacaagaagaagcagattcccaaggctgtgtgcagaagacatatgaagaaaaaatcagtgttttacaaagaaacttaactgaaaaagaaaagctattgcagagggtagggcaggaaaaagaagagacagtttcttctcattttgaaatgcgatgccaataccaggagcgcttaataaagctagaacatgctgaggcaaagcaacatgaagatcaaagtatgataggtcatcttcaagaggagcttgaagaaaaaaacaagaaatattccttgatagtagcccagcatgtggaaaaagaaggaggtaaaaataacatacaggcaaagcaaaacttggaaaatgtgtttgacgacgtccagaaaaccctccaggagaaggaactaacctgtcagattttggagcaaaagataaaagagctggattcctgcttagtaagacagaaagaagtacatagagttgaaatggaagagttgacctcaaaatatgaaaaattacaggctttacaacagatggatggaagaaataaacccacagaacttttggaagaaaacactgaagaaaagtccaaatcacatttggtccaacccaaattgcttagtaacatggaagcccagcacaatgatctggagtttaaattagccggggcagaacgggagaaacagaaactgggcaaggagattgttagattgcagaaagaccttcgaatgttgagaaaggagcatcagcaagaattggaaatactaaagaaagaatatgatcaagaaagggaagagaaaatcaaacaggagcaggaagatcttgaactgaagcacaattccacattaaaacagctgatgagggagtttaatacacagctggcacaaaaggaacaagagctggaaatgaccataaaagaaactatcaataaggcccaggaggtggaggctgaacttttagaaagccatcaagaagagacaaatcagttacttaaaaaaattgctgagaaagatgatgatctaaaacgaacagccaaaagatatgaagaaatccttgatgctcgtgaagaagaaatgactgcaaaagtaagggacctgcagactcaacttgaggagctgcagaagaaataccagcaaaagctagagcaggaggagaaccctggcaatgataatgtaacaattatggagctacagacacagctagcacagaagacgactttaatcagtgattcgaaattgaaagagcaagagttcagagaacagattcacaatttagaagaccgtttgaagaaatatgaaaagaatgtatatgcaacaactgtggggacaccttacaaaggtggcaatttgtaccatacggatgtctcactctttggagaacctaccgaatttgagtatttgcgaaaagtgctttttgagtatatgatgggtcgtgagactaagaccatggcaaaagttataaccaccgtactgaagttccctgatgatcagactcagaaaattttggaaagagaagatgctcggctgatgtttacttcacctcgcagtggtatcttctgagtaaaccatcagtctgtgcttagttaacatgtggtgagtgaagaacaatgtcttgtgtcttttgtgcaaaaatcaaatgtgttgcctgatactaaccattttgctggaattcttttgctcttgtttaataaatatatgattatgctatgggttaatataagtattttctgttcattctgttatatggatcgataatagttaaaaattactaccaccagtaagagttatataattttaggaaatttcatttctttaaagagtaattgaaagtttgaaaattgctctttgaaattttgttaaagaatccaaaaaagtatttatgtaacttattttcccttttgtttttaattttccaagaatgatctttgaaattatgattgtgagagagaaatgaaaatcattttctagataaaaatgaagtggtatattccgtgagaattcaaaatcctgtaaagcctgagtcaaggccagtcagaaataatgaaaactagtaagatcaattttaaaatatagcttcattacttcctgaaatcagacagtttaacacaagacaac

SEQ ID NO: 300206 - DNA, 2270 bp, Homo sapiens
  misc_feature (578)..(578): n is a, c, g, or t
gaagaagaaatgactgcaaaagtaagggacctgcagactcaacttgaggagctgcagaagaaataccagcaaaagctagagcaggaggagaaccctggcaatgataatgtaacaattatggagctacagacacagctagcacagaagacgactttaatcagtgattcgaaattgaaagagcaagagttcagagaacagattcacaatttagaagaccgtttgaagaaatatgaaaagaatgtatatgcaacaactgtggggacaccttacaaaggtggcaatttgtaccatacggatgtctcactctttggagaacctaccgaatttgagtatttgcgaaaagtgctttttgagtatatgatgggtcgtgagactaagaccatggcaaaagttataaccaccgtactgaagttccctgatgatcagactcagaaaattttggaaagagaagatgctcggctgatgtcatggctccgatcttcatcttgaagaagagtgacattgggtgactgctgcttggaaaactgtccacacttgctactctttgagaatgaagttgtcattcagggcccctcatntagccaaaagaccaagaaaaatctggcccacagataagttgcagactgcctttaacatggaagcccagcacaatgatctggagtttaaattagccggggcagaacgggagaaacagaaactgggcaaggagattgttagattgcagaaagaccttcgaatgttgagaaaggagcatcagcaagaattggaaatactaaagaaagaatatgatcaagaaagggaagagaaaatcaaacaggagcaggaagatcttgaactgaagcacaattccacattaaaacagctgatgagggagtttaatacacagctggcacaaaaggaacaagagctggaaatgaccataaaagaaactatcaataaggcccaggaggtggaggctgaacttttagaaagccatcaagaagagacaaatcagttacttaaaaaaattgctgagaaagatgatgatctaaaacgaacagccaaaagatatgaagaaatccttgatgctcgtgaagaagaaatgactgcaaaagtaagggacctgcagactcaacttgaggagctgcagaagaaataccagcaaaagctagagcaggaggagaaccctggcaatgataatgtaacaattatggagctacagacacagctagcacagaagacgactttaatcagtgattcgaaattgaaagagcaagagttcagagaacagattcacaatttagaagaccgtttgaagaaatatgaaaagaatgtatatgcaacaactgtggggacaccttacaaaggtggcaatttgtaccatacggatgtctcactctttggagaacctaccgaatttgagtatttgcgaaaagtgctttttgagtatatgatgggtcgtgagactaagaccatggcaaaagttataaccaccgtactgaagttccctgatgatcagactcagaaaattttggaaagagaagatgctcggctgatgtttacttcacctcgcagtggtatcttctgagtaaaccatcagtctgtgcttagttaacatgtgtcatggctccgatcttcatcttgaagaagagtgacattgggtgactgctgcttggaaaactgtccacacttgctactctttgagaatgaagttgtcattcagggcccctcatgtagccaaaagaccaagaaaaatctggcccacagataagttgcagactgcctttaaaatagattttatcagtggagaaatggtgatagttttttcttcagttttctcttgggaagagttttatgttgtttaaaagatattttgataacttaacctgctttatgggcttacataatattcctttcatccattctttttaaagaacggcttacctttcctatttatttttagggtgattttttaaaaagacttgtgcaatacattttgaggtgaaacttagtggattttttctgataaattagagcatttaattgactattttattcaggttgatctgttgaatatttgctaaagaccagttctttaagctaagacatgtaaaaaatcccaaatggcagtacctcattgtttacttagcttttgtacttatatttttcagaggaaaaaacactactgtaaattgtgaatagccaatacataactgtattgtatgcaaatctgtgattgttggcagtgtcatctctgagaaacagataaataaagtttatttactatataa

SEQ ID NO: 300207 - DNA, 7692 bp, Homo sapiens
ccctggcgcctggtatcagggacttcccgacgctggaagagttcagggaagggaagcgggcccctctggcaccgaagacacagaatcctagctacagctactaaagaaaagaacactatcaattagggcccgcgtcaggttctctggatctccccttctcccatccttgacgctcatccctgtgttctttgcggtgggcccgtcggccctgctgccatcgatagaagcagcactctccccgtctgatttcgcagggccaaagcccaggtgagagtcagggtagtgttcagactagcccacgctccggttctgagccgcgacggcggtctccgcacgcaacgaaatcaggcaggaccgaaccttgcgtcctccagtgcagcgagttcggaagcgaccggccgagcgcgcatgtgcgggacccgacattgtgcttgtcccatccggtgctccgtagttagcctctgtgagctccacgtaggccgcgcaagcgcccttggcgcacagttcacctgctgccgttgtcgtcgccgccgcggctcccggggctggatggggggccgaggccagccagtggcacccggaagaaagagacgcggcggcggcgacgccgacaccctcaggacgagtgtccggacttgcccacagcctcaaggaggagacggcgaggcccggcccccgctgtccctggtgtaaagaagtcgccgtagccgtcgcggccgggactccccgggctctcgcccttcaggtttcgttgacactcaggaccgtacgtacgctgcgccatgttcaagaaactgaagcaaaagatcagcgaggagcagcagcagctccagcaggcgctggctcctgctcaggcgtcctccaattcttcaacaccaacaagaatgaggagcaggacatcttcatttacagagcaacttgatgaaggtacacccaatagagagaatgcatctactcatgcctcgaaatctcctgacagtgttaatggaagtgaaccaagcattcctcagtcaggtgacacacagtcttttgcacagaagctccagctccgggtgccctccgtggagtctttgtttcgaagtccgataaaggaatctctattccggtcttcttctaaagagtctttggtacgaacatcttccagagaatccctgaatcgacttgacctggacagttctactgccagttttgatccaccctctgatatggatagcgaggctgaagacttggtagggaattcagacagtctcaacaaagaacagttgattcagcggttgcgaagaatggaacgaagcttaagtagctacaggggaaaatattctgagcttgttacagcttatcagatgcttcagagagagaagaaaaagctacaaggtatattaagtcagagtcaggataaatcacttcggagaatagcagaattaagagaggagctccaaatggaccagcaggcaaagaaacatctgcaagaggagtttgatgcatctttagaggagaaagatcagtatatcagtgttctccaaactcaggtttctctactgaaacaacgattacgaaatggcccgatgaatgttgatgtactgaaaccacttcctcagctggaaccacaggctgaagtcttcactaaagaagagaatccagaaagtgatggagagccagtagtggaagatggaacttctgtaaaaacactggaaacactccagcaaagagtgaagcgtcaagagaacctacttaagcgttgtaaggaaacaattcagtcacataaggaacaatgtacactattaactagtgaaaaagaagctctgcaagaacaactggatgaaagacttcaagaactagaaaagataaaggaccttcatatggccgagaagactaaacttatcactcagttgcgtgatgcaaagaacttaattgaacagcttgaacaagataagggaatggtaatcgcagagacaaaacgtcagatgcatgaaaccctggaaatgaaagaagaagaaattgctcaactccgtagtcgcatcaaacagatgactacccagggagaggaattacgggaacagaaagaaaagtccgaaagagctgcttttgaggaacttgaaaaagctttgagtacagcccaaaaaacagaggaagcacggagaaaactgaaggcagaaatggatgaacaaataaaaactatcgaaaaaacaagtgaggaggaacgcatcagtcttcaacaggaattaagtcgggtgaaacaggaggttgttgatgtaatgaaaaaatcctcagaagaacaaattgctaagctacagaagcttcatgaaaaggagctggccagaaaagagcaggaactgaccaagaagcttcagacccgagaaagggaatttcaggaacaaatgaaagtagctcttgaaaagagtcaatcagaatatttgaagatcagccaagaaaaagaacagcaagaatctttggccctagaagagttagagttgcagaaaaaagcaatcctcacagaaagtgaaaataaacttcgggaccttcagcaagaagcagagacttacagaactagaattcttgaattggaaagttctttggaaaaaagcttacaagaaaacaaaaatcagtcaaaagatttggctgttcatctggaagctgaaaaaaataagcacaataaggagattacagtcatggttgaaaaacacaagacagaattggaaagccttaagcatcagcaggatgccctttggactgaaaaactccaagtcttaaagcaacaatatcagactgaaatggaaaaacttagggaaaagtgtgaacaagaaaaagaaacattgttgaaagacaaagagattatcttccaggcccacatagaagaaatgaatgaaaagactttagaaaagcttgatgtgaagcaaacagaactagaatcattatcttctgaactgtcagaagtattaaaagcccgtcacaaactagaagaggaactttctgttctgaaagatcaaacagataaaatgaagcaggaattagaggccaagatggatgaacagaaaaatcatcaccagcagcaagttgacagtatcattaaagaacacgaggtatctatccagaggactgagaaggcattaaaagatcaaattaatcaacttgagcttctcttgaaggaaagggacaagcatttgaaagagcatcaggctcatgtagaaaatttagaggcagatattaaaaggtctgaaggggaactccagcaggcatctgctaagctggacgtttttcagtcttaccagagtgccacacatgagcagacaaaagcatatgaggaacagttggcccaattgcagcagaagttgttggatttggaaacagaaagaattcttcttaccaaacaggttgctgaagttgaagcacaaaagaaagatgtttgtactgagttagatgctcacaaaatccaggtgcaggacttaatgcagcaacttgaaaaacaaaatagtgaaatggagcaaaaagtaaaatctttaacccaagtctatgagtccaaacttgaagatggtaacaaagaacaggaacagacaaagcaaatcttggtggaaaaggaaaatatgattttacaaatgagagaaggacagaagaaagaaattgagatactcacacagaaattgtcagccaaggaggacagtattcatattttgaatgaggaatatgaaaccaaatttaaaaaccaagaaaaaaagatggaaaaagttaagcagaaagcaaaggagatgcaagaaacgttaaagaaaaaattactggatcaggaagccaaacttaagaaagagcttgaaaatactgctctagagcttagtcagaaagaaaaacagtttaatgccaaaatgctggaaatggcacaggctaactcagctggaatcagtgatgcagtgtcaagactggaaacaaaccaaaaagaacaaatagaaagtcttactgaggttcatcgacgagaactcaatgatgtcatatcaatctgggaaaagaaacttaatcagcaagctgaagaacttcaggaaatacatgaaatccaattacaggaaaaagaacaagaggtagcagaactgaaacaaaagatcctcctatttgggtgtgaaaaagaagagatgaacaaggaaataacatggctgaaggaagaaggtgttaagcaggatacaacattaaatgaattacaggaacagttaaagcagaagtctgcccatgtgaattctcttgcacaagatgaaactaaactgaaagctcatcttgaaaagctagaggttgacttgaataagtctctgaaggaaaatacttttcttcaagagcagctagttgaactgaagatgctggcagaagaagataagcggaaggtttctgagttgactagcaagttgaaaaccacagatgaagaattccagagtttgaaatcttcacatgaaaaaagtaacaaaagcctagaggacaagagcttggaatttaaaaaactgtctgaggaactagcgattcagctagatatttgctgtaagaaaaccgaagccttattagaagctaaaacaaatgagctaatcaacattagtagtagtaaaactaatgccattctttctaggatttctcattgtcagcaccgtacaactaaagttaaggaggcactgttaattaaaacttgcacagtttctgaattagaagcacaacttagacagttgacagaggagcaaaatacactaaatatttcttttcaacaggctactcatcagttagaagaaaaagaaaatcaaattaagagcatgaaggctgatattgaaagtcttgtaacagaaaaagaagccttacagaaggaaggaggcaatcagcaacaggctgcttctgaaaaggagtcttgtataacacagttgaagaaagagttatctgaaaacatcaatgctgtcacattgatgaaagaagagcttaaagaaaaaaaagttgagattagcagtcttagtaaacaactaactgatttgaatgttcagcttcaaaatagcatcagcctatccgaaaaagaagcagccatttcatcactaagaaagcagtatgatgaagaaaaatgtgaattgctggatcaggtgcaagatttatcttttaaagttgacactctgagtaaagagaaaatttctgctcttgagcaggtagatgactggtccaataaattctcagaatggaagaagaaagcacagtcaagatttacacagcatcaaaacactgttaaagaattgcagatccagcttgagttaaaatcaaaggaagcttatgaaaaggatgagcagataaatttattgaaggaagagcttgatcagcaaaataaaagatttgattgtttaaagggtgaaatggaagacgacaagagcaagatggagaaaaaggagtctaatttagaaacagagttaaagtctcaaacagcaagaattatggaattagaggaccatattacccagaaaactattgaaatagagtccttaaatgaagttcttaaaaattacaatcaacaaaaggatattgaacacaaagaattggttcagaaacttcaacattttcaagagttaggagaagaaaaggacaacagggttaaagaagctgaagaaaaaatcttaacacttgaaaaccaagtttattccatgaaagctgaacttgaaactaagaagaaagaattagaacatgtgaatttaagtgtgaaaagcaaagaggaggagttaaaggcattggaagataggcttgagtcagaaagtgctgcaaaattagcagagttgaagagaaaagctgaacaaaaaattgctgccattaagaagcagttgttatctcaaatggaagagaaagaagaacagtataaaaaaggtacagaaagccatttgagtgagctaaatacaaaattgcaggaaagagaaagggaagttcacatcttggaagaaaaacttaagtcagtggaaagttcacagtcagaaacattaattgtacccagatcagcaaaaaatgtggcagcatatactgaacaagaagaagcagattcccaaggctgtgtgcagaagacatatgaagaaaaaatcagtgttttacaaagaaacttaactgaaaaagaaaagctattgcagagggtagggcaggaaaaagaagagacagtttcttctcattttgaaatgcgatgccaataccaggagcgcttaataaagctagaacatgctgaggcaaagcaacatgaagatcaaagtatgataggtcatcttcaagaggagcttgaagaaaaaaacaagaaatattccttgatagtagcccagcatgtggaaaaagaaggaggtaaaaataacatacaggcaaagcaaaacttggaaaatgtgtttgacgacgtccagaaaaccctccaggagaaggaactaacctgtcagattttggagcaaaagataaaagagctggattcctgcttagtaagacagaaagaagtacatagagttgaaatggaagagttgacctcaaaatatgaaaaattacaggctttacaacagatggatggaagaaataaacccacagaacttttggaagaaaacactgaagaaaagtccaaatcacatttggtccaacccaaattgcttagtaacatggaagcccagcacaatgatctggagtttaaattagccggggcagaacgggagaaacagaaactgggcaaggagattgttagattgcagaaagaccttcgaatgttgagaaaggagcatcagcaagaattggaaatactaaagaaagaatatgatcaagaaagggaagagaaaatcaaacaggagcaggaagatcttgaactgaagcacaattccacattaaaacagctgatgagggagtttaatacacagctggcacaaaaggaacaagagctggaaatgaccataaaagaaactatcaataaggcccaggaggtggaggctgaacttttagaaagccatcaagaagagacaaatcagttacttaaaaaaattgctgagaaagatgatgatctaaaacgaacagccaaaagatatgaagaaatccttgatgctcgtgaagaagaaatgactgcaaaagtaagggacctgcagactcaacttgaggagctgcagaagaaataccagcaaaagctagagcaggaggagaaccctggcaatgataatgtaacaattatggagctacagacacagctagcacagaagacgactttaatcagtgattcgaaattgaaagagcaagagttcagagaacagattcacaatttagaagaccgtttgaagaaatatgaaaagaatgtatatgcaacaactgtggggacaccttacaaaggtggcaatttgtaccatacggatgtctcactctttggagaacctaccgaatttgagtatttgcgaaaagtgctttttgagtatatgatgggtcgtgagactaaggtataaatcatgtctcgtgatttggtgtgtggcttaattttaaaagaaatatgttccacttttaatacacatgtgaatgccatatgtttactattagcaaatcagacatgctaatagtaggtaatagataattattttattgctcttagtttacaaagtgaattggtggatcttgcttatatttattacatttataaaacattaattttgaaaatactattgggtaacactgaacgctaaacattaaaatttcattaacataagaata

SEQ ID NO: 300208 - DNA, 1413 bp, Homo sapiens
gcattcgtggatgggagagcttggcgaagctggcacaaaaggaacaagagctggaaatgaccataaaagaaactatcaataaggcccaggaggtggaggctgaacttttagaaagccatcaagaagagacaaatcagttacttaaaaaaattgctgagaaagatgatgatctaaaacgaacagccaaaagatatgaagaaatccttgatgctcgtgaagaagaaatgactgcaaaagtaagggacctgcagactcaacttgaggagctgcagaagaaataccagcaaaagctagagcaggaggagaaccctggcaatgataatgtaacaattatggagctacagacacagctagcacagaagacgactttaatcagtgattcgaaattgaaagagcaagagttcagagaacagattcacaatttagaagaccgtttgaagaaatatgaaaagaatgtatatgcaacaactgtggggacaccttacaaaggtggcaatttgtaccatacggatgtctcactctttggagaacctaccgaatttgagtatttgcgaaaagtgctttttgagtatatgatgggtcgtgagactaagaccatggcaaaagttataaccaccgtactgaagttccctgatgatcagactcagaaaattttggaaagagaagatgctcggctgatgtttacttcacctcgcagtggtatcttctgagtaaaccatcagtctgtgcttagttaacatgtgtcatggctccgatcttcatcttgaagaagagtgacattgggtgactgctgcttggaaaactgtccacacttgctactctttgagaatgaagttgtcattcagggcccctcatgtagccaaaagaccaagaaaaatctggcccacagataagttgcagactgcctttaaaatagattttatcagtggagaaatggtgatagttttttcttcagttttctcttgggaagagttttatgttgtttaaaagatattttgataacttaacctgctttatgggcttacataatattcctttcatccattctttttaaagaacggcttacctttcctatttatttttagggtgattttttaaaaagacttgtgcaatacattttgaggtgaaacttagtggattttttctgataaattagagcatttaattgactattttattcaggttgatctgttgaatatttgctaaagaccagttctttaagctaagacatgtaaaaaatcccaaatggcagtacctcattgtttacttagcttttgtacttatatttttcagaggaaaaaacactactgtaaattgtgaatagccaatacataactgtattgtatgcaaatctgtgattgttggcagtgtcatctctgagaaacagataaataaagtttatttactatataa

SEQ ID NO: 300209 - DNA, 7266 bp, Homo sapiens
ccctggcgcctggtatcagggacttcccgacgctggaagagttcagggaagggaagcgggcccctctggcaccgaagacacagaatcctagctacagctactaaagaaaagaacactatcaattagggcccgcgtcaggttctctggatctccccttctcccatccttgacgctcatccctgtgttctttgcggtgggcccgtcggccctgctgccatcgatagaagcagcactctccccgtctgatttcgcagggccaaagcccaggtgagagtcagggtagtgttcagactagcccacgctccggttctgagccgcgacggcggtctccgcacgcaacgaaatcaggcaggaccgaaccttgcgtcctccagtgcagcgagttcggaagcgaccggccgagcgcgcatgtgcgggacccgacattgtgcttgtcccatccggtgctccgtagttagcctctgtgagctccacgtaggccgcgcaagcgcccttggcgcacagttcacctgctgccgttgtcgtcgccgccgcggctcccggggctggatggggggccgaggccagccagtggcacccggaagaaagagacgcggcggcggcgacgccgacaccctcaggacgagtgtccggacttgcccacagcctcaaggaggagacggcgaggcccggcccccgctgtccctggtgtaaagaagtcgccgtagccgtcgcggccgggactccccgggctctcgcccttcaggtttcgttgacactcaggaccgtacgtacgctgcgccatgttcaagaaactgaagcaaaagatcagcgaggagcagcagcagctccagcaggcgctggctcctgctcaggcgtcctccaattcttcaacaccaacaagaatgaggagcaggacatcttcatttacagagcaacttgatgaaggtacacccaatagagagaatgcatctactcatgcctcgaaatctcctgacagtgttaatggaagtgaaccaagcattcctcagtcaggtgacacacagtcttttgcacagaagctccagctccgggtgccctccgtggagtctttgtttcgaagtccgataaaggaatctctattccggtcttcttctaaagagtctttggtacgaacatcttccagagaatccctgaatcgacttgacctggacagttctactgccagttttgatccaccctctgatatggatagcgaggctgaagacttggtagggaattcagacagtctcaacaaagaacagttgattcagcggttgcgaagaatggaacgaagcttaagtagctacaggggaaaatattctgagcttgttacagcttatcagatgcttcagagagagaagaaaaagctacaaggtatattaagtcagagtcaggataaatcacttcggagaatagcagaattaagagaggagctccaaatggaccagcaggcaaagaaacatctgcaagaggagtttgatgcatctttagaggagaaagatcagtatatcagtgttctccaaactcaggtttctctactgaaacaacgattacgaaatggcccgatgaatgttgatgtactgaaaccacttcctcagctggaaccacaggctgaagtcttcactaaagaagagaatccagaaagtgatggagagccagtagtggaagatggaacttctgtaaaaacactggaaacactccagcaaagagtgaagcgtcaagagaacctacttaagcgttgtaaggaaacaattcagtcacataaggaacaatgtacactattaactagtgaaaaagaagctctgcaagaacaactggatgaaagacttcaagaactagaaaagataaaggaccttcatatggccgagaagactaaacttatcactcagttgcgtgatgcaaagaacttaattgaacagcttgaacaagataagggaatggtaatcgcagagacaaaacgtcagatgcatgaaaccctggaaatgaaagaagaagaaattgctcaactccgtagtcgcatcaaacagatgactacccagggagaggaattacgggaacagaaagaaaagtccgaaagagctgcttttgaggaacttgaaaaagctttgagtacagcccaaaaaacagaggaagcacggagaaaactgaaggcagaaatggatgaacaaataaaaactatcgaaaaaacaagtgaggaggaacgcatcagtcttcaacaggaattaagtcgggtgaaacaggaggttgttgatgtaatgaaaaaatcctcagaagaacaaattgctaagctacagaagcttcatgaaaaggagctggccagaaaagagcaggaactgaccaagaagcttcagacccgagaaagggaatttcaggaacaaatgaaagtagctcttgaaaagagtcaatcagaatatttgaagatcagccaagaaaaagaacagcaagaatctttggccctagaagagttagagttgcagaaaaaagcaatcctcacagaaagtgaaaataaacttcgggaccttcagcaagaagcagagacttacagaactagaattcttgaattggaaagttctttggaaaaaagcttacaagaaaacaaaaatcagtcaaaagatttggctgttcatctggaagctgaaaaaaataagcacaataaggagattacagtcatggttgaaaaacacaagacagaattggaaagccttaagcatcagcaggatgccctttggactgaaaaactccaagtcttaaagcaacaatatcagactgaaatggaaaaacttagggaaaagtgtgaacaagaaaaagaaacattgttgaaagacaaagagattatcttccaggcccacatagaagaaatgaatgaaaagactttagaaaagcttgatgtgaagcaaacagaactagaatcattatcttctgaactgtcagaagtattaaaagcccgtcacaaactagaagaggaactttctgttctgaaagatcaaacagataaaatgaagcaggaattagaggccaagatggatgaacagaaaaatcatcaccagcagcaagttgacagtatcattaaagaacacgaggtatctatccagaggactgagaaggcattaaaagatcaaattaatcaacttgagcttctcttgaaggaaagggacaagcatttgaaagagcatcaggctcatgtagaaaatttagaggcagatattaaaaggtctgaaggggaactccagcaggcatctgctaagctggacgtttttcagtcttaccagagtgccacacatgagcagacaaaagcatatgaggaacagttggcccaattgcagcagaagttgttggatttggaaacagaaagaattcttcttaccaaacaggttgctgaagttgaagcacaaaagaaagatgtttgtactgagttagatgctcacaaaatccaggtgcaggacttaatgcagcaacttgaaaaacaaaatagtgaaatggagcaaaaagtaaaatctttaacccaagtctatgagtccaaacttgaagatggtaacaaagaacaggaacagacaaagcaaatcttggtggaaaaggaaaatatgattttacaaatgagagaaggacagaagaaagaaattgagatactcacacagaaattgtcagccaaggaggacagtattcatattttgaatgaggaatatgaaaccaaatttaaaaaccaagaaaaaaagatggaaaaagttaagcagaaagcaaaggagatgcaagaaacgttaaagaaaaaattactggatcaggaagccaaacttaagaaagagcttgaaaatactgctctagagcttagtcagaaagaaaaacagtttaatgccaaaatgctggaaatggcacaggctaactcagctggaatcagtgatgcagtgtcaagactggaaacaaaccaaaaagaacaaatagaaagtcttactgaggttcatcgacgagaactcaatgatgtcatatcaatctgggaaaagaaacttaatcagcaagctgaagaacttcaggaaatacatgaaatccaattacaggaaaaagaacaagaggtagcagaactgaaacaaaagatcctcctatttgggtgtgaaaaagaagagatgaacaaggaaataacatggctgaaggaagaaggtgttaagcaggatacaacattaaatgaattacaggaacagttaaagcagaagtctgcccatgtgaattctcttgcacaagatgaaactaaactgaaagctcatcttgaaaagctagaggttgacttgaataagtctctgaaggaaaatacttttcttcaagagcagctagttgaactgaagatgctggcagaagaagataagcggaaggtttctgagttgactagcaagttgaaaaccacagatgaagaattccagagtttgaaatcttcacatgaaaaaagtaacaaaagcctagaggacaagagcttggaatttaaaaaactgtctgaggaactagcgattcagctagatatttgctgtaagaaaaccgaagccttattagaagctaaaacaaatgagctaatcaacattagtagtagtaaaactaatgccattctttctaggatttctcattgtcagcaccgtacaactaaagttaaggaggcactgttaattaaaacttgcacagtttctgaattagaagcacaacttagacagttgacagaggagcaaaatacactaaatatttcttttcaacaggctactcatcagttagaagaaaaagaaaatcaaattaagagcatgaaggctgatattgaaagtcttgtaacagaaaaagaagccttacagaaggaaggaggcaatcagcaacaggctgcttctgaaaaggagtcttgtataacacagttgaagaaagagttatctgaaaacatcaatgctgtcacattgatgaaagaagagcttaaagaaaaaaaagttgagattagcagtcttagtaaacaactaactgatttgaatgttcagcttcaaaatagcatcagcctatccgaaaaagaagcagccatttcatcactaagaaagcagtatgatgaagaaaaatgtgaattgctggatcaggtgcaagatttatcttttaaagttgacactctgagtaaagagaaaatttctgctcttgagcaggtagatgactggtccaataaattctcagaatggaagaagaaagcacagtcaagatttacacagcatcaaaacactgttaaagaattgcagatccagcttgagttaaaatcaaaggaagcttatgaaaaggatgagcagataaatttattgaaggaagagcttgatcagcaaaataaaagatttgattgtttaaagggtgaaatggaagacgacaagagcaagatggagaaaaaggagtctaatttagaaacagagttaaagtctcaaacagcaagaattatggaattagaggaccatattacccagaaaactattgaaatagagtccttaaatgaagttcttaaaaattacaatcaacaaaaggatattgaacacaaagaattggttcagaaacttcaacattttcaagagttaggagaagaaaaggacaacagggttaaagaagctgaagaaaaaatcttaacacttgaaaaccaagtttattccatgaaagctgaacttgaaactaagaagaaagaattagaacatgtgaatttaagtgtgaaaagcaaagaggaggagttaaaggcattggaagataggcttgagtcagaaagtgctgcaaaattagcagagttgaagagaaaagctgaacaaaaaattgctgccattaagaagcagttgttatctcaaatggaagagaaagaagaacagtataaaaaaggtacagaaagccatttgagtgagctaaatacaaaattgcaggaaagagaaagggaagttcacatcttggaagaaaaacttaagtcagtggaaagttcacagtcagaaacattaattgtacccagatcagcaaaaaatgtggcagcatatactgaacaagaagaagcagattcccaaggctgtgtgcagaagacatatgaagaaaaaatcagtgttttacaaagaaacttaactgaaaaagaaaagctattgcagagggtagggcaggaaaaagaagagacagtttcttctcattttgaaatgcgatgccaataccaggagcgcttaataaagctagaacatgctgaggcaaagcaacatgaagatcaaagtatgataggtcatcttcaagaggagcttgaagaaaaaaacaagaaatattccttgatagtagcccagcatgtggaaaaagaaggaggtaaaaataacatacaggcaaagcaaaacttggaaaatgtgtttgacgacgtccagaaaaccctccaggagaaggaactaacctgtcagattttggagcaaaagataaaagagctggattcctgcttagtaagacagaaagaagtacatagagttgaaatggaagagttgacctcaaaatatgaaaaattacaggctttacaacagatggatggaagaaataaacccacagaacttttggaagaaaacactgaagaaaagtccaaatcacatttggtccaacccaaattgcttagtaacatggaagcccagcacaatgatctggagtttaaattagccggggcagaacgggagaaacagaaactgggcaaggagattgttagattgcagaaagaccttcgaatgttgagaaaggagcatcagcaagaattggaaatactaaagaaagaatatgatcaagaaagggaagagaaaatcaaacaggagcaggaagatcttgaactgaagcacaattccacattaaaacagctgatgagggagtttaatacacagctggcacaaaaggaacaagagctggaaatgaccataaaagaaactatcaataaggcccaggaggtggaggctgaacttttagaaagccatcaagaagagacaaatcagttacttaaaaaaattgctgagaaagatgatgatctaaaacgaacagccaaaagatatgaagaaatccttgatgctcgtgaagaagaaatgactgcaaaagtaagggacctgcagactcaacttgaggagctgcagaagaaataccagcaaaagctagagcaggaggagaaccctggcaatgataatgtaacaaattatggagcttacagacacagtacgcacagacagagcgactatcatctctgcttcgtatattgtaagacgcccagggttccgtgatccgaggtcacaacttttg

SEQ ID NO: 300210 - DNA, 7228 bp, Homo sapiens
  misc_feature (7059)..(7059): n is a, c, g, or t
  misc_feature (7062)..(7062): n is a, c, g, or t
  misc_feature (7074)..(7074): n is a, c, g, or t
  misc_feature (7084)..(7084): n is a, c, g, or t
  misc_feature (7099)..(7099): n is a, c, g, or t
  misc_feature (7109)..(7110): n is a, c, g, or t
  misc_feature (7118)..(7118): n is a, c, g, or t
  misc_feature (7129)..(7130): n is a, c, g, or t
  misc_feature (7135)..(7135): n is a, c, g, or t
  misc_feature (7137)..(7137): n is a, c, g, or t
  misc_feature (7155)..(7156): n is a, c, g, or t
  misc_feature (7162)..(7162): n is a, c, g, or t
  misc_feature (7170)..(7170): n is a, c, g, or t
  misc_feature (7173)..(7173): n is a, c, g, or t
ccctggcgcctggtatcagggacttcccgacgctggaagagttcagggaagggaagcgggcccctctggcaccgaagacacagaatcctagctacagctactaaagaaaagaacactatcaattagggcccgcgtcaggttctctggatctccccttctcccatccttgacgctcatccctgtgttctttgcggtgggcccgtcggccctgctgccatcgatagaagcagcactctccccgtctgatttcgcagggccaaagcccaggtgagagtcagggtagtgttcagactagcccacgctccggttctgagccgcgacggcggtctccgcacgcaacgaaatcaggcaggaccgaaccttgcgtcctccagtgcagcgagttcggaagcgaccggccgagcgcgcatgtgcgggacccgacattgtgcttgtcccatccggtgctccgtagttagcctctgtgagctccacgtaggccgcgcaagcgcccttggcgcacagttcacctgctgccgttgtcgtcgccgccgcggctcccggggctggatggggggccgaggccagccagtggcacccggaagaaagagacgcggcggcggcgacgccgacaccctcaggacgagtgtccggacttgcccacagcctcaaggaggagacggcgaggcccggcccccgctgtccctggtgtaaagaagtcgccgtagccgtcgcggccgggactccccgggctctcgcccttcaggtttcgttgacactcaggaccgtacgtacgctgcgccatgttcaagaaactgaagcaaaagatcagcgaggagcagcagcagctccagcaggcgctggctcctgctcaggcgtcctccaattcttcaacaccaacaagaatgaggagcaggacatcttcatttacagagcaacttgatgaaggtacacccaatagagagaatgcatctactcatgcctcgaaatctcctgacagtgttaatggaagtgaaccaagcattcctcagtcaggtgacacacagtcttttgcacagaagctccagctccgggtgccctccgtggagtctttgtttcgaagtccgataaaggaatctctattccggtcttcttctaaagagtctttggtacgaacatcttccagagaatccctgaatcgacttgacctggacagttctactgccagttttgatccaccctctgatatggatagcgaggctgaagacttggtagggaattcagacagtctcaacaaagaacagttgattcagcggttgcgaagaatggaacgaagcttaagtagctacaggggaaaatattctgagcttgttacagcttatcagatgcttcagagagagaagaaaaagctacaaggtatattaagtcagagtcaggataaatcacttcggagaatagcagaattaagagaggagctccaaatggaccagcaggcaaagaaacatctgcaagaggagtttgatgcatctttagaggagaaagatcagtatatcagtgttctccaaactcaggtttctctactgaaacaacgattacgaaatggcccgatgaatgttgatgtactgaaaccacttcctcagctggaaccacaggctgaagtcttcactaaagaagagaatccagaaagtgatggagagccagtagtggaagatggaacttctgtaaaaacactggaaacactccagcaaagagtgaagcgtcaagagaacctacttaagcgttgtaaggaaacaattcagtcacataaggaacaatgtacactattaactagtgaaaaagaagctctgcaagaacaactggatgaaagacttcaagaactagaaaagataaaggaccttcatatggccgagaagactaaacttatcactcagttgcgtgatgcaaagaacttaattgaacagcttgaacaagataagggaatggtaatcgcagagacaaaacgtcagatgcatgaaaccctggaaatgaaagaagaagaaattgctcaactccgtagtcgcatcaaacagatgactacccagggagaggaattacgggaacagaaagaaaagtccgaaagagctgcttttgaggaacttgaaaaagctttgagtacagcccaaaaaacagaggaagcacggagaaaactgaaggcagaaatggatgaacaaataaaaactatcgaaaaaacaagtgaggaggaacgcatcagtcttcaacaggaattaagtcgggtgaaacaggaggttgttgatgtaatgaaaaaatcctcagaagaacaaattgctaagctacagaagcttcatgaaaaggagctggccagaaaagagcaggaactgaccaagaagcttcagacccgagaaagggaatttcaggaacaaatgaaagtagctcttgaaaagagtcaatcagaatatttgaagatcagccaagaaaaagaacagcaagaatctttggccctagaagagttagagttgcagaaaaaagcaatcctcacagaaagtgaaaataaacttcgggaccttcagcaagaagcagagacttacagaactagaattcttgaattggaaagttctttggaaaaaagcttacaagaaaacaaaaatcagtcaaaagatttggctgttcatctggaagctgaaaaaaataagcacaataaggagattacagtcatggttgaaaaacacaagacagaattggaaagccttaagcatcagcaggatgccctttggactgaaaaactccaagtcttaaagcaacaatatcagactgaaatggaaaaacttagggaaaagtgtgaacaagaaaaagaaacattgttgaaagacaaagagattatcttccaggcccacatagaagaaatgaatgaaaagactttagaaaagcttgatgtgaagcaaacagaactagaatcattatcttctgaactgtcagaagtattaaaagcccgtcacaaactagaagaggaactttctgttctgaaagatcaaacagataaaatgaagcaggaattagaggccaagatggatgaacagaaaaatcatcaccagcagcaagttgacagtatcattaaagaacacgaggtatctatccagaggactgagaaggcattaaaagatcaaattaatcaacttgagcttctcttgaaggaaagggacaagcatttgaaagagcatcaggctcatgtagaaaatttagaggcagatattaaaaggtctgaaggggaactccagcaggcatctgctaagctggacgtttttcagtcttaccagagtgccacacatgagcagacaaaagcatatgaggaacagttggcccaattgcagcagaagttgttggatttggaaacagaaagaattcttcttaccaaacaggttgctgaagttgaagcacaaaagaaagatgtttgtactgagttagatgctcacaaaatccaggtgcaggacttaatgcagcaacttgaaaaacaaaatagtgaaatggagcaaaaagtaaaatctttaacccaagtctatgagtccaaacttgaagatggtaacaaagaacaggaacagacaaagcaaatcttggtggaaaaggaaaatatgattttacaaatgagagaaggacagaagaaagaaattgagatactcacacagaaattgtcagccaaggaggacagtattcatattttgaatgaggaatatgaaaccaaatttaaaaaccaagaaaaaaagatggaaaaagttaagcagaaagcaaaggagatgcaagaaacgttaaagaaaaaattactggatcaggaagccaaacttaagaaagagcttgaaaatactgctctagagcttagtcagaaagaaaaacagtttaatgccaaaatgctggaaatggcacaggctaactcagctggaatcagtgatgcagtgtcaagactggaaacaaaccaaaaagaacaaatagaaagtcttactgaggttcatcgacgagaactcaatgatgtcatatcaatctgggaaaagaaacttaatcagcaagctgaagaacttcaggaaatacatgaaatccaattacaggaaaaagaacaagaggtagcagaactgaaacaaaagatcctcctatttgggtgtgaaaaagaagagatgaacaaggaaataacatggctgaaggaagaaggtgttaagcaggatacaacattaaatgaattacaggaacagttaaagcagaagtctgcccatgtgaattctcttgcacaagatgaaactaaactgaaagctcatcttgaaaagctagaggttgacttgaataagtctctgaaggaaaatacttttcttcaagagcagctagttgaactgaagatgctggcagaagaagataagcggaaggtttctgagttgactagcaagttgaaaaccacagatgaagaattccagagtttgaaatcttcacatgaaaaaagtaacaaaagcctagaggacaagagcttggaatttaaaaaactgtctgaggaactagcgattcagctagatatttgctgtaagaaaaccgaagccttattagaagctaaaacaaatgagctaatcaacattagtagtagtaaaactaatgccattctttctaggatttctcattgtcagcaccgtacaactaaagttaaggaggcactgttaattaaaacttgcacagtttctgaattagaagcacaacttagacagttgacagaggagcaaaatacactaaatatttcttttcaacaggctactcatcagttagaagaaaaagaaaatcaaattaagagcatgaaggctgatattgaaagtcttgtaacagaaaaagaagccttacagaaggaaggaggcaatcagcaacaggctgcttctgaaaaggagtcttgtataacacagttgaagaaagagttatctgaaaacatcaatgctgtcacattgatgaaagaagagcttaaagaaaaaaaagttgagattagcagtcttagtaaacaactaactgatttgaatgttcagcttcaaaatagcatcagcctatccgaaaaagaagcagccatttcatcactaagaaagcagtatgatgaagaaaaatgtgaattgctggatcaggtgcaagatttatcttttaaagttgacactctgagtaaagagaaaatttctgctcttgagcaggtagatgactggtccaataaattctcagaatggaagaagaaagcacagtcaagatttacacagcatcaaaacactgttaaagaattgcagatccagcttgagttaaaatcaaaggaagcttatgaaaaggatgagcagataaatttattgaaggaagagcttgatcagcaaaataaaagatttgattgtttaaagggtgaaatggaagacgacaagagcaagatggagaaaaaggagtctaatttagaaacagagttaaagtctcaaacagcaagaattatggaattagaggaccatattacccagaaaactattgaaatagagtccttaaatgaagttcttaaaaattacaatcaacaaaaggatattgaacacaaagaattggttcagaaacttcaacattttcaagagttaggagaagaaaaggacaacagggttaaagaagctgaagaaaaaatcttaacacttgaaaaccaagtttattccatgaaagctgaacttgaaactaagaagaaagaattagaacatgtgaatttaagtgtgaaaagcaaagaggaggagttaaaggcattggaagataggcttgagtcagaaagtgctgcaaaattagcagagttgaagagaaaagctgaacaaaaaattgctgccattaagaagcagttgttatctcaaatggaagagaaagaagaacagtataaaaaaggtacagaaagccatttgagtgagctaaatacaaaattgcaggaaagagaaagggaagttcacatcttggaagaaaaacttaagtcagtggaaagttcacagtcagaaacattaattgtacccagatcagcaaaaaatgtggcagcatatactgaacaagaagaagcagattcccaaggctgtgtgcagaagacatatgaagaaaaaatcagtgttttacaaagaaacttaactgaaaaagaaaagctattgcagagggtagggcaggaaaaagaagagacagtttcttctcattttgaaatgcgatgccaataccaggagcgcttaataaagctagaacatgctgaggcaaagcaacatgaagatcaaagtatgataggtcatcttcaagaggagcttgaagaaaaaaacaagaaatattccttgatagtagcccagcatgtggaaaaagaaggaggtaaaaataacatacaggcaaagcaaaacttggaaaatgtgtttgacgacgtccagaaaaccctccaggagaaggaactaacctgtcagattttggagcaaaagataaaagagctggattcctgcttagtaagacagaaagaagtacatagagttgaaatggaagagttgacctcaaaatatgaaaaattacaggctttacaacagatggatggaagaaataaacccacagaacttttggaagaaaacactgaagaaaagtccaaatcacatttggtccaacccaaattgcttagtaacatggaagcccagcacaatgatctggagtttaaattagccggggcagaacgggagaaacagaaactgggcaaggagattgttagattgcagaaagaccttcgaatgttgagaaaggagcatcagcaagaattggaaatactaaagaaagaatatgatcaagaaagggaagagaaaatcaaacaggagcaggaagatcttgaactgaagcacaattccacattaaaacagctgatgagggagtttaatacacagctggcacaaaaggaacaagagctggaaatgaccataaaagaaactatcaataaggcccaggaaggtgggtctaaatgcaatcatgattgcatttagactaataaaaaaaaagagaaagacacaatcagaatgacaaaggggacattaccaatgataacccagaaatagaaaaaaaaaaaaaaaccccctcggaaaactnctntaattacctttntgcacacaancaaaaaacttaaaanaaataattcnntggcaacntacaacttgtnnaattntncccaggaagagattgatnncctaancaaaccantancagtttctgaatttgcttcattaataaaaagcacacaaaccaaaacaggcccagg

SEQ ID NO: 300211 - DNA, 1198 bp, Homo sapiens
gaagaagaaatgactgcaaaagtaagggacctgcagactcaacttgaggagctgcagaagaaataccagcaaaagctagagcaggaggagaaccctggcaatgataatgtaacaattatggagctacagacacagctagcacagaagacgactttaatcagtgattcgaaattgaaagagcaagagttcagagaacagattcacaatttagaagaccgtttgaagaaatatgaaaagaatgtatatgcaacaactgtggggacaccttacaaaggtggcaatttgtaccatacggatgtctcactctttggagaacctaccgaatttgagtatttgcgaaaagtgctttttgagtatatgatgggtcgtgagactaagaccatggcaaaagttataaccaccgtactgaagttccctgatgatcagactcagaaaattttggaaagagaagatgctcggctgatgtttacttcacctcgcagtggtatcttctgagtaaaccatcagtctgtgcttagttaacatgtgtcatggctccgatcttcatcttgaagaagagtgacattgggtgactgctgcttggaaaactgtccacacttgctactctttgagaatgaagttgtcattcagggcccctcatgtagccaaaagaccaagaaaaatctggcccacagataagttgcagactgcctttaaaatagattttatcagtggagaaatggtgatagttttttcttcagttttctcttgggaagagttttatgttgtttaaaagatattttgataacttaacctgctttatgggcttacataatattcctttcatccattctttttaaagaacggcttacctttcctatttatttttagggtgattttttaaaaagacttgtgcaatacattttgaggtgaaacttagtggattttttctgataaattagagcatttaattgactattttattcaggttgatctgttgaatatttgctaaagaccagttctttaagctaagacatgtaaaaaatcccaaatggcagtacctcattgtttacttagcttttgtacttatatttttcagaggaaaaaacactactgtaaattgtgaatagccaatacataactgtattgtatgcaaatctgtgattgttggcagtgtcatctctgagaaacagataaataaagtttatttactatataa

SEQ ID NO: 300212 - DNA, 1277 bp, Homo sapiens
ggccaggctggtctcaaactcctggcctcaagtgatctttccaccttggccttccaaagtgctaggattataggcatgagccactgggtccagcctgtcatctttaattccagtccaatatttgtgagattcagccaagtcagcgtgtttactcctgggttactgtataaactggtagcattcgatatatggtaaatggttgcagttccaaatttcacttagaaatgccattttccaggattgctgactataggttggtttgcatcattgcaagaatgttaatttttagaagatacctttaagatttagtgtttagacaatttctacttttttttttttttttcagaatggggtcttgctgtgttgaccaggctggtctcgaactcctggcctcaagtgattctcccatcttggcctctcaaagtgctgggattacagtcatgagctaccacacccagccttatttctgcctctttactgcagtctctagaccatggaatagaattttatttcaaacttgaaaaaacaaatatcccaaaaagtcaacctaaatgttttggatttttttgccccctttctttattctcttttcctttttcttttccagtcatggctccgatcttcatcttgaagaagagtgacattgggtgactgctgcttggaaaactgtccacacttgctactctttgagaatgaagttgtcattcagggcccctcatgtagccaaaagaccaagaaaaatctggcccacagataagttgcagactgcctttaaaatagattttatcagtggagaaatggtgatagttttttcttcagttttctcttgggaagagttttatgttgtttaaaagatattttgataacttaacctgctttatgggcttacataatattcctttcatccattctttttaaagaacggcttacctttcctatttatttttagggtgattttttaaaaagacttgtgcaatacattttgaggtgaaacttagtggattttttctgataaattagagcatttaattgactattttattcaggttgatctgttgaatatttgctaaagaccagttctttaagctaagacatgtaaaaaatcccaaatggcagtacctcattgtttacttagcttttgtacttatatttttcagaggaaaaaacactactgtaaattgtgaatagccaatacataactgtattgtatgcaaatctgtgattgttggcagtgtcatctctgagaaacagataaataaagtttatttactatataa

SEQ ID NO: 300213 - DNA, 1104 bp, Homo sapiens
agggcttggagtttaaagtgaggcatgaaggaaagtgtttagagcacaataatgaattaaaataaaaacagtagtgtgtgtctcaaaaacttaaatgtttatttccctacagaggtagttttctctataccatgttgcctctccagagtgcttttttgatgtgtttgtttactaatgcttctttttttttcttttcctttttttctttttttttaaatcctaaaggctcgtgaagaagaaatgactgcaaaagtaagggacctgcagactcaacttgaggagctgcagaagaaataccagcaaaagctagagcaggaggagaaccctggcaatgataatgtaacaattatggagctacagacacagctagcacagaagacgactttaatcagtgattcgaaattgaaagagcaagagttcagagaacagattcacaatttagaagaccattttttcatctggcccgatctgtgtattaatgtcctacctagtccccttactgagtcctttttccctaacatagtcatctgtctgtcagagttattttctgtctggaaacaaaggtgtgatttattacttctcctcctaaatatgtgcagtggtttcccatggtcacagtgatacctcgtctagtttttttcttcagttttctcttgggaagagttttatgttgtttaaaagatattttgataacttaacctgctttatgggcttacataatattcctttcatccattctttttaaagaacggcttacctttcctatttatttttagggtgattttttaaaaagacttgtgcaatacattttgaggtgaaacttagtggattttttctgataaattagagcatttaattgactattttattcaggttgatctgttgaatatttgctaaagaccagttctttaagctaagacatgtaaaaaatcccaaatggcagtacctcattgtttacttagcttttgtacttatatttttcagaggaaaaaacactactgtaaattgtgaatagccaatacataactgtattgtatgcaaatctgtgattgttggcagtgtcatctctgagaaacagataaataaagtttatttactatataa

SEQ ID NO: 300214 - DNA, 487 bp, Homo sapiens
cgtaattcagctggtaaatatgtacttaaaatatgcagtacacctttcattacgttgtttaagtcttcaaatgaaagttgcaagtaaaatctcagctacataatattatatttacctaggatatggggggaggtattacagattccttattccttgcctgtacacccttgatttggggagatttgagaaaaatttaagtacagtctgtaatcctatgaacttcatatacacatacaatctatgtgttatattaagtcttaaaactaacccaataagctttttttcttcctggctttgtagtttacttcacctcgcagtggtatcttctgagtaaaccatcagtctgtgcttagttaacatgtggtgagtgaagaacaatgtcttgtgtcttttgtgcaaaaatcaaatgtgttgcctgatactaaccattttgctggaattcttttgctcttgtttaataaatatatgattatgctatgggttaata

SEQ ID NO: 300215 - DNA, 312 bp, Homo sapiens
gctcgtgaagaagaaatgactgcaaaagtaagggacctgcagactcaacttgaggagctgcagaagaaataccagcaaaagctagagcaggaggagaaccctggcaatgataatgtaacaaggagtttgagtttgctgcacatgtttcttgaaaacattgtcatttctgtgatttgactagcctactaacatacatacatatttatctcatttaatcctaatgaaaaccctttgagatttttacctccgttttatagacagataaactaaatgttcaaagagattaaataaaatgttcaagctcacacaata

SEQ ID NO: 300216 - DNA, 511 bp, Homo sapiens
taacatggaagcccagcacaatgatctggagtttaaattagccggggcagaacgggagaaacagaaactgggcaaggagattgttagattgcagaaagaccttcgaatgttgagaaaggagcatcagcaagaattggaaatactaaagaaagaatatgatcaagaaagggaagagaaaatcaagtaagttttatttcagcttgaatatttttatggcagtccttcttaattaagtctcctttttttgtgcctaatacagttattttaaattatttggataagtttcaccaacccaaaatattaaacataaatccaatatgttaaatatgaggagaaataaaaacaatttagggcaagtggcagtgttattccatgtccatttaggagagaaaaaccttttcttgcatataagattctggttattagggacatatccaagtaattattttctttttgttttgttgttttttagtattagcattattattatataacatagatgtgttttgaa

SEQ ID NO: 300217 - DNA, 721 bp, Homo sapiens
ggccctatgtcttctgtgggccacctaggattcacaggaaggagcagctctgattcttacatggctggctccgtggccctatgtcttctgtggagttacagtataaagcagggagctaattaagagtattaaaacttaaaaccattttttgactctgaaaaaaaaaaaaaaaaaaaaaaaaaaaaaaaaaaaaaacccggggttttttttgggggggggaaaaaagggtaaaggggcatcagggtcctatagttggtttccctggacccagtctttcttgtacaaggtgggaaaatcgggccggtccccctaatagggagtccgttataatattccaaaaaagccgggttaaccctggttttaattggattgcgcgaagagcaacactacaaccccaacgacaacaccaacagacagcatcaacaatctatctacaccaaaaaccgggggcggcggcgcaccgcacctaaaacatgagaccaacaaactaaacgaactaaaccgccgcggcgccgaacgacaagacaacaacaaagaagaacatcaaaccccgaaatcaagagagagacacgagacagataaaggagaagagaaggagacacacgagaagatagtagcagcgagctagacgaggaagaaagagacaaaccgagggacacaagagaatacgaacaagcaggacgcaacagccgagcacagaaagacagcaacaacagagagg

SEQ ID NO: 300218 - DNA, 226 bp, Homo sapiens
catttatttacatattgaccccaatgtcagaagttactcagaagtgtgtgcaactctgtatagaccccttcctgggactggacacagaggctgaaataaaaaccagtttttcagcatgacttagcacaatgttatttattttcactgcctattagcctatgggtcatgagatttgttattctagagcagttgagtattggagtggaacaagcaaaagcaaggcata

SEQ ID NO: 300219 - DNA, 5166 bp, Homo sapiens
cgcccagagcgaggctggggtagggaggccgactgagcaggagtcgtccgcttatagtggaggctgctaggagccggtcagagggtgagtggggagcaggcgagcgagccacagcaggcaggagggagcgtcgcgcggcgcagaggagcgccggggcagggccgcggcggaaccacagccggagaggggcagcccgagccgggcgccgcagggtccccacccccacccggccggacagtgcccggtgttcccccgtgcggggggcggcggcggcggctgacgggaccgccgggaccgcgggggtgttgccacctccaccgaggagccggcgcggccgcgggctcctcagagccggggccccgggcccgtgacagacgggccgaggaagggagagaggcggcggcgacaccatgtcatctcccagtccgggcaagaggcggatggacacggacgtggtcaagctcatcgagagtaaacatgaggttacgatcctgggaggacttaatgaatttgtagtgaagttttatggaccacaaggaacaccatatgaaggcggagtatggaaagttagagtggacctacctgataaataccctttcaaatctccatctataggattcatgaataaaattttccatcccaacattgatgaagcgtcaggaactgtgtgtctagatgtaattaatcaaacttggacagctctctatgatcttaccaatatatttgagtccttcctgcctcagttattggcctatcctaaccccatagatcctctcaatggtgacgctgcagccatgtacctccaccgaccagaagaatacaagcagaaaattaaagagtacatccagaaatacgccacggaggaggcgctgaaagaacaggaagagggtaccggggacagctcatcggagagctctatgtctgacttttccgaagatgaggcccaggatatggagttgtagtagaaaaagcacctgcttttcagaaagactattatttcctaaccatgagaagcagactataatattcatatttaaacaaagcaattttttttattactaaacaaggtttttatgaataatagcattgatatatatatattatatatcaccctttagatcttgatttcttggtcatttctcaacctgaggtgcatagcatattcccacattccatttggtagcaatatgcggtctgaatgcatgcattcatgagtccatgtggccaagtcagcctgtgtgctactgaactgtcgaaggaaatagccgctctgataggtagatgtgagtaaaaagaacaggaaaaaattgcttcttttattggtttccaaagaaacaaaccaaaccaaccagctcttggatgtgaagataaaatagtgcttttttgaaatggagaggaaaaacttggggaggaagaggcctgctgtgggggcatcggagccagccatgtaagaatcagagctgctccttcctgtgaatcctaggtggccctatgtcttctgtggagttacagtataaagcagggagctaattaagagtattaaaacttaaaaccattttttgactctgattttaagtacatttttatatgtcagttgctgcccttcacactaccaggccctgcagccacagtgttctgttggagaaacttggggaagtgttttctgaaccagttctttttcttggggtagagcgtgaaatccagacctgtttttgaaaggacagcacaggaggagaaaagtgactgggacgatgcttcctctcatccaaaacacatgcagagtcacatcctcatcctagtgtttggcagtttgagaccgctaccctgaacttaagagctttaaatatgagggttgtgtttctgggggggttatttttttggtgtgtgtgtgtgtgtattgtgcttagaaaggttgcagatttcatcttcacctaccaagaggcggccgcctccttggacaagccgctcatggaccattagacttgagaagacgacccacgtggtgactgcaaagccctgggtacttgccttcatgttctggtttggttttccctttttctgctgctcttggcagcagcctggtcatcatctgcttgtgggagtgggaaatgggtattttagacccaacacaggttctaaatttaaaacaaataataattggaacaaataaaggttcttgtacccagagtgattctacatgggaaaaacaaaccagcttttttcagagagtgaccgaataggaagaagggattcagaaatatgatgtagtagaacatgccctgcaggaagaaaatgttttctctcctgcgtatgttaagaggaaatcagtttaaaatgcctgctaatcaaatgtcgactcagctaaccatatgtccaggttgctgcagagtttctttcaaatctgagtgttgcctgctgaactcggaggggagtttggagaaattttagacagcagctctgtgttctttttttgccgcagccaataagataatagcagaattagccaatcctaaaaccttctaaagacgatttttgagcatcccactgggattatttaatttttctttttgacgtgtgtttttagtttagaagtgctgtattccacaaggtttaagtcagtgaggttggaagataccctatcttttttattcaaaaagcacaatcaatcttttgtttgaaaatctatataaagtacaacttgcttttagcatgattattttcctaaataaaaagacaaagaatttacttactttatgttaattacgggcatgaagcaaaaggttttctttaaaaaaaaaaaaaagtgcagtgatgtagggctgtggttagttaaccgtactgagttatccatctagcatctgtggcttgctggaagggtagtattaactatttaacatgtaatggtgtacttcactcttacctagcacgctgtcttctcattgctttgggggagggagggtctctctgctggcactgtctaacttgcttacctgctgactttgcagtttgcttgtgctatgacatttattgtaggtgctatttagggtaggcttaaagtgctgggtggtgatttgagttcaaacaataaaaaattgtattttttcaatattgtataaacaatagtgttctaattaccttaaaaaaaaataatgaccagttaagaattgcttttgatcttgtcaaaaaactgaatagaccccagtttcgggaaggtgtgtgagcagtgccatgactctgccccttacctaatcccacatctctctaatgataagacattggctcgcctctgaccagagccccagcaccagagagcggaagatgcagaattgtcaaatgacctgctgggggaggttgtaggagtttagcagatttgagtgtggctgcagagagagagagagtgtgtgtatgtgtgcacatgtgtgagagtgtgagcgagagtgtgtgtgtgtccatctaagtctgtgtgatgaaggtgggataaggctcctctgttagtgctggaagctcctgtaattgccgcatggatcccactgtgccctcttgttctgtgcaagtctgtcctgtctgggcactaaccttggtcccatgcatgtttatgttctgggtggggctttgcctctccactgggaaactgacttttgctgggttgaacagagtcccttatgctttttgtcctctccctgcgcctgggagaggtgggagtaggagcccaaacacacaggtacagaaagatctggaagaaggcctggcagtgaatccaaggactctgggcccccaacaatagatggtagcgtaagtctgggagcagcggtgtttcaccaccaaatgcctttccaggcttgcccttccaacactcaggagagcatccagatccctgggcagaggctctacattcttggctttagaggtggtggcagcggcagcaggtcagagccacttctggcggtttccctcccctttttagtgcccatagtttttggatcctcccttgagttttaccagcacaagccattctttgcccctgttcacataactgagctcaagctcttgccaaacaccaacaagcaagatggttgcaacctggcaacattgaatccaccacccttgggctccctctggaagccccagcaccggggggcttttgggcacagggtcagtggtagccatcttagacactgacatttggctttgtcgtcaatttcatcaccctccttgaggttactgtgcagtttcaaccagcattttatcctagtgaggtcattatcaggagttgccatatcatctctccagtacctaacatttctcatccacttcaaaagctgttctgactgccagctggctgatctaagctcctgaggaatgtctcctctcaaaggaatttttccctccaaaggccccctgaagtcctagttggcattggcctggcacatgctttatgttaggcctcccgttgggatggctgagaatcatgaaagacagatcctccgctagcctctgtgggtcaagtttctggacaccaagtctctgggaactagtgtttgattttaaatggcatgtggcccttccttgtttcagtgacttagaaaagtaaaagccatttaaaaaagttagcaagattttttatcgacttcccaactgggcttccagccttgttgaatgaaatcatctatctctgattgggcgcaacgaactgcatttctttggacttctgaatccatgtttgtgctttctctggcccgtgaacacctcggcgattctgttagggatgggatgagtgggaggaagccctttgagaagggggagccggccctgtcatgcgcaggttttccactcatctgaggaagagccagggctctgaatttagcctaacactcatcttggctgtgggcttgggaagaaatggccattatttacagattgtatttggtacatattgtgtgatacttgaaaagataaaagggactgccagcccctaactgaaatctgaagctttttatcgcttatttttcctcgccctgtctcctcccttccacctttctccttgcattgtgatgatctagtaggcacgtctgtcaacaggacacatgcctcctctgactataacctcttaatagttgtgtataatgaaaactgtaaacttttttaaataaacgtgtatataccttg

SEQ ID NO: 300220 - DNA, 5624 bp, Homo sapiens
cgcccagagcgaggctggggtagggaggccgactgagcaggagtcgtccgcttatagtggaggctgctaggagccggtcagagggtgagtggggagcaggcgagcgagccacagcaggcaggagggagcgtcgcgcggcgcagaggagcgccggggcagggccgcggcggaaccacagccggagaggggcagcccgagccgggcgccgcagggtccccacccccacccggccggacagtgcccggtgttcccccgtgcggggggcggcggcggcggctgacgggaccgccgggaccgcgggggtgttgccacctccaccgaggagccggcgcggccgcgggctcctcagagccggggccccgggcccgtgacagacgggccgaggaagggagagaggcggcggcgacaccatgtcatctcccagtccgggcaagaggcggatggacacggacgtggtcaagctcatcgagagtaaacatgaggttacgatcctgggaggacttaatgaatttgtagtgaagttttatggaccacaaggaacaccatatgaaggcggagtatggaaagttagagtggacctacctgataaataccctttcaaatctccatctataggattcatgaataaaattttccatcccaacattgatgaagcgtcaggaactgtgtgtctagatgtaattaatcaaacttggacagctctctatgatcttaccaatatatttgagtccttcctgcctcagttattggcctatcctaaccccatagatcctctcaatggtgacgctgcagccatgtacctccaccgaccagaagaatacaagcagaaaattaaagagtacatccagaaatacgccacggaggaggcgctgaaagaacaggaagagggtaccggggacagctcatcggagagctctatgtctgacttttccgaagatgaggcccaggatatggagttgtagtagaaaaagcacctgcttttcagaaagactattatttcctaaccatgagaagcagactataatattcatatttaaacaaagcaattttttttattactaaacaaggtttttatgaataatagcattgatatatatatattatatatcaccctttagatcttgatttcttggtcatttctcaacctgaggtgcatagcatattcccacattccatttggtagcaatatgcggtctgaatgcatgcattcatgagtccatgtggccaagtcagcctgtgtgctactgaactgtcgaaggaaatagccgctctgataggtagatgtgagtaaaaagaacaggaaaaaattgcttcttttattggtttccaaagaaacaaaccaaaccaaccagctcttggatgtgaagataaaatagtgcttttttgaaatggagaggaaaaacttggggaggaagaggcctgctgtgggggcatcggagccagccatgtaagaatcagagctgctccttcctgtgaatcctaggtggccctatgtcttctgtggagttacagtataaagcagggagctaattaagagtattaaaacttaaaaccattttttgactctgattttaagtacatttttatatgtcagttgctgcccttcacactaccaggccctgcagccacagtgttctgttggagaaacttggggaagtgttttctgaaccagttctttttcttggggtagagcgtgaaatccagacctgtttttgaaaggacagcacaggaggagaaaagtgactgggacgatgcttcctctcatccaaaacacatgcagagtcacatcctcatcctagtgtttggcagtttgagaccgctaccctgaacttaagagctttaaatatgagggttgtgtttctgggggggttatttttttggtgtgtgtgtgtgtgtattgtgcttagaaaggttgcagatttcatcttcacctaccaagaggcggccgcctccttggacaagccgctcatggaccattagacttgagaagacgacccacgtggtgactgcaaagccctgggtacttgccttcatgttctggtttggttttccctttttctgctgctcttggcagcagcctggtcatcatctgcttgtgggagtgggaaatgggtattttagacccaacacaggttctaaatttaaaacaaataataattggaacaaataaaggttcttgtacccagagtgattctacatgggaaaaacaaaccagcttttttcagagagtgaccgaataggaagaagggattcagaaatatgatgtagtagaacatgccctgcaggaagaaaatgttttctctcctgcgtatgttaagaggaaatcagtttaaaatgcctgctaatcaaatgtcgactcagctaaccatatgtccaggttgctgcagagtttctttcaaatctgagtgttgcctgctgaactcggaggggagtttggagaaattttagacagcagctctgtgttctttttttgccgcagccaataagataatagcagaattagccaatcctaaaaccttctaaagacgatttttgagcatcccactgggattatttaatttttctttttgacgtgtgtttttagtttagaagtgctgtattccacaaggtttaagtcagtgaggttggaagataccctatcttttttattcaaaaagcacaatcaatcttttgtttgaaaatctatataaagtacaacttgcttttagcatgattattttcctaaataaaaagacaaagaatttacttactttatgttaattacgggcatgaagcaaaaggttttctttaaaaaaaaaaaaaagtgcagtgatgtagggctgtggttagttaaccgtactgagttatccatctagcatctgtggcttgctggaagggtagtattaactatttaacatgtaatggtgtacttcactcttacctagcacgctgtcttctcattgctttgggggagggagggtctctctgctggcactgtctaacttgcttacctgctgactttgcagtttgcttgtgctatgacatttattgtaggtgctatttagggtaggcttaaagtgctgggtggtgatttgagttcaaacaataaaaaattgtattttttcaatattgtataaacaatagtgttctaattaccttaaaaaaaaataatgaccagttaagaattgcttttgatcttgtcaaaaaactgaatagaccccagtttcgggaaggtgtgtgagcagtgccatgactctgccccttacctaatcccacatctctctaatgataagacattggctcgcctctgaccagagccccagcaccagagagcggaagatgcagaattgtcaaatgacctgctgggggaggttgtaggagtttagcagatttgagtgtggctgcagagagagagagagtgtgtgtatgtgtgcacatgtgtgagagtgtgagcgagagtgtgtgtgtgtccatctaagtctgtgtgatgaaggtgggataaggctcctctgttagtgctggaagctcctgtaattgccgcatggatcccactgtgccctcttgttctgtgcaagtctgtcctgtctgggcactaaccttggtcccatgcatgtttatgttctgggtggggctttgcctctccactgggaaactgacttttgctgggttgaacagagtcccttatgctttttgtcctctccctgcgcctgggagaggtgggagtaggagcccaaacacacaggtacagaaagatctggaagaaggcctggcagtgaatccaaggactctgggcccccaacaatagatggtagcgtaagtctgggagcagcggtgtttcaccaccaaatgcctttccaggcttgcccttccaacactcaggagagcatccagatccctgggcagaggctctacattcttggctttagaggtggtggcagcggcagcaggtcagagccacttctggcggtttccctcccctttttagtgcccatagtttttggatcctcccttgagttttaccagcacaagccattctttgcccctgttcacataactgagctcaagctcttgccaaacaccaacaagcaagatggttgcaacctggcaacattgaatccaccacccttgggctccctctggaagccccagcaccggggggcttttgggcacagggtcagtggtagccatcttagacactgacatttggctttgtcgtcaatttcatcaccctccttgaggttactgtgcagtttcaaccagcattttatcctagtgaggtcattatcaggagttgccatatcatctctccagtacctaacatttctcatccacttcaaaagctgttctgactgccagctggctgatctaagctcctgaggaatgtctcctctcaaaggaatttttccctccaaaggccccctgaagtcctagttggcattggcctggcacatgctttatgttaggcctcccgttgggatggctgagaatcatgaaagacagatcctccgctagcctctgtgggtcaagtttctggacaccaagtctctgggaactagtgtttgattttaaatggcatgtggcccttccttgtttcagtgacttagaaaagtaaaagccatttaaaaaagttagcaagattttttatcgacttcccaactgggcttccagccttgttgaatgaaatcatctatctctgattgggcgcaacgaactgcatttctttggacttctgaatccatgtttgtgctttctctggcccgtgaacacctcggcgattctgttagggatgggatgagtgggaggaagccctttgagaagggggagccggccctgtcatgcgcaggttttccactcatctgaggaagagccagggctctgaatttagcctaacactcatcttggctgtgggcttgggaagaaatggccattatttacagattgtatttggtacatattgtgtgatacttgaaaagataaaagggactgccagcccctaactgaaatctgaagctttttatcgcttatttttcctcgccctgtctcctcccttccacctttctccttgcattgtgatgatctagtaggcacgtctgtcaacaggacacatgcctcctctgactataacctcttaatagttgtgtataatgaaaactgtaaacttttttaaataaacgtgtatataccttgaaaaaaaaaaaaaaaaaaaaaaaaaaaaaaaaaaaaacacacacaaaaaaaaaaaaccaaacaaagcaaaaaagaaaaaagaaaagaacaaaacaacaacagaaaaaagaagacggagggaacaggaggagcagagcgagcgcgagcgagacaaaaagaagaaagagaaagggacaaaaaagaagaggaagaagagagagggacagagacgaggaagcgacgaggaagagagaggaagcgggagggaatcgagaacggggagagaggagaagggaggaaaaagagaagagagcggaggagagaggagagatggaaagaggagggaggaggggaggagggacacggagagagagcgggagagaagaagaggagaagagaaggaggtgggagtgggagggggaaggggggaggagagagggagagaggggagaggaggagagggcaggaaggaaggagtg

SEQ ID NO: 300221 - DNA, 5212 bp, Homo sapiens
cgcccagagcgaggctggggtagggaggccgactgagcaggagtcgtccgcttatagtggaggctgctaggagccggtcagagggtgagtggggagcaggcgagcgagccacagcaggcaggagggagcgtcgcgcggcgcagaggagcgccggggcagggccgcggcggaaccacagccggagaggggcagcccgagccgggcgccgcagggtccccacccccacccggccggacagtgcccggtgttcccccgtgcggggggcggcggcggcggctgacgggaccgccgggaccgcgggggtgttgccacctccaccgaggagccggcgcggccgcgggctcctcagagccggggccccgggcccgtgacagacgggccgaggaagggagagaggcggcggcgacaccatgtcatctcccagtccgggcaagaggcggatggacacggacgtggtcaagctcatcgagagtaaacatgaggttacgatcctgggaggacttaatgaatttgtagtgaagttttatggaccacaaggaacaccatatgaaggcggagtatggaaagttagagtggacctacctgataaataccctttcaaatctccatctataggattcatgaataaaattttccatcccaacattgatgaagcgtcaggaactgtgtgtctagatgtaattaatcaaacttggacagctctctatgatcttaccaatatatttgagtccttcctgcctcagttattggcctatcctaaccccatagatcctctcaatggtgacgctgcagccatgtacctccaccgaccagaagaatacaagcagaaaattaaagagtacatccagaaatacgccacggaggaggcgctgaaagaacaggaagagggtaccggggacagctcatcggagagctctatgtctgacttttccgaagatgaggcccaggatatggagttgtagtagaaaaagcacctgcttttcagaaagactattatttcctaaccatgagaagcagactataatattcatatttaaacaaagcaattttttttattactaaacaaggtttttatgaataatagcattgatatatatatattatatatcaccctttagatcttgatttcttggtcatttctcaacctgaggtgcatagcatattcccacattccatttggtagcaatatgcggtctgaatgcatgcattcatgagtccatgtggccaagtcagcctgtgtgctactgaactgtcgaaggaaatagccgctctgataggtagatgtgagtaaaaagaacaggaaaaaattgcttcttttattggtttccaaagaaacaaaccaaaccaaccagctcttggatgtgaagataaaatagtgcttttttgaaatggagaggaaaaacttggggaggaagaggcctgctgtgggggcatcggagccagccatgtaagaatcagagctgctccttcctgtgaatcctaggtggccctatgtcttctgtggagttacagtataaagcagggagctaattaagagtattaaaacttaaaaccattttttgactctgattttaagtacatttttatatgtcagttgctgcccttcacactaccaggccctgcagccacagtgttctgttggagaaacttggggaagtgttttctgaaccagttctttttcttggggtagagcgtgaaatccagacctgtttttgaaaggacagcacaggaggagaaaagtgactgggacgatgcttcctctcatccaaaacacatgcagagtcacatcctcatcctagtgtttggcagtttgagaccgctaccctgaacttaagagctttaaatatgagggttgtgtttctgggggggttatttttttggtgtgtgtgtgtgtgtattgtgcttagaaaggttgcagatttcatcttcacctaccaagaggcggccgcctccttggacaagccgctcatggaccattagacttgagaagacgacccacgtggtgactgcaaagccctgggtacttgccttcatgttctggtttggttttccctttttctgctgctcttggcagcagcctggtcatcatctgcttgtgggagtgggaaatgggtattttagacccaacacaggttctaaatttaaaacaaataataattggaacaaataaaggttcttgtacccagagtgattctacatgggaaaaacaaaccagcttttttcagagagtgaccgaataggaagaagggattcagaaatatgatgtagtagaacatgccctgcaggaagaaaatgttttctctcctgcgtatgttaagaggaaatcagtttaaaatgcctgctaatcaaatgtcgactcagctaaccatatgtccaggttgctgcagagtttctttcaaatctgagtgttgcctgctgaactcggaggggagtttggagaaattttagacagcagctctgtgttctttttttgccgcagccaataagataatagcagaattagccaatcctaaaaccttctaaagacgatttttgagcatcccactgggattatttaatttttctttttgacgtgtgtttttagtttagaagtgctgtattccacaaggtttaagtcagtgaggttggaagataccctatcttttttattcaaaaagcacaatcaatcttttgtttgaaaatctatataaagtacaacttgcttttagcatgattattttcctaaataaaaagacaaagaatttacttactttatgttaattacgggcatgaagcaaaaggttttctttaaaaaaaaaaaaaagtgcagtgatgtagggctgtggttagttaaccgtactgagttatccatctagcatctgtggcttgctggaagggtagtattaactatttaacatgtaatggtgtacttcactcttacctagcacgctgtcttctcattgctttgggggagggagggtctctctgctggcactgtctaacttgcttacctgctgactttgcagtttgcttgtgctatgacatttattgtaggtgctatttagggtaggcttaaagtgctgggtggtgatttgagttcaaacaataaaaaattgtattttttcaatattgtataaacaatagtgttctaattaccttaaaaaaaaataatgaccagttaagaattgcttttgatcttgtcaaaaaactgaatagaccccagtttcgggaaggtgtgtgagcagtgccatgactctgccccttacctaatcccacatctctctaatgataagacattggctcgcctctgaccagagccccagcaccagagagcggaagatgcagaattgtcaaatgacctgctgggggaggttgtaggagtttagcagatttgagtgtggctgcagagagagagagagtgtgtgtatgtgtgcacatgtgtgagagtgtgagcgagagtgtgtgtgtgtccatctaagtctgtgtgatgaaggtgggataaggctcctctgttagtgctggaagctcctgtaattgccgcatggatcccactgtgccctcttgttctgtgcaagtctgtcctgtctgggcactaaccttggtcccatgcatgtttatgttctgggtggggctttgcctctccactgggaaactgacttttgctgggttgaacagagtcccttatgctttttgtcctctccctgcgcctgggagaggtgggagtaggagcccaaacacacaggtacagaaagatctggaagaaggcctggcagtgaatccaaggactctgggcccccaacaatagatggtagcgtaagtctgggagcagcggtgtttcaccaccaaatgcctttccaggcttgcccttccaacactcaggagagcatccagatccctgggcagaggctctacattcttggctttagaggtggtggcagcggcagcaggtcagagccacttctggcggtttccctcccctttttagtgcccatagtttttggatcctcccttgagttttaccagcacaagccattctttgcccctgttcacataactgagctcaagctcttgccaaacaccaacaagcaagatggttgcaacctggcaacattgaatccaccacccttgggctccctctggaagccccagcaccggggggcttttgggcacagggtcagtggtagccatcttagacactgacatttggctttgtcgtcaatttcatcaccctccttgaggttactgtgcagtttcaaccagcattttatcctagtgaggtcattatcaggagttgccatatcatctctccagtacctaacatttctcatccacttcaaaagctgttctgactgccagctggctgatctaagctcctgaggaatgtctcctctcaaaggaatttttccctccaaaggccccctgaagtcctagttggcattggcctggcacatgctttatgttaggcctcccgttgggatggctgagaatcatgaaagacagatcctccgctagcctctgtgggtcaagtttctggacaccaagtctctgggaactagtgtttgattttaaatggcatgtggcccttccttgtttcagtgacttagaaaagtaaaagccatttaaaaaagttagcaagattttttatcgacttcccaactgggcttccagccttgttgaatgaaatcatctatctctgattgggcgcaacgaactgcatttctttggacttctgaatccatgtttgtgctttctctggcccgtgaacacctcggcgattctgttagggatgggatgagtgggaggaagccctttgagaagggggagccggccctgtcatgcgcaggttttccactcatctgaggaagagccagggctctgaatttagcctaacactcatcttggctgtgggcttgggaagaaatggccattatttacagattgtatttggtacatattgtgtgatacttgaaaagataaaagggactgccagcccctaactgaaatctgaagctttttatcgcttatttttcctcgccctgtctcctcccttccacctttctccttgcattgtgatgatctagtaggcacgtctgtcaacaggacacatgcctcctctgactataacctcttaatagtgggtttccgcaactggcacttttaatacacgggtttccttggaaaaaaaaaaggggggctaaacccggggcacttcgacctttgtcaggcccagggg

SEQ ID NO: 300222 - DNA, 5217 bp, Homo sapiens
cgcccagagcgaggctggggtagggaggccgactgagcaggagtcgtccgcttatagtggaggctgctaggagccggtcagagggtgagtggggagcaggcgagcgagccacagcaggcaggagggagcgtcgcgcggcgcagaggagcgccggggcagggccgcggcggaaccacagccggagaggggcagcccgagccgggcgccgcagggtccccacccccacccggccggacagtgcccggtgttcccccgtgcggggggcggcggcggcggctgacgggaccgccgggaccgcgggggtgttgccacctccaccgaggagccggcgcggccgcgggctcctcagagccggggccccgggcccgtgacagacgggccgaggaagggagagaggcggcggcgacaccatgtcatctcccagtccgggcaagaggcggatggacacggacgtggtcaagctcatcgagagtaaacatgaggttacgatcctgggaggacttaatgaatttgtagtgaagttttatggaccacaaggaacaccatatgaaggcggagtatggaaagttagagtggacctacctgataaataccctttcaaatctccatctatagaattataaattacctaattcccttctgctaaaagacgcaggacagagaagggattcatgaataaaattttccatcccaacattgatgaagcgtcaggaactgtgtgtctagatgtaattaatcaaacttggacagctctctatgatcttaccaatatatttgagtccttcctgcctcagttattggcctatcctaaccccatagatcctctcaatggtgacgctgcagccatgtacctccaccgaccagaagaatacaagcagaaaattaaagagtacatccagaaatacgccacggaggaggcgctgaaagaacaggaagagggtaccggggacagctcatcggagagctctatgtctgacttttccgaagatgaggcccaggatatggagttgtagtagaaaaagcacctgcttttcagaaagactattatttcctaaccatgagaagcagactataatattcatatttaaacaaagcaattttttttattactaaacaaggtttttatgaataatagcattgatatatatatattatatatcaccctttagatcttgatttcttggtcatttctcaacctgaggtgcatagcatattcccacattccatttggtagcaatatgcggtctgaatgcatgcattcatgagtccatgtggccaagtcagcctgtgtgctactgaactgtcgaaggaaatagccgctctgataggtagatgtgagtaaaaagaacaggaaaaaattgcttcttttattggtttccaaagaaacaaaccaaaccaaccagctcttggatgtgaagataaaatagtgcttttttgaaatggagaggaaaaacttggggaggaagaggcctgctgtgggggcatcggagccagccatgtaagaatcagagctgctccttcctgtgaatcctaggtggccctatgtcttctgtggagttacagtataaagcagggagctaattaagagtattaaaacttaaaaccattttttgactctgattttaagtacatttttatatgtcagttgctgcccttcacactaccaggccctgcagccacagtgttctgttggagaaacttggggaagtgttttctgaaccagttctttttcttggggtagagcgtgaaatccagacctgtttttgaaaggacagcacaggaggagaaaagtgactgggacgatgcttcctctcatccaaaacacatgcagagtcacatcctcatcctagtgtttggcagtttgagaccgctaccctgaacttaagagctttaaatatgagggttgtgtttctgggggggttatttttttggtgtgtgtgtgtgtgtattgtgcttagaaaggttgcagatttcatcttcacctaccaagaggcggccgcctccttggacaagccgctcatggaccattagacttgagaagacgacccacgtggtgactgcaaagccctgggtacttgccttcatgttctggtttggttttccctttttctgctgctcttggcagcagcctggtcatcatctgcttgtgggagtgggaaatgggtattttagacccaacacaggttctaaatttaaaacaaataataattggaacaaataaaggttcttgtacccagagtgattctacatgggaaaaacaaaccagcttttttcagagagtgaccgaataggaagaagggattcagaaatatgatgtagtagaacatgccctgcaggaagaaaatgttttctctcctgcgtatgttaagaggaaatcagtttaaaatgcctgctaatcaaatgtcgactcagctaaccatatgtccaggttgctgcagagtttctttcaaatctgagtgttgcctgctgaactcggaggggagtttggagaaattttagacagcagctctgtgttctttttttgccgcagccaataagataatagcagaattagccaatcctaaaaccttctaaagacgatttttgagcatcccactgggattatttaatttttctttttgacgtgtgtttttagtttagaagtgctgtattccacaaggtttaagtcagtgaggttggaagataccctatcttttttattcaaaaagcacaatcaatcttttgtttgaaaatctatataaagtacaacttgcttttagcatgattattttcctaaataaaaagacaaagaatttacttactttatgttaattacgggcatgaagcaaaaggttttctttaaaaaaaaaaaaaagtgcagtgatgtagggctgtggttagttaaccgtactgagttatccatctagcatctgtggcttgctggaagggtagtattaactatttaacatgtaatggtgtacttcactcttacctagcacgctgtcttctcattgctttgggggagggagggtctctctgctggcactgtctaacttgcttacctgctgactttgcagtttgcttgtgctatgacatttattgtaggtgctatttagggtaggcttaaagtgctgggtggtgatttgagttcaaacaataaaaaattgtattttttcaatattgtataaacaatagtgttctaattaccttaaaaaaaaataatgaccagttaagaattgcttttgatcttgtcaaaaaactgaatagaccccagtttcgggaaggtgtgtgagcagtgccatgactctgccccttacctaatcccacatctctctaatgataagacattggctcgcctctgaccagagccccagcaccagagagcggaagatgcagaattgtcaaatgacctgctgggggaggttgtaggagtttagcagatttgagtgtggctgcagagagagagagagtgtgtgtatgtgtgcacatgtgtgagagtgtgagcgagagtgtgtgtgtgtccatctaagtctgtgtgatgaaggtgggataaggctcctctgttagtgctggaagctcctgtaattgccgcatggatcccactgtgccctcttgttctgtgcaagtctgtcctgtctgggcactaaccttggtcccatgcatgtttatgttctgggtggggctttgcctctccactgggaaactgacttttgctgggttgaacagagtcccttatgctttttgtcctctccctgcgcctgggagaggtgggagtaggagcccaaacacacaggtacagaaagatctggaagaaggcctggcagtgaatccaaggactctgggcccccaacaatagatggtagcgtaagtctgggagcagcggtgtttcaccaccaaatgcctttccaggcttgcccttccaacactcaggagagcatccagatccctgggcagaggctctacattcttggctttagaggtggtggcagcggcagcaggtcagagccacttctggcggtttccctcccctttttagtgcccatagtttttggatcctcccttgagttttaccagcacaagccattctttgcccctgttcacataactgagctcaagctcttgccaaacaccaacaagcaagatggttgcaacctggcaacattgaatccaccacccttgggctccctctggaagccccagcaccggggggcttttgggcacagggtcagtggtagccatcttagacactgacatttggctttgtcgtcaatttcatcaccctccttgaggttactgtgcagtttcaaccagcattttatcctagtgaggtcattatcaggagttgccatatcatctctccagtacctaacatttctcatccacttcaaaagctgttctgactgccagctggctgatctaagctcctgaggaatgtctcctctcaaaggaatttttccctccaaaggccccctgaagtcctagttggcattggcctggcacatgctttatgttaggcctcccgttgggatggctgagaatcatgaaagacagatcctccgctagcctctgtgggtcaagtttctggacaccaagtctctgggaactagtgtttgattttaaatggcatgtggcccttccttgtttcagtgacttagaaaagtaaaagccatttaaaaaagttagcaagattttttatcgacttcccaactgggcttccagccttgttgaatgaaatcatctatctctgattgggcgcaacgaactgcatttctttggacttctgaatccatgtttgtgctttctctggcccgtgaacacctcggcgattctgttagggatgggatgagtgggaggaagccctttgagaagggggagccggccctgtcatgcgcaggttttccactcatctgaggaagagccagggctctgaatttagcctaacactcatcttggctgtgggcttgggaagaaatggccattatttacagattgtatttggtacatattgtgtgatacttgaaaagataaaagggactgccagcccctaactgaaatctgaagctttttatcgcttatttttcctcgccctgtctcctcccttccacctttctccttgcattgtgatgatctagtaggcacgtctgtcaacaggacacatgcctcctctgactataacctcttaatagttgtgtataatgaaaactgtaaacttttttaaataaacgtgtatataccttg

SEQ ID NO: 300223 - DNA, 5073 bp, Homo sapiens
cgcccagagcgaggctggggtagggaggccgactgagcaggagtcgtccgcttatagtggaggctgctaggagccggtcagagggtgagtggggagcaggcgagcgagccacagcaggcaggagggagcgtcgcgcggcgcagaggagcgccggggcagggccgcggcggaaccacagccggagaggggcagcccgagccgggcgccgcagggtccccacccccacccggccggacagtgcccggtgttcccccgtgcggggggcggcggcggcggctgacgggaccgccgggaccgcgggggtgttgccacctccaccgaggagccggcgcggccgcgggctcctcagagccggggccccgggcccgtgacagacgggccgaggaagggagagaggcggcggcgacaccatgtcatctcccagtccgggcaagaggcggatggacacggacgtggtcaagctcatcgagagtaaacatgaggttacgatcctgggaggacttaatgaatttgtagtgaagttttatggaccacaaggaacaccatatgaaggcggagtatggaaagttagagtggacctacctgataaataccctttcaaatctccatctatagatcttaccaatatatttgagtccttcctgcctcagttattggcctatcctaaccccatagatcctctcaatggtgacgctgcagccatgtacctccaccgaccagaagaatacaagcagaaaattaaagagtacatccagaaatacgccacggaggaggcgctgaaagaacaggaagagggtaccggggacagctcatcggagagctctatgtctgacttttccgaagatgaggcccaggatatggagttgtagtagaaaaagcacctgcttttcagaaagactattatttcctaaccatgagaagcagactataatattcatatttaaacaaagcaattttttttattactaaacaaggtttttatgaataatagcattgatatatatatattatatatcaccctttagatcttgatttcttggtcatttctcaacctgaggtgcatagcatattcccacattccatttggtagcaatatgcggtctgaatgcatgcattcatgagtccatgtggccaagtcagcctgtgtgctactgaactgtcgaaggaaatagccgctctgataggtagatgtgagtaaaaagaacaggaaaaaattgcttcttttattggtttccaaagaaacaaaccaaaccaaccagctcttggatgtgaagataaaatagtgcttttttgaaatggagaggaaaaacttggggaggaagaggcctgctgtgggggcatcggagccagccatgtaagaatcagagctgctccttcctgtgaatcctaggtggccctatgtcttctgtggagttacagtataaagcagggagctaattaagagtattaaaacttaaaaccattttttgactctgattttaagtacatttttatatgtcagttgctgcccttcacactaccaggccctgcagccacagtgttctgttggagaaacttggggaagtgttttctgaaccagttctttttcttggggtagagcgtgaaatccagacctgtttttgaaaggacagcacaggaggagaaaagtgactgggacgatgcttcctctcatccaaaacacatgcagagtcacatcctcatcctagtgtttggcagtttgagaccgctaccctgaacttaagagctttaaatatgagggttgtgtttctgggggggttatttttttggtgtgtgtgtgtgtgtattgtgcttagaaaggttgcagatttcatcttcacctaccaagaggcggccgcctccttggacaagccgctcatggaccattagacttgagaagacgacccacgtggtgactgcaaagccctgggtacttgccttcatgttctggtttggttttccctttttctgctgctcttggcagcagcctggtcatcatctgcttgtgggagtgggaaatgggtattttagacccaacacaggttctaaatttaaaacaaataataattggaacaaataaaggttcttgtacccagagtgattctacatgggaaaaacaaaccagcttttttcagagagtgaccgaataggaagaagggattcagaaatatgatgtagtagaacatgccctgcaggaagaaaatgttttctctcctgcgtatgttaagaggaaatcagtttaaaatgcctgctaatcaaatgtcgactcagctaaccatatgtccaggttgctgcagagtttctttcaaatctgagtgttgcctgctgaactcggaggggagtttggagaaattttagacagcagctctgtgttctttttttgccgcagccaataagataatagcagaattagccaatcctaaaaccttctaaagacgatttttgagcatcccactgggattatttaatttttctttttgacgtgtgtttttagtttagaagtgctgtattccacaaggtttaagtcagtgaggttggaagataccctatcttttttattcaaaaagcacaatcaatcttttgtttgaaaatctatataaagtacaacttgcttttagcatgattattttcctaaataaaaagacaaagaatttacttactttatgttaattacgggcatgaagcaaaaggttttctttaaaaaaaaaaaaaagtgcagtgatgtagggctgtggttagttaaccgtactgagttatccatctagcatctgtggcttgctggaagggtagtattaactatttaacatgtaatggtgtacttcactcttacctagcacgctgtcttctcattgctttgggggagggagggtctctctgctggcactgtctaacttgcttacctgctgactttgcagtttgcttgtgctatgacatttattgtaggtgctatttagggtaggcttaaagtgctgggtggtgatttgagttcaaacaataaaaaattgtattttttcaatattgtataaacaatagtgttctaattaccttaaaaaaaaataatgaccagttaagaattgcttttgatcttgtcaaaaaactgaatagaccccagtttcgggaaggtgtgtgagcagtgccatgactctgccccttacctaatcccacatctctctaatgataagacattggctcgcctctgaccagagccccagcaccagagagcggaagatgcagaattgtcaaatgacctgctgggggaggttgtaggagtttagcagatttgagtgtggctgcagagagagagagagtgtgtgtatgtgtgcacatgtgtgagagtgtgagcgagagtgtgtgtgtgtccatctaagtctgtgtgatgaaggtgggataaggctcctctgttagtgctggaagctcctgtaattgccgcatggatcccactgtgccctcttgttctgtgcaagtctgtcctgtctgggcactaaccttggtcccatgcatgtttatgttctgggtggggctttgcctctccactgggaaactgacttttgctgggttgaacagagtcccttatgctttttgtcctctccctgcgcctgggagaggtgggagtaggagcccaaacacacaggtacagaaagatctggaagaaggcctggcagtgaatccaaggactctgggcccccaacaatagatggtagcgtaagtctgggagcagcggtgtttcaccaccaaatgcctttccaggcttgcccttccaacactcaggagagcatccagatccctgggcagaggctctacattcttggctttagaggtggtggcagcggcagcaggtcagagccacttctggcggtttccctcccctttttagtgcccatagtttttggatcctcccttgagttttaccagcacaagccattctttgcccctgttcacataactgagctcaagctcttgccaaacaccaacaagcaagatggttgcaacctggcaacattgaatccaccacccttgggctccctctggaagccccagcaccggggggcttttgggcacagggtcagtggtagccatcttagacactgacatttggctttgtcgtcaatttcatcaccctccttgaggttactgtgcagtttcaaccagcattttatcctagtgaggtcattatcaggagttgccatatcatctctccagtacctaacatttctcatccacttcaaaagctgttctgactgccagctggctgatctaagctcctgaggaatgtctcctctcaaaggaatttttccctccaaaggccccctgaagtcctagttggcattggcctggcacatgctttatgttaggcctcccgttgggatggctgagaatcatgaaagacagatcctccgctagcctctgtgggtcaagtttctggacaccaagtctctgggaactagtgtttgattttaaatggcatgtggcccttccttgtttcagtgacttagaaaagtaaaagccatttaaaaaagttagcaagattttttatcgacttcccaactgggcttccagccttgttgaatgaaatcatctatctctgattgggcgcaacgaactgcatttctttggacttctgaatccatgtttgtgctttctctggcccgtgaacacctcggcgattctgttagggatgggatgagtgggaggaagccctttgagaagggggagccggccctgtcatgcgcaggttttccactcatctgaggaagagccagggctctgaatttagcctaacactcatcttggctgtgggcttgggaagaaatggccattatttacagattgtatttggtacatattgtgtgatacttgaaaagataaaagggactgccagcccctaactgaaatctgaagctttttatcgcttatttttcctcgccctgtctcctcccttccacctttctccttgcattgtgatgatctagtaggcacgtctgtcaacaggacacatgcctcctctgactataacctcttaatagttgtgtataatgaaaactgtaaacttttttaaataaacgtgtatataccttg

SEQ ID NO: 300224 - DNA, 4787 bp, Homo sapiens
cgcccagagcgaggctggggtagggaggccgactgagcaggagtcgtccgcttatagtggaggctgctaggagccggtcagaggcatcgagagtaaacatgaggttacgatcctgggaggacttaatgaatttgtagtgaagttttatggaccacaaggaacaccatatgaaggcggagtatggaaagttagagtggacctacctgataaataccctttcaaatctccatctataggattcatgaataaaattttccatcccaacattgatgaagcgtcaggaactgtgtgtctagatgtaattaatcaaacttggacagctctctatgatcttaccaatatatttgagtccttcctgcctcagttattggcctatcctaaccccatagatcctctcaatggtgacgctgcagccatgtacctccaccgaccagaagaatacaagcagaaaattaaagagtacatccagaaatacgccacggaggaggcgctgaaagaacaggaagagggtaccggggacagctcatcggagagctctatgtctgacttttccgaagatgaggcccaggatatggagttgtagtagaaaaagcacctgcttttcagaaagactattatttcctaaccatgagaagcagactataatattcatatttaaacaaagcaattttttttattactaaacaaggtttttatgaataatagcattgatatatatatattatatatcaccctttagatcttgatttcttggtcatttctcaacctgaggtgcatagcatattcccacattccatttggtagcaatatgcggtctgaatgcatgcattcatgagtccatgtggccaagtcagcctgtgtgctactgaactgtcgaaggaaatagccgctctgataggtagatgtgagtaaaaagaacaggaaaaaattgcttcttttattggtttccaaagaaacaaaccaaaccaaccagctcttggatgtgaagataaaatagtgcttttttgaaatggagaggaaaaacttggggaggaagaggcctgctgtgggggcatcggagccagccatgtaagaatcagagctgctccttcctgtgaatcctaggtggccctatgtcttctgtggagttacagtataaagcagggagctaattaagagtattaaaacttaaaaccattttttgactctgattttaagtacatttttatatgtcagttgctgcccttcacactaccaggccctgcagccacagtgttctgttggagaaacttggggaagtgttttctgaaccagttctttttcttggggtagagcgtgaaatccagacctgtttttgaaaggacagcacaggaggagaaaagtgactgggacgatgcttcctctcatccaaaacacatgcagagtcacatcctcatcctagtgtttggcagtttgagaccgctaccctgaacttaagagctttaaatatgagggttgtgtttctgggggggttatttttttggtgtgtgtgtgtgtgtattgtgcttagaaaggttgcagatttcatcttcacctaccaagaggcggccgcctccttggacaagccgctcatggaccattagacttgagaagacgacccacgtggtgactgcaaagccctgggtacttgccttcatgttctggtttggttttccctttttctgctgctcttggcagcagcctggtcatcatctgcttgtgggagtgggaaatgggtattttagacccaacacaggttctaaatttaaaacaaataataattggaacaaataaaggttcttgtacccagagtgattctacatgggaaaaacaaaccagcttttttcagagagtgaccgaataggaagaagggattcagaaatatgatgtagtagaacatgccctgcaggaagaaaatgttttctctcctgcgtatgttaagaggaaatcagtttaaaatgcctgctaatcaaatgtcgactcagctaaccatatgtccaggttgctgcagagtttctttcaaatctgagtgttgcctgctgaactcggaggggagtttggagaaattttagacagcagctctgtgttctttttttgccgcagccaataagataatagcagaattagccaatcctaaaaccttctaaagacgatttttgagcatcccactgggattatttaatttttctttttgacgtgtgtttttagtttagaagtgctgtattccacaaggtttaagtcagtgaggttggaagataccctatcttttttattcaaaaagcacaatcaatcttttgtttgaaaatctatataaagtacaacttgcttttagcatgattattttcctaaataaaaagacaaagaatttacttactttatgttaattacgggcatgaagcaaaaggttttctttaaaaaaaaaaaaaagtgcagtgatgtagggctgtggttagttaaccgtactgagttatccatctagcatctgtggcttgctggaagggtagtattaactatttaacatgtaatggtgtacttcactcttacctagcacgctgtcttctcattgctttgggggagggagggtctctctgctggcactgtctaacttgcttacctgctgactttgcagtttgcttgtgctatgacatttattgtaggtgctatttagggtaggcttaaagtgctgggtggtgatttgagttcaaacaataaaaaattgtattttttcaatattgtataaacaatagtgttctaattaccttaaaaaaaaataatgaccagttaagaattgcttttgatcttgtcaaaaaactgaatagaccccagtttcgggaaggtgtgtgagcagtgccatgactctgccccttacctaatcccacatctctctaatgataagacattggctcgcctctgaccagagccccagcaccagagagcggaagatgcagaattgtcaaatgacctgctgggggaggttgtaggagtttagcagatttgagtgtggctgcagagagagagagagtgtgtgtatgtgtgcacatgtgtgagagtgtgagcgagagtgtgtgtgtgtccatctaagtctgtgtgatgaaggtgggataaggctcctctgttagtgctggaagctcctgtaattgccgcatggatcccactgtgccctcttgttctgtgcaagtctgtcctgtctgggcactaaccttggtcccatgcatgtttatgttctgggtggggctttgcctctccactgggaaactgacttttgctgggttgaacagagtcccttatgctttttgtcctctccctgcgcctgggagaggtgggagtaggagcccaaacacacaggtacagaaagatctggaagaaggcctggcagtgaatccaaggactctgggcccccaacaatagatggtagcgtaagtctgggagcagcggtgtttcaccaccaaatgcctttccaggcttgcccttccaacactcaggagagcatccagatccctgggcagaggctctacattcttggctttagaggtggtggcagcggcagcaggtcagagccacttctggcggtttccctcccctttttagtgcccatagtttttggatcctcccttgagttttaccagcacaagccattctttgcccctgttcacataactgagctcaagctcttgccaaacaccaacaagcaagatggttgcaacctggcaacattgaatccaccacccttgggctccctctggaagccccagcaccggggggcttttgggcacagggtcagtggtagccatcttagacactgacatttggctttgtcgtcaatttcatcaccctccttgaggttactgtgcagtttcaaccagcattttatcctagtgaggtcattatcaggagttgccatatcatctctccagtacctaacatttctcatccacttcaaaagctgttctgactgccagctggctgatctaagctcctgaggaatgtctcctctcaaaggaatttttccctccaaaggccccctgaagtcctagttggcattggcctggcacatgctttatgttaggcctcccgttgggatggctgagaatcatgaaagacagatcctccgctagcctctgtgggtcaagtttctggacaccaagtctctgggaactagtgtttgattttaaatggcatgtggcccttccttgtttcagtgacttagaaaagtaaaagccatttaaaaaagttagcaagattttttatcgacttcccaactgggcttccagccttgttgaatgaaatcatctatctctgattgggcgcaacgaactgcatttctttggacttctgaatccatgtttgtgctttctctggcccgtgaacacctcggcgattctgttagggatgggatgagtgggaggaagccctttgagaagggggagccggccctgtcatgcgcaggttttccactcatctgaggaagagccagggctctgaatttagcctaacactcatcttggctgtgggcttgggaagaaatggccattatttacagattgtatttggtacatattgtgtgatacttgaaaagataaaagggactgccagcccctaactgaaatctgaagctttttatcgcttatttttcctcgccctgtctcctcccttccacctttctccttgcattgtgatgatctagtaggcacgtctgtcaacaggacacatgcctcctctgactataacctcttaatagttgtgtataatgaaaactgtaaacttttttaaataaacgtgtatataccttg

SEQ ID NO: 300225 - DNA, 4517 bp, Homo sapiens
aagtgaattttaggtgaacttgcatttcccatgtgtgacatgtttgtttggtttttcagatcttaccaatatatttgagtccttcctgcctcagttattggcctatcctaaccccatagatcctctcaatggtgacgctgcagccatgtacctccaccgaccagaagaatacaagcagaaaattaaagagtacatccagaaatacgccacggaggaggcgctgaaagaacaggaagagggtaccggggacagctcatcggagagctctatgtctgacttttccgaagatgaggcccaggatatggagttgtagtagaaaaagcacctgcttttcagaaagactattatttcctaaccatgagaagcagactataatattcatatttaaacaaagcaattttttttattactaaacaaggtttttatgaataatagcattgatatatatatattatatatcaccctttagatcttgatttcttggtcatttctcaacctgaggtgcatagcatattcccacattccatttggtagcaatatgcggtctgaatgcatgcattcatgagtccatgtggccaagtcagcctgtgtgctactgaactgtcgaaggaaatagccgctctgataggtagatgtgagtaaaaagaacaggaaaaaattgcttcttttattggtttccaaagaaacaaaccaaaccaaccagctcttggatgtgaagataaaatagtgcttttttgaaatggagaggaaaaacttggggaggaagaggcctgctgtgggggcatcggagccagccatgtaagaatcagagctgctccttcctgtgaatcctaggtggccctatgtcttctgtggagttacagtataaagcagggagctaattaagagtattaaaacttaaaaccattttttgactctgattttaagtacatttttatatgtcagttgctgcccttcacactaccaggccctgcagccacagtgttctgttggagaaacttggggaagtgttttctgaaccagttctttttcttggggtagagcgtgaaatccagacctgtttttgaaaggacagcacaggaggagaaaagtgactgggacgatgcttcctctcatccaaaacacatgcagagtcacatcctcatcctagtgtttggcagtttgagaccgctaccctgaacttaagagctttaaatatgagggttgtgtttctgggggggttatttttttggtgtgtgtgtgtgtgtattgtgcttagaaaggttgcagatttcatcttcacctaccaagaggcggccgcctccttggacaagccgctcatggaccattagacttgagaagacgacccacgtggtgactgcaaagccctgggtacttgccttcatgttctggtttggttttccctttttctgctgctcttggcagcagcctggtcatcatctgcttgtgggagtgggaaatgggtattttagacccaacacaggttctaaatttaaaacaaataataattggaacaaataaaggttcttgtacccagagtgattctacatgggaaaaacaaaccagcttttttcagagagtgaccgaataggaagaagggattcagaaatatgatgtagtagaacatgccctgcaggaagaaaatgttttctctcctgcgtatgttaagaggaaatcagtttaaaatgcctgctaatcaaatgtcgactcagctaaccatatgtccaggttgctgcagagtttctttcaaatctgagtgttgcctgctgaactcggaggggagtttggagaaattttagacagcagctctgtgttctttttttgccgcagccaataagataatagcagaattagccaatcctaaaaccttctaaagacgatttttgagcatcccactgggattatttaatttttctttttgacgtgtgtttttagtttagaagtgctgtattccacaaggtttaagtcagtgaggttggaagataccctatcttttttattcaaaaagcacaatcaatcttttgtttgaaaatctatataaagtacaacttgcttttagcatgattattttcctaaataaaaagacaaagaatttacttactttatgttaattacgggcatgaagcaaaaggttttctttaaaaaaaaaaaaaagtgcagtgatgtagggctgtggttagttaaccgtactgagttatccatctagcatctgtggcttgctggaagggtagtattaactatttaacatgtaatggtgtacttcactcttacctagcacgctgtcttctcattgctttgggggagggagggtctctctgctggcactgtctaacttgcttacctgctgactttgcagtttgcttgtgctatgacatttattgtaggtgctatttagggtaggcttaaagtgctgggtggtgatttgagttcaaacaataaaaaattgtattttttcaatattgtataaacaatagtgttctaattaccttaaaaaaaaataatgaccagttaagaattgcttttgatcttgtcaaaaaactgaatagaccccagtttcgggaaggtgtgtgagcagtgccatgactctgccccttacctaatcccacatctctctaatgataagacattggctcgcctctgaccagagccccagcaccagagagcggaagatgcagaattgtcaaatgacctgctgggggaggttgtaggagtttagcagatttgagtgtggctgcagagagagagagagtgtgtgtatgtgtgcacatgtgtgagagtgtgagcgagagtgtgtgtgtgtccatctaagtctgtgtgatgaaggtgggataaggctcctctgttagtgctggaagctcctgtaattgccgcatggatcccactgtgccctcttgttctgtgcaagtctgtcctgtctgggcactaaccttggtcccatgcatgtttatgttctgggtggggctttgcctctccactgggaaactgacttttgctgggttgaacagagtcccttatgctttttgtcctctccctgcgcctgggagaggtgggagtaggagcccaaacacacaggtacagaaagatctggaagaaggcctggcagtgaatccaaggactctgggcccccaacaatagatggtagcgtaagtctgggagcagcggtgtttcaccaccaaatgcctttccaggcttgcccttccaacactcaggagagcatccagatccctgggcagaggctctacattcttggctttagaggtggtggcagcggcagcaggtcagagccacttctggcggtttccctcccctttttagtgcccatagtttttggatcctcccttgagttttaccagcacaagccattctttgcccctgttcacataactgagctcaagctcttgccaaacaccaacaagcaagatggttgcaacctggcaacattgaatccaccacccttgggctccctctggaagccccagcaccggggggcttttgggcacagggtcagtggtagccatcttagacactgacatttggctttgtcgtcaatttcatcaccctccttgaggttactgtgcagtttcaaccagcattttatcctagtgaggtcattatcaggagttgccatatcatctctccagtacctaacatttctcatccacttcaaaagctgttctgactgccagctggctgatctaagctcctgaggaatgtctcctctcaaaggaatttttccctccaaaggccccctgaagtcctagttggcattggcctggcacatgctttatgttaggcctcccgttgggatggctgagaatcatgaaagacagatcctccgctagcctctgtgggtcaagtttctggacaccaagtctctgggaactagtgtttgattttaaatggcatgtggcccttccttgtttcagtgacttagaaaagtaaaagccatttaaaaaagttagcaagattttttatcgacttcccaactgggcttccagccttgttgaatgaaatcatctatctctgattgggcgcaacgaactgcatttctttggacttctgaatccatgtttgtgctttctctggcccgtgaacacctcggcgattctgttagggatgggatgagtgggaggaagccctttgagaagggggagccggccctgtcatgcgcaggttttccactcatctgaggaagagccagggctctgaatttagcctaacactcatcttggctgtgggcttgggaagaaatggccattatttacagattgtatttggtacatattgtgtgatacttgaaaagataaaagggactgccagcccctaactgaaatctgaagctttttatcgcttatttttcctcgccctgtctcctcccttccacctttctccttgcattgtgatgatctagtaggcacgtctgtcaacaggacacatgcctcctctgactataacctcttaatagttgtgtataatgaaaactgtaaacttttttaaataaacgtgtatataccttg

SEQ ID NO: 300226 - DNA, 5006 bp, Homo sapiens
cgcccagagcgaggctggggtagggaggccgactgagcaggagtcgtccgcttatagtggaggctgctaggagccggtcagagggtgagtggggagcaggcgagcgagccacagcaggcaggagggagcgtcgcgcggcgcagaggagcgccggggcagggccgcggcggaaccacagccggagaggggcagcccgagccgggcgccgcagggtccccacccccacccggccggacagtgcccggtgttcccccgtgcggggggcggcggcggcggctgacgggaccgccgggaccgcgggggtgttgccacctccaccgaggagccggcgcggccgcgggctcctcagagccggggccccgggcccgtgacagacgggccgaggaagggagagaggcggcggcgacaccatgtcatctcccagtccgggcaagaggcggatggacacggacgtggtcaagctcatcgagagtaaacatgaggttacgatcctgggaggacttaatgaatttgtagtgaagttttatggaccacaaggaacaccatatgaaggcggagtatggaaagttagagtggacctacctgataaataccctttcaaatctccatctataggattcatgaataaaattttccatcccaacattgatgaagcgtcaggaactgtgtgtctagatgtaattaatcaaacttggacagctctctatgatcttaccaatatatttgagtccttcctgcctcagttattggcctatcctaaccccatagatcctctcaatggtgacgctgcagccatgtacctccaccgaccagaagaatacaagcagaaaattaaagagtacatccagaaatacgccacggaggaggcgctgaaagaacaggaagagggtaccggggacagctcatcggagagctctatgtctgacttttccgaagatgaggcccaggatatggagttgtagtagaaaaagcacctgcttttcagaaagactattatttcctaaccatgagaagcagactataatattcatatttaaacaaagcaattttttttattactaaacaaggtttttatgaataatagcattgatatatatatattatatatcaccctttagatcttgatttcttggtcatttctcaacctgaggtgcatagcatattcccacattccatttggtagcaatatgcggtctgaatgcatgcattcatgagtccatgtggccaagtcagcctgtgtgctactgaactgtcgaaggaaatagccgctctgataggtagatgtgagtaaaaagaacaggaaaaaattgcttcttttattggtttccaaagaaacaaaccaaaccaaccagctcttggatgtgaagataaaatagtgcttttttgaaatggagaggaaaaacttggggaggaagaggcctgctgtgggggcatcggagccagccatgtaagaatcagagctgctccttcctgtgaatcctaggtggccctatgtcttctgtggagttacagtataaagcagggagctaattaagagtattaaaacttaaaaccattttttgactctgattttaagtacatttttatatgtcagttgctgcccttcacactaccaggccctgcagccacagtgttctgttggagaaacttggggaagtgttttcctgaacttaagagctttaaatatgagggttgtgtttctgggggggttatttttttggtgtgtgtgtgtgtgtattgtgcttagaaaggttgcagatttcatcttcacctaccaagaggcggccgcctccttggacaagccgctcatggaccattagacttgagaagacgacccacgtggtgactgcaaagccctgggtacttgccttcatgttctggtttggttttccctttttctgctgctcttggcagcagcctggtcatcatctgcttgtgggagtgggaaatgggtattttagacccaacacaggttctaaatttaaaacaaataataattggaacaaataaaggttcttgtacccagagtgattctacatgggaaaaacaaaccagcttttttcagagagtgaccgaataggaagaagggattcagaaatatgatgtagtagaacatgccctgcaggaagaaaatgttttctctcctgcgtatgttaagaggaaatcagtttaaaatgcctgctaatcaaatgtcgactcagctaaccatatgtccaggttgctgcagagtttctttcaaatctgagtgttgcctgctgaactcggaggggagtttggagaaattttagacagcagctctgtgttctttttttgccgcagccaataagataatagcagaattagccaatcctaaaaccttctaaagacgatttttgagcatcccactgggattatttaatttttctttttgacgtgtgtttttagtttagaagtgctgtattccacaaggtttaagtcagtgaggttggaagataccctatcttttttattcaaaaagcacaatcaatcttttgtttgaaaatctatataaagtacaacttgcttttagcatgattattttcctaaataaaaagacaaagaatttacttactttatgttaattacgggcatgaagcaaaaggttttctttaaaaaaaaaaaaaagtgcagtgatgtagggctgtggttagttaaccgtactgagttatccatctagcatctgtggcttgctggaagggtagtattaactatttaacatgtaatggtgtacttcactcttacctagcacgctgtcttctcattgctttgggggagggagggtctctctgctggcactgtctaacttgcttacctgctgactttgcagtttgcttgtgctatgacatttattgtaggtgctatttagggtaggcttaaagtgctgggtggtgatttgagttcaaacaataaaaaattgtattttttcaatattgtataaacaatagtgttctaattaccttaaaaaaaaataatgaccagttaagaattgcttttgatcttgtcaaaaaactgaatagaccccagtttcgggaaggtgtgtgagcagtgccatgactctgccccttacctaatcccacatctctctaatgataagacattggctcgcctctgaccagagccccagcaccagagagcggaagatgcagaattgtcaaatgacctgctgggggaggttgtaggagtttagcagatttgagtgtggctgcagagagagagagagtgtgtgtatgtgtgcacatgtgtgagagtgtgagcgagagtgtgtgtgtgtccatctaagtctgtgtgatgaaggtgggataaggctcctctgttagtgctggaagctcctgtaattgccgcatggatcccactgtgccctcttgttctgtgcaagtctgtcctgtctgggcactaaccttggtcccatgcatgtttatgttctgggtggggctttgcctctccactgggaaactgacttttgctgggttgaacagagtcccttatgctttttgtcctctccctgcgcctgggagaggtgggagtaggagcccaaacacacaggtacagaaagatctggaagaaggcctggcagtgaatccaaggactctgggcccccaacaatagatggtagcgtaagtctgggagcagcggtgtttcaccaccaaatgcctttccaggcttgcccttccaacactcaggagagcatccagatccctgggcagaggctctacattcttggctttagaggtggtggcagcggcagcaggtcagagccacttctggcggtttccctcccctttttagtgcccatagtttttggatcctcccttgagttttaccagcacaagccattctttgcccctgttcacataactgagctcaagctcttgccaaacaccaacaagcaagatggttgcaacctggcaacattgaatccaccacccttgggctccctctggaagccccagcaccggggggcttttgggcacagggtcagtggtagccatcttagacactgacatttggctttgtcgtcaatttcatcaccctccttgaggttactgtgcagtttcaaccagcattttatcctagtgaggtcattatcaggagttgccatatcatctctccagtacctaacatttctcatccacttcaaaagctgttctgactgccagctggctgatctaagctcctgaggaatgtctcctctcaaaggaatttttccctccaaaggccccctgaagtcctagttggcattggcctggcacatgctttatgttaggcctcccgttgggatggctgagaatcatgaaagacagatcctccgctagcctctgtgggtcaagtttctggacaccaagtctctgggaactagtgtttgattttaaatggcatgtggcccttccttgtttcagtgacttagaaaagtaaaagccatttaaaaaagttagcaagattttttatcgacttcccaactgggcttccagccttgttgaatgaaatcatctatctctgattgggcgcaacgaactgcatttctttggacttctgaatccatgtttgtgctttctctggcccgtgaacacctcggcgattctgttagggatgggatgagtgggaggaagccctttgagaagggggagccggccctgtcatgcgcaggttttccactcatctgaggaagagccagggctctgaatttagcctaacactcatcttggctgtgggcttgggaagaaatggccattatttacagattgtatttggtacatattgtgtgatacttgaaaagataaaagggactgccagcccctaactgaaatctgaagctttttatcgcttatttttcctcgccctgtctcctcccttccacctttctccttgcattgtgatgatctagtaggcacgtctgtcaacaggacacatgcctcctctgactataacctcttaatagttgtgtataatgaaaactgtaaacttttttaaataaacgtgtatataccttg

SEQ ID NO: 300227 - DNA, 4513 bp, Homo sapiens
gttcttggggtgctgcagcacacacattcccctgcaagctgagcctgctgtgttgctcttcccaatacccctttcctcagggggcaaaatgcagaaaccctgtcccaaagaagtctccctatgggattctccttagctgtagtgatcatgattactgtcatctttgtcccccctggtgttcaagagtacatccagaaatacgccacggaggaggcgctgaaagaacaggaagagggtaccggggacagctcatcggagagctctatgtctgacttttccgaagatgaggcccaggatatggagttgtagtagaaaaagcacctgcttttcagaaagactattatttcctaaccatgagaagcagactataatattcatatttaaacaaagcaattttttttattactaaacaaggtttttatgaataatagcattgatatatatatattatatatcaccctttagatcttgatttcttggtcatttctcaacctgaggtgcatagcatattcccacattccatttggtagcaatatgcggtctgaatgcatgcattcatgagtccatgtggccaagtcagcctgtgtgctactgaactgtcgaaggaaatagccgctctgataggtagatgtgagtaaaaagaacaggaaaaaattgcttcttttattggtttccaaagaaacaaaccaaaccaaccagctcttggatgtgaagataaaatagtgcttttttgaaatggagaggaaaaacttggggaggaagaggcctgctgtgggggcatcggagccagccatgtaagaatcagagctgctccttcctgtgaatcctaggtggccctatgtcttctgtggagttacagtataaagcagggagctaattaagagtattaaaacttaaaaccattttttgactctgattttaagtacatttttatatgtcagttgctgcccttcacactaccaggccctgcagccacagtgttctgttggagaaacttggggaagtgttttctgaaccagttctttttcttggggtagagcgtgaaatccagacctgtttttgaaaggacagcacaggaggagaaaagtgactgggacgatgcttcctctcatccaaaacacatgcagagtcacatcctcatcctagtgtttggcagtttgagaccgctaccctgaacttaagagctttaaatatgagggttgtgtttctgggggggttatttttttggtgtgtgtgtgtgtgtattgtgcttagaaaggttgcagatttcatcttcacctaccaagaggcggccgcctccttggacaagccgctcatggaccattagacttgagaagacgacccacgtggtgactgcaaagccctgggtacttgccttcatgttctggtttggttttccctttttctgctgctcttggcagcagcctggtcatcatctgcttgtgggagtgggaaatgggtattttagacccaacacaggttctaaatttaaaacaaataataattggaacaaataaaggttcttgtacccagagtgattctacatgggaaaaacaaaccagcttttttcagagagtgaccgaataggaagaagggattcagaaatatgatgtagtagaacatgccctgcaggaagaaaatgttttctctcctgcgtatgttaagaggaaatcagtttaaaatgcctgctaatcaaatgtcgactcagctaaccatatgtccaggttgctgcagagtttctttcaaatctgagtgttgcctgctgaactcggaggggagtttggagaaattttagacagcagctctgtgttctttttttgccgcagccaataagataatagcagaattagccaatcctaaaaccttctaaagacgatttttgagcatcccactgggattatttaatttttctttttgacgtgtgtttttagtttagaagtgctgtattccacaaggtttaagtcagtgaggttggaagataccctatcttttttattcaaaaagcacaatcaatcttttgtttgaaaatctatataaagtacaacttgcttttagcatgattattttcctaaataaaaagacaaagaatttacttactttatgttaattacgggcatgaagcaaaaggttttctttaaaaaaaaaaaaaagtgcagtgatgtagggctgtggttagttaaccgtactgagttatccatctagcatctgtggcttgctggaagggtagtattaactatttaacatgtaatggtgtacttcactcttacctagcacgctgtcttctcattgctttgggggagggagggtctctctgctggcactgtctaacttgcttacctgctgactttgcagtttgcttgtgctatgacatttattgtaggtgctatttagggtaggcttaaagtgctgggtggtgatttgagttcaaacaataaaaaattgtattttttcaatattgtataaacaatagtgttctaattaccttaaaaaaaaataatgaccagttaagaattgcttttgatcttgtcaaaaaactgaatagaccccagtttcgggaaggtgtgtgagcagtgccatgactctgccccttacctaatcccacatctctctaatgataagacattggctcgcctctgaccagagccccagcaccagagagcggaagatgcagaattgtcaaatgacctgctgggggaggttgtaggagtttagcagatttgagtgtggctgcagagagagagagagtgtgtgtatgtgtgcacatgtgtgagagtgtgagcgagagtgtgtgtgtgtccatctaagtctgtgtgatgaaggtgggataaggctcctctgttagtgctggaagctcctgtaattgccgcatggatcccactgtgccctcttgttctgtgcaagtctgtcctgtctgggcactaaccttggtcccatgcatgtttatgttctgggtggggctttgcctctccactgggaaactgacttttgctgggttgaacagagtcccttatgctttttgtcctctccctgcgcctgggagaggtgggagtaggagcccaaacacacaggtacagaaagatctggaagaaggcctggcagtgaatccaaggactctgggcccccaacaatagatggtagcgtaagtctgggagcagcggtgtttcaccaccaaatgcctttccaggcttgcccttccaacactcaggagagcatccagatccctgggcagaggctctacattcttggctttagaggtggtggcagcggcagcaggtcagagccacttctggcggtttccctcccctttttagtgcccatagtttttggatcctcccttgagttttaccagcacaagccattctttgcccctgttcacataactgagctcaagctcttgccaaacaccaacaagcaagatggttgcaacctggcaacattgaatccaccacccttgggctccctctggaagccccagcaccggggggcttttgggcacagggtcagtggtagccatcttagacactgacatttggctttgtcgtcaatttcatcaccctccttgaggttactgtgcagtttcaaccagcattttatcctagtgaggtcattatcaggagttgccatatcatctctccagtacctaacatttctcatccacttcaaaagctgttctgactgccagctggctgatctaagctcctgaggaatgtctcctctcaaaggaatttttccctccaaaggccccctgaagtcctagttggcattggcctggcacatgctttatgttaggcctcccgttgggatggctgagaatcatgaaagacagatcctccgctagcctctgtgggtcaagtttctggacaccaagtctctgggaactagtgtttgattttaaatggcatgtggcccttccttgtttcagtgacttagaaaagtaaaagccatttaaaaaagttagcaagattttttatcgacttcccaactgggcttccagccttgttgaatgaaatcatctatctctgattgggcgcaacgaactgcatttctttggacttctgaatccatgtttgtgctttctctggcccgtgaacacctcggcgattctgttagggatgggatgagtgggaggaagccctttgagaagggggagccggccctgtcatgcgcaggttttccactcatctgaggaagagccagggctctgaatttagcctaacactcatcttggctgtgggcttgggaagaaatggccattatttacagattgtatttggtacatattgtgtgatacttgaaaagataaaagggactgccagcccctaactgaaatctgaagctttttatcgcttatttttcctcgccctgtctcctcccttccacctttctccttgcattgtgatgatctagtaggcacgtctgtcaacaggacacatgcctcctctgactataacctcttaatagttgtgtataatgaaaactgtaaacttttttaaataaacgtgtatataccttg

SEQ ID NO: 300228 - DNA, 4830 bp, Homo sapiens
cgcccagagcgaggctggggtagggaggccgactgagcaggagtcgtccgcttatagtggaggctgctaggagccggtcagagggtgagtggggagcaggcgagcgagccacagcaggcaggagggagcgtcgcgcggcgcagaggagcgccggggcagggccgcggcggaaccacagccggagaggggcagcccgagccgggcgccgcagggtccccacccccacccggccggacagtgcccggtgttcccccgtgcggggggcggcggcggcggctgacgggaccgccgggaccgcgggggtgttgccacctccaccgaggagccggcgcggccgcgggctcctcagagccggggccccgggcccgtgacagacgggccgaggaagggagagaggcggcggcgacaccatgtcatctcccagtccgggcaagaggcggatggacacggacgtggtcaagctcatcgagagtaaacatgaggttacgatcctgggaggacttaatgaatttgtagtgaagttttatggaccacaaggaacaccatatgaaggcggagtatggaaagttagagtggacctacctgataaataccctttcaaatctccatctataggattcatgaataaaattttccatcccaacattgatgaagcgtcaggaactgtgtgtctagatgtaattaatcaaacttggacagctctctatgatcttaccaatatatttgagtccttcctgcctcagttattggcctatcctaaccccatagatcctctcaatggtgacgctgcagccatgtacctccaccgaccagaagaatacaagcagaaaattaaagagtacatccagaaatacgccacggaggaggcgctgaaagaacaggaagagggtaccggggacagctcatcggagagctctatgtctgacttttccgaagatgaggcccaggatatggagttgtagtagaaaaagcacctgcttttcagaaagactattatttcctaaccatgagaagcagactataatattcatatttaaacaaagcaattttttttattactaaacaaggtttttatgaataatagcattgatatatatatattatatatcaccctttagatcttgatttcttggtcatttctcaacctgaggtgcatagcatattcccacattccatttggtagcaatatgcggtctgaatgcatgcattcatgagtccatgtggccaagtcagcctgtgtgctactgaactgtcgaaggaaatagccgctctgataggtagatgtgagtaaaaagaacaggaaaaaattgcttcttttattggtttccaaagaaacaaaccaaaccaaccagctcttggatgtgaagataaaatagtgcttttttgaaatggagaggagaaaagtgactgggacgatgcttcctctcatccaaaacacatgcagagtcacatcctcatcctagtgtttggcagtttgagaccgctaccctgaacttaagagctttaaatatgagggttgtgtttctgggggggttatttttttggtgtgtgtgtgtgtgtattgtgcttagaaaggttgcagatttcatcttcacctaccaagaggcggccgcctccttggacaagccgctcatggaccattagacttgagaagacgacccacgtggtgactgcaaagccctgggtacttgccttcatgttctggtttggttttccctttttctgctgctcttggcagcagcctggtcatcatctgcttgtgggagtgggaaatgggtattttagacccaacacaggttctaaatttaaaacaaataataattggaacaaataaaggttcttgtacccagagtgattctacatgggaaaaacaaaccagcttttttcagagagtgaccgaataggaagaagggattcagaaatatgatgtagtagaacatgccctgcaggaagaaaatgttttctctcctgcgtatgttaagaggaaatcagtttaaaatgcctgctaatcaaatgtcgactcagctaaccatatgtccaggttgctgcagagtttctttcaaatctgagtgttgcctgctgaactcggaggggagtttggagaaattttagacagcagctctgtgttctttttttgccgcagccaataagataatagcagaattagccaatcctaaaaccttctaaagacgatttttgagcatcccactgggattatttaatttttctttttgacgtgtgtttttagtttagaagtgctgtattccacaaggtttaagtcagtgaggttggaagataccctatcttttttattcaaaaagcacaatcaatcttttgtttgaaaatctatataaagtacaacttgcttttagcatgattattttcctaaataaaaagacaaagaatttacttactttatgttaattacgggcatgaagcaaaaggttttctttaaaaaaaaaaaaaagtgcagtgatgtagggctgtggttagttaaccgtactgagttatccatctagcatctgtggcttgctggaagggtagtattaactatttaacatgtaatggtgtacttcactcttacctagcacgctgtcttctcattgctttgggggagggagggtctctctgctggcactgtctaacttgcttacctgctgactttgcagtttgcttgtgctatgacatttattgtaggtgctatttagggtaggcttaaagtgctgggtggtgatttgagttcaaacaataaaaaattgtattttttcaatattgtataaacaatagtgttctaattaccttaaaaaaaaataatgaccagttaagaattgcttttgatcttgtcaaaaaactgaatagaccccagtttcgggaaggtgtgtgagcagtgccatgactctgccccttacctaatcccacatctctctaatgataagacattggctcgcctctgaccagagccccagcaccagagagcggaagatgcagaattgtcaaatgacctgctgggggaggttgtaggagtttagcagatttgagtgtggctgcagagagagagagagtgtgtgtatgtgtgcacatgtgtgagagtgtgagcgagagtgtgtgtgtgtccatctaagtctgtgtgatgaaggtgggataaggctcctctgttagtgctggaagctcctgtaattgccgcatggatcccactgtgccctcttgttctgtgcaagtctgtcctgtctgggcactaaccttggtcccatgcatgtttatgttctgggtggggctttgcctctccactgggaaactgacttttgctgggttgaacagagtcccttatgctttttgtcctctccctgcgcctgggagaggtgggagtaggagcccaaacacacaggtacagaaagatctggaagaaggcctggcagtgaatccaaggactctgggcccccaacaatagatggtagcgtaagtctgggagcagcggtgtttcaccaccaaatgcctttccaggcttgcccttccaacactcaggagagcatccagatccctgggcagaggctctacattcttggctttagaggtggtggcagcggcagcaggtcagagccacttctggcggtttccctcccctttttagtgcccatagtttttggatcctcccttgagttttaccagcacaagccattctttgcccctgttcacataactgagctcaagctcttgccaaacaccaacaagcaagatggttgcaacctggcaacattgaatccaccacccttgggctccctctggaagccccagcaccggggggcttttgggcacagggtcagtggtagccatcttagacactgacatttggctttgtcgtcaatttcatcaccctccttgaggttactgtgcagtttcaaccagcattttatcctagtgaggtcattatcaggagttgccatatcatctctccagtacctaacatttctcatccacttcaaaagctgttctgactgccagctggctgatctaagctcctgaggaatgtctcctctcaaaggaatttttccctccaaaggccccctgaagtcctagttggcattggcctggcacatgctttatgttaggcctcccgttgggatggctgagaatcatgaaagacagatcctccgctagcctctgtgggtcaagtttctggacaccaagtctctgggaactagtgtttgattttaaatggcatgtggcccttccttgtttcagtgacttagaaaagtaaaagccatttaaaaaagttagcaagattttttatcgacttcccaactgggcttccagccttgttgaatgaaatcatctatctctgattgggcgcaacgaactgcatttctttggacttctgaatccatgtttgtgctttctctggcccgtgaacacctcggcgattctgttagggatgggatgagtgggaggaagccctttgagaagggggagccggccctgtcatgcgcaggttttccactcatctgaggaagagccagggctctgaatttagcctaacactcatcttggctgtgggcttgggaagaaatggccattatttacagattgtatttggtacatattgtgtgatacttgaaaagataaaagggactgccagcccctaactgaaatctgaagctttttatcgcttatttttcctcgccctgtctcctcccttccacctttctccttgcattgtgatgatctagtaggcacgtctgtcaacaggacacatgcctcctctgactataacctcttaatagttgtgtataatgaaaactgtaaacttttttaaataaacgtgtatataccttg

SEQ ID NO: 300229 - DNA, 3328 bp, Homo sapiens
  misc_feature (3297)..(3297): n is a, c, g, or t
cgcccagagcgaggctggggtagggaggccgactgagcaggagtcgtccgcttatagtggaggctgctaggagccggtcagagggtgagtggggagcaggcgagcgagccacagcaggcaggagggagcgtcgcgcggcgcagaggagcgccggggcagggccgcggcggaaccacagccggagaggggcagcccgagccgggcgccgcagggtccccacccccacccggccggacagtgcccggtgttcccccgtgcggggggcggcggcggcggctgacgggaccgccgggaccgcgggggtgttgccacctccaccgaggagccggcgcggccgcgggctcctcagagccggggccccgggcccgtgacagacgggccgaggaagggagagaggcggcggcgacaccatgtcatctcccagtccgggcaagaggcggatggacacggacgtggtcaagctcatcgagagtaaacatgaggttacgatcctgggaggacttaatgaatttgtagtgaagttttatggaccacaaggaacaccatatgaaggcggagtatggaaagttagagtggacctacctgataaataccctttcaaatctccatctataggattcatgaataaaattttccatcccaacattgatgaagcgtcaggaactgtgtgtctagatgtaattaatcaaacttggacagctctctatgatcttaccaatatatttgagtccttcctgcctcagttattggcctatcctaaccccatagatcctctcaatggtgacgctgcagccatgtacctccaccgaccagaagaatacaagcagaaaattaaagagtacatccagaaatacgccacggaggaggcgctgaaagaacaggaagagggtaccggggacagctcatcggagagctctatgtctgacttttccgaagatgaggcccaggatatggagttgtagtagaaaaagcacctgcttttcagaaagactattatttcctaaccatgagaagcagactataatattcatatttaaacaaagcaattttttttattactaaacaaggtttttatgaataatagcattgatatatatatattatatatcaccctttagatcttgatttcttggtcatttctcaacctgaggtgcatagcatattcccacattccatttggtagcaatatgcggtctgaatgcatgcattcatgagtccatgtggccaagtcagcctgtgtgctactgaactgtcgaaggaaatagccgctctgataggtagatgtgagtaaaaagaacaggaaaaaattgcttcttttattggtttccaaagaaacaaaccaaaccaaccagctcttggatgtgaagataaaatagtgcttttttgaaatggagaggaaaaacttggggaggaagaggcctgctgtgggggcatcggagccagccatgtaagaatcagagctgctccttcctgtgaatcctaggtggccctatgtcttctgtggagttacagtataaagcagggagctaattaagagtattaaaacttaaaaccattttttgactctgattttaagtacatttttatatgtcagttgctgcccttcacactaccaggccctgcagccacagtgttctgttggagaaacttggggaagtgttttctgaaccagttctttttcttggggtagagcgtgaaatccagacctgtttttgaaaggacagcacaggaggagaaaagtgactgggacgatgcttcctctcatccaaaacacatgcagagtcacatcctcatcctagtgtttggcagtttgagaccgctaccctgaacttaagagctttaaatatgagggttgtgtttctgggggggttatttttttggtgtgtgtgtgtgtgtattgtgcttagaaaggttgcagatttcatcttcacctaccaagaggcggccgcctccttggacaagccgctcatggaccattagacttgagaagacgacccacgtggtgactgcaaagccctgggtacttgccttcatgttctggtttggttttccctttttctgctgctcttggcagcagcctggtcatcatctgcttgtgggagtgggaaatgggtattttagacccaacacaggttctaaatttaaaacaaataataattggaacaaataaaggttcttgtacccagagtgattctacatgggaaaaacaaaccagcttttttcagagagtgaccgaataggaagaagggattcagaaatatgatgtagtagaacatgccctgcaggaagaaaatgttttctctcctgcgtatgttaagaggaaatcagtttaaaatgcctgctaatcaaatgtcgactcagctaaccatatgtccaggttgctgcagagtttctttcaaatctgagtgttgcctgctgaactcggaggggagtttggagaaattttagacagcagctctgtgttctttttttgccgcagccaataagataatagcagaattagccaatcctaaaaccttctaaagacgatttttgagcatcccactgggattatttaatttttctttttgacgtgtgtttttagtttagaagtgctgtattccacaaggtttaagtcagtgaggttggaagataccctatcttttttattcaaaaagcacaatcaatcttttgtttgaaaatctatataaagtacaacttgcttttagcatgattattttcctaaataaaaagacaaagaatttacttactttatgttaattacgggcatgaagcaaaaggttttctttaaaaaaaaaaaaaagtgcagtgatgtagggctgtggttagttaaccgtactgagttatccatctagcatctgtggcttgctggaagggtagtattaactatttaacatgtaatggtgtacttcactcttacctagcacgctgtcttctcattgctttgggggagggagggtctctctgctggcactgtctaacttgcttacctgctgactttgcagtttgcttgtgctatgacatttattgtaggtgctatttagggtaggcttaaagtgctgggtggtgatttgagttcaaacaataaaaaattgtattttttcaatattgtataaacaatagtgttctaattaccttaaaaaaaaataatgaccagttaagaattgcttttgatcttgtcaaaaaactgaatagaccccagtttcgggaagggcaagtgtgagcctcgctcagttcctgagttgtacgtccagtgactagcaggtgagaagagaggcagcgaggacttcttacaancctgagccctccctagaccctaggatcctct

SEQ ID NO: 300230 - DNA, 3112 bp, Homo sapiens
cgcccagagcgaggctggggtagggaggccgactgagcaggagtcgtccgcttatagtggaggctgctaggagccggtcagagggtgagtggggagcaggcgagcgagccacagcaggcaggagggagcgtcgcgcggcgcagaggagcgccggggcagggccgcggcggaaccacagccggagaggggcagcccgagccgggcgccgcagggtccccacccccacccggccggacagtgcccggtgttcccccgtgcggggggcggcggcggcggctgacgggaccgccgggaccgcgggggtgttgccacctccaccgaggagccggcgcggccgcgggctcctcagagccggggccccgggcccgtgacagacgggccgaggaagggagagaggcggcggcgacaccatgtcatctcccagtccgggcaagaggcggatggacacggacgtggtcaagctcatcgagagtaaacatgaggttacgatcctgggaggacttaatgaatttgtagtgaagttttatggaccacaaggaacaccatatgaaggcggagtatggaaagttagagtggacctacctgataaataccctttcaaatctccatctataggattcatgaataaaattttccatcccaacattgatgaagcgtcaggaactgtgtgtctagatgtaattaatcaaacttggacagctctctatgatcttaccaatatatttgagtccttcctgcctcagttattggcctatcctaaccccatagatcctctcaatggtgacgctgcagccatgtacctccaccgaccagaagaatacaagcagaaaattaaagagtacatccagaaatacgccacggaggaggcgctgaaagaacaggaagagggtaccggggacagctcatcggagagctctatgtctgacttttccgaagatgaggcccaggatatggagttgtagtagaaaaagcacctgcttttcagaaagactattatttcctaaccatgagaagcagactataatattcatatttaaacaaagcaattttttttattactaaacaaggtttttatgaataatagcattgatatatatatattatatatcaccctttagatcttgatttcttggtcatttctcaacctgaggtgcatagcatattcccacattccatttggtagcaatatgcggtctgaatgcatgcattcatgagtccatgtggccaagtcagcctgtgtgctactgaactgtcgaaggaaatagccgctctgataggtagatgtgagtaaaaagaacaggaaaaaattgcttcttttattggtttccaaagaaacaaaccaaaccaaccagctcttggatgtgaagataaaatagtgcttttttgaaatggagaggaaaaacttggggaggaagaggcctgctgtgggggcatcggagccagccatgtaagaatcagagctgctccttcctgtgaatcctaggtggccctatgtcttctgtggagttacagtataaagcagggagctaattaagagtattaaaacttaaaaccattttttgactctgattttaagtacatttttatatgtcagttgctgcccttcacactaccaggccctgcagccacagtgttctgttggagaaacttggggaagtgttttctgaaccagttctttttcttggggtagagcgtgaaatccagacctgtttttgaaaggacagcacaggaggagaaaagtgactgggacgatgcttcctctcatccaaaacacatgcagagtcacatcctcatcctagtgtttggcagtttgagaccgctaccctgaacttaagagctttaaatatgagggttgtgtttctgggggggttatttttttggtgtgtgtgtgtgtgtattgtgcttagaaaggttgcagatttcatcttcacctaccaagaggcggccgcctccttggacaagccgctcatggaccattagacttgagaagacgacccacgtggtgactgcaaagccctgggtacttgccttcatgttctggtttggttttccctttttctgctgctcttggcagcagcctggtcatcatctgcttgtgggagtgggaaatgggtattttagacccaacacaggttctaaatttaaaacaaataataattggaacaaataaaggttcttgtacccagagtgattctacatgggaaaaacaaaccagcttttttcagagagtgaccgaataggaagaagggattcagaaatatgatgtagtagaacatgccctgcaggaagaaaatgttttctctcctgcgtatgttaagaggaaatcagtttaaaatgcctgctaatcaaatgtcgactcagctaaccatatgtccaggttgctgcagagtttctttcaaatctgagtgttgcctgctgaactcggaggggagtttggagaaattttagacagcagctctgtgttctttttttgccgcagccaataagataatagcagaattagccaatcctaaaaccttctaaagacgatttttgagcatcccactgggattatttaatttttctttttgacgtgtgtttttagtttagaagtgctgtattccacaaggtttaagtcagtgaggttggaagataccctatcttttttattcaaaaagcacaatcaatcttttgtttgaaaatctatataaagtacaacttgcttttagcatgattattttcctaaataaaaagacaaagaatttacttactttatgttaattacgggcatgaagcaaaaggttttctttaaaaaaaaaaaaaagtgcagtgatgtagggctgtggttagttaaccgtactgagttatccatctagcatctgtggcttgctggaagggtagtattaactatttaacatgtaatggtgtacttcactcttacctagcacgctgtcttctcattgctttgggggagggagggtctctctgctggcactgtctaacttgcttacctgctgactttgcagtttgcttgtgctatgacatttattgtaggtgctatttagggtaggcttaaagtgctgggtggtgatttgagttcaaacaataaaaaattgtattttttcaatattgt

SEQ ID NO: 300231 - DNA, 3122 bp, Homo sapiens
cgcccagagcgaggctggggtagggaggccgactgagcaggagtcgtccgcttatagtggaggctgctaggagccggtcagagggtgagtggggagcaggcgagcgagccacagcaggcaggagggagcgtcgcgcggcgcagaggagcgccggggcagggccgcggcggaaccacagccggagaggggcagcccgagccgggcgccgcagggtccccacccccacccggccggacagtgcccggtgttcccccgtgcggggggcggcggcggcggctgacgggaccgccgggaccgcgggggtgttgccacctccaccgaggagccggcgcggccgcgggctcctcagagccggggccccgggcccgtgacagacgggccgaggaagggagagaggcggcggcgacaccatgtcatctcccagtccgggcaagaggcggatggacacggacgtggtcaagctcatcgagagtaaacatgaggttacgatcctgggaggacttaatgaatttgtagtgaagttttatggaccacaaggaacaccatatgaaggcggagtatggaaagttagagtggacctacctgataaataccctttcaaatctccatctataggattcatgaataaaattttccatcccaacattgatgaagcgtcaggaactgtgtgtctagatgtaattaatcaaacttggacagctctctatgatcttaccaatatatttgagtccttcctgcctcagttattggcctatcctaaccccatagatcctctcaatggtgacgctgcagccatgtacctccaccgaccagaagaatacaagcagaaaattaaagagtacatccagaaatacgccacggaggaggcgctgaaagaacaggaagagggtaccggggacagctcatcggagagctctatgtctgacttttccgaagatgaggcccaggatatggagttgtagtagaaaaagcacctgcttttcagaaagactattatttcctaaccatgagaagcagactataatattcatatttaaacaaagcaattttttttattactaaacaaggtttttatgaataatagcattgatatatatatattatatatcaccctttagatcttgatttcttggtcatttctcaacctgaggtgcatagcatattcccacattccatttggtagcaatatgcggtctgaatgcatgcattcatgagtccatgtggccaagtcagcctgtgtgctactgaactgtcgaaggaaatagccgctctgataggtagatgtgagtaaaaagaacaggaaaaaattgcttcttttattggtttccaaagaaacaaaccaaaccaaccagctcttggatgtgaagataaaatagtgcttttttgaaatggagaggaaaaacttggggaggaagaggcctgctgtgggggcatcggagccagccatgtaagaatcagagctgctccttcctgtgaatcctaggtggccctatgtcttctgtggagttacagtataaagcagggagctaattaagagtattaaaacttaaaaccattttttgactctgattttaagtacatttttatatgtcagttgctgcccttcacactaccaggccctgcagccacagtgttctgttggagaaacttggggaagtgttttctgaaccagttctttttcttggggtagagcgtgaaatccagacctgtttttgaaaggacagcacaggaggagaaaagtgactgggacgatgcttcctctcatccaaaacacatgcagagtcacatcctcatcctagtgtttggcagtttgagaccgctaccctgaacttaagagctttaaatatgagggttgtgtttctgggggggttatttttttggtgtgtgtgtgtgtgtattgtgcttagaaaggttgcagatttcatcttcacctaccaagaggcggccgcctccttggacaagccgctcatggaccattagacttgagaagacgacccacgtggtgactgcaaagccctgggtacttgccttcatgttctggtttggttttccctttttctgctgctcttggcagcagcctggtcatcatctgcttgtgggagtgggaaatgggtattttagacccaacacaggttctaaatttaaaacaaataataattggaacaaataaaggttcttgtacccagagtgattctacatgggaaaaacaaaccagcttttttcagagagtgaccgaataggaagaagggattcagaaatatgatgtagtagaacatgccctgcaggaagaaaatgttttctctcctgcgtatgttaagaggaaatcagtttaaaatgcctgctaatcaaatgtcgactcagctaaccatatgtccaggttgctgcagagtttctttcaaatctgagtgttgcctgctgaactcggaggggagtttggagaaattttagacagcagctctgtgttctttttttgccgcagccaataagataatagcagaattagccaatcctaaaaccttctaaagacgatttttgagcatcccactgggattatttaatttttctttttgacgtgtgtttttagtttagaagtgctgtattccacaaggtttaagtcagtgaggttggaagataccctatcttttttattcaaaaagcacaatcaatcttttgtttgaaaatctatataaagtacaacttgcttttagcatgattattttcctaaataaaaagacaaagaatttacttactttatgttaattacgggcatgaagcaaaaggttttctttaaaaaaaaaaaaaagtgcagtgatgtagggctgtggttagttaaccgtactgagttatccatctagcatctgtggcttgctggaagggtagtattaactatttaacatgtaatggtgtacttcactcttacctagcacgctgtcttctcattgctttgggggagggagggttctttattgttcacttttcttaacttgtgtaaccttggtgatcttatgcattcttgtttatgctcattttaatctttttcatattgtttcggttccatattatttattgtgtatataactttcataaatgtgtgcttaacgtcaaggaatgcagttaataca

SEQ ID NO: 300232 - DNA, 2178 bp, Homo sapiens
cgcccagagcgaggctggggtagggaggccgactgagcaggagtcgtccgcttatagtggaggctgctaggagccggtcagagggtgagtggggagcaggcgagcgagccacagcaggcaggagggagcgtcgcgcggcgcagaggagcgccggggcagggccgcggcggaaccacagccggagaggggcagcccgagccgggcgccgcagggtccccacccccacccggccggacagtgcccggtgttcccccgtgcggggggcggcggcggcggctgacgggaccgccgggaccgcgggggtgttgccacctccaccgaggagccggcgcggccgcgggctcctcagagccggggccccgggcccgtgacagacgggccgaggaagggagagaggcggcggcgacaccatgtcatctcccagtccgggcaagaggcggatggacacggacgtggtcaagctcatcgagagtaaacatgaggttacgatcctgggaggacttaatgaatttgtagtgaagttttatggaccacaaggaacaccatatgaaggcggagtatggaaagttagagtggacctacctgataaataccctttcaaatctccatctataggattcatgaataaaattttccatcccaacattgatgaagcgtcaggaactgtgtgtctagatgtaattaatcaaacttggacagctctctatgatcttaccaatatatttgagtccttcctgcctcagttattggcctatcctaaccccatagatcctctcaatggtgacgctgcagccatgtacctccaccgaccagaagaatacaagcagaaaattaaagagtacatccagaaatacgccacggaggaggcgctgaaagaacaggaagagggtaccggggacagctcatcggagagctctatgtctgacttttccgaagatgaggcccaggatatggagttgtagtagaaaaagcacctgcttttcagaaagactattatttcctaaccatgagaagcagactataatattcatatttaaacaaagcaattttttttattactaaacaaggtttttatgaataatagcattgatatatatatattatatatcaccctttagatcttgatttcttggtcatttctcaacctgaggtgcatagcatattcccacattccatttggtagcaatatgcggtctgaatgcatgcattcatgagtccatgtggccaagtcagcctgtgtgctactgaactgtcgaaggaaatagccgctctgataggtagatgtgagtaaaaagaacaggaaaaaattgcttcttttattggtttccaaagaaacaaaccaaaccaaccagctcttggatgtgaagataaaatagtgcttttttgaaatggagaggaaaaacttggggaggaagaggcctgctgtgggggcatcggagccagccatgtaagaatcagagctgctccttcctgtgaatcctaggtggccctatgtcttctgtggagttacagtataaagcagggagctaattaagagtattaaaacttaaaaccattttttgactctgattttaagtacatttttatatgtcagttgctgcccttcacactaccaggccctgcagccacagtgttctgttggagaaacttggggaagtgttttctgaaccagttctttttcttggggtagagcgtgaaatccagacctgtttttgaaaggacagcacaggaggagaaaagtgactgggacgatgcttcctctcatccaaaacacatgcagagtcacatcctcatcctagtgtttggcagtttgagaccgctaccctgaacttaagagctttaaatatgagggttgtgtttctgggggggttatttttttggtgtgtgtgtgtgtgtattgtgcttagaaaggttgcagatttcatcttcacctaccaagaggcggccgcctccttggacaagccgctcatggaccattagacttgagaagacgacccacgtggtgactgcaaagccctgggtacttgccttcatgttctggtttggttttccctttttctgctgctcttggcagcagcctggttatatatgtatgacgagagccgagtaatggtataattaagacaccagtcccggtactgaaataaacaacagagtgtcgcctcgtaatacgttcgt

SEQ ID NO: 300233 - DNA, 1206 bp, Homo sapiens
cgcccagagcgaggctggggtagggaggccgactgagcaggagtcgtccgcttatagtggaggctgctaggagccggtcagagggtgagtggggagcaggcgagcgagccacagcaggcaggagggagcgtcgcgcggcgcagaggagcgccggggcagggccgcggcggaaccacagccggagaggggcagcccgagccgggcgccgcagggtccccacccccacccggccggacagtgcccggtgttcccccgtgcggggggcggcggcggcggctgacgggaccgccgggaccgcgggggtgttgccacctccaccgaggagccggcgcggccgcgggctcctcagagccggggccccgggcccgtgacagacgggccgaggaagggagagaggcggcggcgacaccatgtcatctcccagtccgggcaagaggcggatggacacggacgtggtcaagctcatcgagagtaaacatgaggttacgatcctgggaggacttaatgaatttgtagtgaagttttatggaccacaaggaacaccatatgaaggcggagtatggaaagttagagtggacctacctgataaataccctttcaaatctccatctataggattcatgaataaaattttccatcccaacattgatgaagcgtcaggaactgtgtgtctagatgtaattaatcaaacttggacagctctctatgatcttaccaatatatttgagtccttcctgcctcagttattggcctatcctaaccccatagatcctctcaatggtgacgctgcagccatgtacctccaccgaccagaagaatacaagcagaaaattaaagagtacatccagaaatacgccacggaggaggcgctgaaagaacaggaagagggtaccggggacagctcatcggagagctctatgtctgacttttccgaagatgaggcccaggatatggagttgtagtagaaaaagcacctgcttttcagaaagactattatttcctaaccatgagaagcagactataatattcatatttaaacaaagcaattttttttattactaaacaaggtttttatgaataatagcattgatatatatatattatatatcaccctttagatcttgatttcttggtcatttctcaacctgaggtgcatgtgtataatgaaaactgtaaacttttttaaataaacgtgtatataccttg

SEQ ID NO: 300234 - DNA, 596 bp, Homo sapiens
  misc_feature (86)..(86): n is a, c, g, or t
aacactagttcccagagacttggtgtccagaaacttgacccacagaggctagcggaggatctgtctttcatgattctcagccatcncaacgggaggcctaacataaagcatgtgccaggccaatgccaactaggacttctgaatccatgtttgtgctttctctggcccgtgaacacctcggcgattctgttagggatgggatgagtgggaggaagccctttgagaagggggagccggccctgtcatgcgcaggttttccactcatctgaggaagagccagggctctgaatttagcctaacactcatcttggctgtgggcttgggaagaaatggccattatttacagattgtatttggtacatattgtgtgatacttgaaaagataaaagggactgccagcccctaactgaaatctgaagctttttatcgcttatttttcctcgccctgtctcctcccttccacctttctccttgcattgtgatgatctagtaggcacgtctgtcaacaggacacatgcctcctctgactataacctcttaatagttgtgtataatgaaaactgtaaacttttttaaataaacgtgtatataccttg

SEQ ID NO: 300235 - DNA, 498 bp, Homo sapiens
aggcgttgaatggcccggaggcgttgaatggcccggaggcgttgaatggcccggaggcgttgaatggcccgtgaacacctcggcgattctgttagggatgggatgagtgggaggaagccctttgagaagggggagccggccctgtcatgcgcaggttttccactcatctgaggaagagccagggctctgaatttagcctaacactcatcttggctgtgggcttgggaagaaatggccattatttacagattgtatttggtacatattgtgtgatacttgaaaagataaaagggactgccagcccctaactgaaatctgaagctttttatcgcttatttttcctcgccctgtctcctcccttccacctttctccttgcattgtgatgatctagtaggcacgtctgtcaacaggacacatgcctcctctgactataacctcttaatagttgtgtataatgaaaactgtaaacttttttaaataaacgtgtatataccttg

SEQ ID NO: 300236 - DNA, 913 bp, Homo sapiens
cgcccagagcgaggctggggtagggaggccgactgagcaggagtcgtccgcttatagtggaggctgctaggagccggtcagagggtgagtggggagcaggcgagcgagccacagcaggcaggagggagcgtcgcgcggcgcagaggagcgccggggcagggccgcggcggaaccacagccggagaggggcagcccgagccgggcgccgcagggtccccacccccacccggccggacagtgcccggtgttcccccgtgcggggggcggcggcggcggctgacgggaccgccgggaccgcgggggtgttgccacctccaccgaggagccggcgcggccgcgggctcctcagagccggggccccgggcccgtgacagacgggccgaggaagggagagaggcggcggcgacaccatgtcatctcccagtccgggcaagaggcggatggacacggacgtggtcaagctcatcgagagtaaacatgaggttacgatcctgggaggacttaatgaatttgtagtgaagttttatggaccacaaggaacaccatatgaaggcggagtatggaaagttagagtggacctacctgataaataccctttcaaatctccatctataggattcatgaataaaattttccatcccaacattgatgaagcgtaagtaactattttaaaatgtttcaattttagcagcaactgctcatgattagtgtttctctgtgttataaaaagcctcggttatctttttggaccttatcaggaggtaggactgtatgaatggtcatgtaaatgatagaatccaaaggatatgaggttctcaatcacttagttcacattctgctgttgtaccacttatttttttccattgtcgtgactgggtccttcatttttcttgttacccagcaaacagtagta

SEQ ID NO: 300237 - DNA, 1057 bp, Homo sapiens
cgcccagagcgaggctggggtagggaggccgactgagcaggagtcgtccgcttatagtggaggctgctaggagccggtcagagggtgagtggggagcaggcgagcgagccacagcaggcaggagggagcgtcgcgcggcgcagaggagcgccggggcagggccgcggcggaaccacagccggagaggggcagcccgagccgggcgccgcagggtccccacccccacccggccggacagtgcccggtgttcccccgtgcggggggcggcggcggcggctgacgggaccgccgggaccgcgggggtgttgccacctccaccgaggagccggcgcggccgcgggctcctcagagccggggccccgggcccgtgacagacgggccgaggaagggagagaggcggcggcgacaccatgtcatctcccagtccgggcaagaggcggatggacacggacgtggtcaagcttggcccctgctgaaggctagagctgcttgttttggaaaagcgtatgcaggcaaaaggccgcaggcaccgctcctcagcgctcattggccgccctgttactacccggaaaaggaggaggggaggagctaccaaacagctgatggacatcgagagtaaacatgaggttacgatcctgggaggacttaatgaatttgtagtgaagttttatggaccacaaggaacaccatatgaaggcggagtatggaaagttagagtggacctacctgataaataccctttcaaatctccatctataggattcatgaataaaattttccatcccaacattgatgaagcgtaagtaactattttaaaatgtttcaattttagcagcaactgctcatgattagtgtttctctgtgttataaaaagcctcggttatctttttggaccttatcaggaggtaggactgtatgaatggtcatgtaaatgatagaatccaaaggatatgaggttctcaatcacttagttcacattctgctgttgtaccacttatttttttccattgtcgtgactgggtccttcatttttcttgttacccagcaaacagtagta

SEQ ID NO: 300238 - DNA, 171 bp, Homo sapiens
acttttttaaataaacgtgtatataccttggcaaatggctggaccttgatcaataagataatagccctcatgattactctcagctggttttctaaaataccctctctgttctggctcctttgagcagcagacgctggcttcttttggctgagcagctcttagaatgcagat

SEQ ID NO: 300239 - DNA, 264 bp, Homo sapiens
ccgccctgttactacccggaaaaggaggaggggaggagctaccaaacagctgatggagtatgtgacaagagagtgtgtttatatacaaaagaggtgggggctggggaggccctctgagtggtgttacaggaacaagtgtgttttcgaggggtaaaaagagaagaggaaaacctgacctgttagagtacaagaaatgtttagaaaaattaaggttaaatcagaaaagtagatcggataataatggggaccggcatacaccatatg

SEQ ID NO: 300240 - DNA, 573 bp, Homo sapiens
gcggccgcgggctcctcagagccggggccccgggcccgtgacagacgggccgaggaagggagagaggcggcggcgacaccatgtcatctcccagtccgggcaagaggcggatggacacggacgtggtcaagctgtatccttcgtggaggggaattcgggctgtgtgtggggggcggtgtggggatgcccagggcacccccggaaccactgcaagggccctggggcactccaggccactgtccgagactcccctcctcccccagtgcctacggcggctccttggcacctcccaggggccgagagccttttcagctcgccttttctccgcagcaccccgaaatacgcgttgctgctcgctcttcctgtatccccagagcctgtgactttcctccgcgacgtttggactcccgagacggccttttttctttttgcacgaccagtcgcctcactctctaccaccgagcccattttcagggtttctctctcctgtttgctcgctttggatttagggaatcaaggcagaaattcccgagagggaagcctttctccgtttcttgagatgcccccatttcc

SEQ ID NO: 300241 - DNA, 695 bp, Homo sapiens
aaccaccttagcctaggcttattttatccctgggatgtagctgctgttttggcctttggtgatcttcacccgtttaccgtagggtggatttaccttgattcacaagtcgtttgtctaacctctccttttgtcaagataattctgacaggtgaaatttctggtgattggcccaaagtatttcatctacccacaaatttgatcattaatatcctctcaaataaagggaacaaagatggaaaaataggtgaagcttggcctcatttatttacatattgaccccaatgtcagaagttactcagaagtgtgtgcaactctgtatagaccccttcctgggactggacacagaggctgaaataaaaaccagtttttcagcatgacttagcacaatgttatttattttcactgcctattagcctatgggtcatgagatttgttattctagagcagttgagtattggagtggaacaagcaaaagcaaggcatatttttctgttgtaatctgtactttttattttttaagatatataataatagttttacattaagtgtgatttggattccttctccagaattataaattacctaattcccttctgctaaaagacgcaggacagagaagggtaagcattttagctggacatttattcctgttgtacgatcctccccatcccctttaacgagtgctagaactacgc

SEQ ID NO: 300242 - DNA, 882 bp, Homo sapiens
ttctcaaccagccaaaggagccattttccaatctcttatcttgttggggtgtgttagaaaaatataccagtgcaagaacctgtaagcctggggttcattaacctgcttaaaaccagttttacttcaaataggtgatctttagtgtcaaccgttgtacttttgtctgcagggaacaactcaagtttcgtcctgtcctcagtaagcagatgagaggtagggttgacgttagaagccaagtttttgtggagcaataaggtaaaattatgaaggaagcctatagaattccaggagagtttaaagaaaacagtagaatactttcttagcaagggtatgggtgggcttctgagtggaggaagcaggctagaccttgggatgttccagtccaaattctgtttcggaagctccctaaatgtatgcagaggttgtgtaattgtattcatcactgttgaatgtattattggtttgatttggtttcactgctcctaagttccttttgtcttatcttgcaagcatatcactgtgagtacttaaatcattaacaactcattaaaactcttgaccattttcattttctaccaagctgaagcctgggtgtggtggaaacttgtgcaggcctgcttggctgtgccgcaactgagcagctcctagcagtttggctgtcaaaaggtcactgaataaacaaattgataggaatggcggacataatctctgcagttccttgaaaagaaggaaggggctgcaggatacaggatagtgaaggatccttctcttcaacctgaaagactcttcagcaattaacaccttgactctctttttatgcaacactttttttttgtcctctcagagactctatttgtacttggtcttttcttctttcaggat

SEQ ID NO: 300243 - DNA, 1112 bp, Homo sapiens
tcccgggttcatgccattctcctgcctcagcctcctgagtagctgggactacaggagccttttagtagagacaggatttcaccatgttagccaggatgctctctatctcctgacctcgtgatccacccgccttggtctcccaaagtgctgggattacaggcatgagataccccacctggcctaaaaacagagatcttatcagattgtcttttggttgaggctcccctttggaaacttcaaagggtattgtgtcttcagcacactctcctatgttttcttggtcctgggtggtagaatggggtgacctaatattcccacagctgccatgtctcttggagggtctagtgagtatcagcccctgagtcactcctcccaggggacagactgaggtaggagaatggggactcccaagagagcagctgaatgccttacgatggaaggagactcctagtatactctgcatctagatagccaacccctcgagatgctcagcttttctttcccagtcccagttttcgtaagttggagacacatggctggtcagccagttggatggtgctattgagggaaaggagaaatgattcctgtcctctggattgtgtcaactgtgaaggaagacaaaaccccaaaagacaaggaaagcccaccccaacggggtggaccagtagcctgcaaatcagaatatgaaattgaggttcacagcggggcatagtgcggtgttggtggaaagtagtcatgagcgcttcggtgagcaggatgggggtggagagatgtctcatgtgatagggtgacctgtgctgacacatgagtcagacatcactgtgttccagccagtattgcccctctgtgggcttgtcccttgtaaagaatagttcatagattgcagcttgagtatttcaaattaactttacgttgcatttttcactagagccaaatccaagaatgattgcatagatcaggtaagacacagaagaggcaactcaacaaagcccatgacatacagtgcatggctcacaatcccaggagatgagggcagcacagctgcagagcaacacagagtggggagaacatccaggatgcacattcaaccagcaggtggggagcaagacaga

SEQ ID NO: 300244 - DNA, 1937 bp, Homo sapiens
ccaaaagtttcatatgaaaaaaattggattataaaccagtaacttaaatattaataaggatattttatgttttaaaaaagtatttacacagaatcataatcagtgaaattgaccatttgaaaactaaaagtttttacctacctgctcaatttattaacatcattgctttggggactgtttgaatataggtacgtgttttcttgtgcattctctataatttcaggaaaagtactaatgcgaattctcttccaaaattgtgatgtttcttgtatttttgatgaaggagaaatactgtaatgatcactgtttacactatgtacactttaggccagccctttgtagcgttatataaaactgaaggtcttttgtgctttcagtttgtataaaaaagctttgagattaaaggaaaaaaaaaatttttacactgtggttataaatttcaagtttcttaaagcttttgtagacttgtaacagagtctttaaattttagttggattttgtaaattgttttgtatattttatttaatgtactcttaacaactgatgtatctggctttaaaacatcagaattggtttgttgttttgtttggtacagaggagcatttggtagtgttcattttaattttattatataggagctgaaacatcaaatatatattttatctatcattatgctacacaatcagtgctataaatttttttatgcaaagaaactttcttaatgttttaatcatgtttcctcagagtgacactttttgttgttgttaataccaagtatgaacactctgcatcattattccatgaaccagttctaatgcaaacctatgtatgtccattagaaatggaagttattttttaatcaacaatgaggcctattataaatttatcagatgaatctagatagctttatagcatataaaatatgttaatttgtgttagcaggtgcacatttcaccactgaaattagaaatattttgacagtctgttctgcataccattctgagtctacttttctgtctttagaagaatcgtaaatttcagtgtcctttatttgactcagtgggatatagctgttataagtaatagggcacagatgtgcagtagagtcttgtttaatggcatttcactgttcattccctttaccaccgttataaaacttttctttattgtaattatcagtgcaaagctatgtatttatcatggtaaaactccagtgttagaatagttttttcttacagtatactttctttggttaggtttgtgtatgtgttgctgattacattagaacttgatgttaagtcatttatcacactctcatgagagcagtaataaaagtgtgtaatctaggagaaaaagttaatttgtcaaacttagataagcatgatgtttaggtcctatttttcaattttataactgttttattgcaacaatatttgtatttaagtctccattttaatgccttgtggtgtttttttatgcatgtcactaagttgtcatcccacataaattgatgtgcagcatagggtattaaatctacataatgattttaaaacagaaatagttgatggtaaaatgtaaatgttttgcaaaaattccttataaaaagttttgtagtaacatttcacttgtaaattttttttgtaaaaaaaaaaaaatgaaaaaaaaagatgaatccagaaaaaaacctgtttcccatattctagaatttagacaattattctgccagcaaagcctctggggctgtaattgacatttttacagtgctgatttgtataaaatttgttttttgtggatttggaaataaaatcatgtacaagttgttgcctgcaataacaattgcaagtaacctattaaaaattcccttgagtttaacatgtttcatttaattatgtatactataaagcagcaataaattatttgaactatcaacctactta

SEQ ID NO: 300245 - DNA, 1677 bp, Homo sapiens
ccaaaagtttcatatgaaaaaaattggattataaaccagtaacttaaatattaataaggatattttatgttttaaaaaagtatttacacagaatcataatcagtgaaattgaccatttgaaaactaaaagtttttacctacctgctcaatttattaacatcattgctttggggactgtttgaatataggtacgtgttttcttgtgcattctctataatttcaggaaaagtactaatgcgaattctcttccaaaattgtgatgtttcttgtatttttgatgaaggagaaatactgtaatgatcactgtttacactatgtacactttaggccagccctttgtagcgttatataaaactgaaggtcttttgtgctttcagtttgtataaaaaagctttgagattaaaggaaaaaaaaaatttttacactgtggttataaatttcaagtttcttaaagcttttgtagacttgtaacagagtctttaaattttagttggattttgtaaattgttttgtatattttatttaatgtactcttaacaactgatgtatctggctttaaaacatcagaattggtttgttgttttgtttggtacagaggagcatttggtagtgttcattttaattttattatataggagctgaaacatcaaatatatattttatctatcattatgctacacaatcagtgctataaatttttttatgcaaagaaactttcttaatgttttaatcatgtttcctcagagtgacactttttgttgttgttaataccaagtatgaacactctgcatcattattccatgaaccagttctaatgcaaacctatgtatgtccattagaaatggaagttattttttaatcaacaatgaggcctattataaatttatcagatgaatctagatagctttatagcatataaaatatgttaatttgtgttagcaggtgcacatttcaccactgaaattagaaatattttgacagtctgttctgcataccattctgagtctacttttctgtctttagaagaatcgtaaatttcagtgtcctttatttgactcagtgggatatagctgttataagtaatagggcacagatgtgcagtagagtcttgtttaatggcatttcactgttcattccctttaccaccgttataaaacttttctttattgtaattatcagtgcaaagctatgtatttatcatggtaaaactccagtgttagaatagttttttcttacagtatactttctttggttaggtttgtgtatgtgttgctgattacattagaacttgatgttaagtcatttatcacactctcatgagagcagtaataaaagtgtgtaatctaggagaaaaagttaatttgtcaaacttagataagcatgatgtttaggtcctatttttcaattttataactgttttattgcaacaatatttgtatttaagtctccattttaatgccttgtggtgtttttttatgcatgtcactaagttgtcatcccacataaattgatgtgcagcatagggtattaaatctacataatgattttaaaacagaaatagttgatggtaaaatgtaaatgttttgcaaaaattccttataaaaagttttgtagtaacatttcacttgtaaattttttttgtaaaagtcgacgcggccgcgaatttagtagtaaaca

SEQ ID NO: 300246 - DNA, 965 bp, Homo sapiens
  misc_feature (32)..(32): n is a, c, g, or t
  misc_feature (904)..(904): n is a, c, g, or t
taggcatagctcgaggccgcgggcgaatcggncgaggctataggctcggggaggtagaattgggctatttgctgaagcttcttggtggcccttgctagcccaggaagaaacttacattttgatttttttgtaccatggctttggttcacaaattgctgcgtggtacttattttctcagaaaattctctaagccaacttctgccttgtatccatttttgggtattcgctttgcagagtattccagtagtcttcagaaaccagtggcttctcctggcaaagcctcctcacagaggaagactgaaggggatttgcaaggagatcaccagaaagaagttgctttggatataacttcttctgaggagaagcctgatgttagtttcgataaagcaattagagatgaagcaatataccattttaggcttttgaaggatgaaattgtggatcattggagaggaccggaaggccaccctctgcatgaggtcttgctggaacaagccaaggttgtctggcaattccgggggaaagaagatttggataagtggacagtgacttctgataagacgattggaggcagaagtgaagtgtttttgaaaatgggcaagaataaccaaagtgcactgctatatggaactctgagctctgaggcgcctcaggacggggagtctacccgaagtgggtactgtgcaatgatatccaggattccaaggggtgcttttgagaggaagatgtcttacgattggtcccagttcaatactctgtatctccgtgtacgtggggatggtcggccttggatggtgaatatcaaggaggacacagatttcttccagaggacgaatcagatgtatagttacttcatgttcacccgcgggggaccctactggcaggaggtcaagttctttccaanttctcttaatcaagagaccggtgcaacgaatcgtgaaagttactgtgaaaagggcaatcga

SEQ ID NO: 300247 - DNA, 451 bp, Homo sapiens
aagaccctgtctcaaaaaaaaaaatttttttttcttaactggttcttcattatgtacatgtagatttagattgttttcagagttttctactgtcggaacaaactctgagattcctttttccaaatttttcttctctaatcgaggaagaatccgggatgttcagcatgagcttccgcttgataagatctcttctataggattcaccttggctgataaagtggatggtccattcttcctggagatagattttattggcgtgtttactgatccagctcatacagaagaatttgcctatgaaaattctccagagcttaacccaaggctttttaaataaagatcatatggtagttttgttttactaatctaagggtactagcatctacaatgatatagacaaaataaaatatttctttaatggcatccaaaaaaaaaatagtatgtattctctctc

SEQ ID NO: 300248 - DNA, 1569 bp, Homo sapiens
tgtttggcatcggaagggaaaagcagatggacctatacgggtaaagtggcttctgggcggaaggtacactataggctcggggaggtaagcggcggcaggccggcggttggtgtgtcccgggtgtggggaggcgacagagccctggcacttgagggttgagggggcctccccagcgcggcgaaccgtctagcctccggaggccaggccgtgagtgcgggaggtatacgccaaggcggaagaattttgccactcactacctgtgtgacctcgggtaaattagccttggaacgtcagtttcttcgtctctataattgaaataataatagtacctctctcaggattgttgtgagccgtcagtgaaacacttagagcagtttctggcacatggtagaattgggctatttgctgaagcttcttggtggcccttgctagcccaggaagaaacttacattttgatttttttgtaccatggctttggttcacaaattgctgcgtggtacttattttctcagaaaattctctaagccaacttctgccttgtatccatttttgggtattcgctttgcagagtattccagtagtcttcagaaaccagtggcttctcctggcaaagcctcctcacagaggaagactgaaggggatttgcaaggagatcaccagaaagaagttgctttggatataacttcttctgaggagaagcctgatgttagtttcgataaagcaattagagatgaagcaatataccattttaggcttttgaaggatgaaattgtggatcattggagaggaccggaaggccaccctctgcatgaggtcttgctggaacaagccaaggttgtctggcaattccgggggaaagaagatttggataagtggacagtgacttctgataagacgattggaggcagaagtgaagtgtttttgaaaatgggcaagaataaccaaagtgcactgctatatggaactctgagctctgaggcgcctcaggacggggagtctacccgaagtgggtactgtgcaatgatatccaggattccaaggggtgcttttgagaggaagatgtcttacgattggtcccagttcaatactctgtatctccgtgtacgtggggatggtcggccttggatggtgaatatcaaggaggacacagatttcttccagaggacgaatcagatgtatagttacttcatgttcacccgcgggggaccctactggcaggaggtcaagattcctttttccaaatttttcttctctaatcgaggaagaatccgggatgttcagcatgagcttccgcttgataagatctcttctataggattcaccttggctgataaagtggatggtccattcttcctggagatagattttattggcgtgtttactgatccagctcatacagaagaatttgcctatgaaaattctccagagcttaacccaaggctttttaaataaagatcatatggtagttttgttttactaatctaagggtactagcatctacaatgatatagacaaaataaaatatttctttaatggcatccaaaaaaaaaatagtatgtattctctctc

SEQ ID NO: 300249 - DNA, 1266 bp, Homo sapiens
tgtttggcatcggaagggaaaagcagatggacctatacgggtaaagtggcttctgggcggaaggtacactataggctcggggaggtagaattgggctatttgctgaagcttcttggtggcccttgctagcccaggaagaaacttacattttgatttttttgtaccatggctttggttcacaaattgctgcgtggtacttattttctcagaaaattctctaagccaacttctgccttgtatccatttttgggtattcgctttgcagagtattccagtagtcttcagaaaccagtggcttctcctggcaaagcctcctcacagaggaagactgaaggggatttgcaaggagatcaccagaaagaagttgctttggatataacttcttctgaggagaagcctgatgttagtttcgataaagcaattagagatgaagcaatataccattttaggcttttgaaggatgaaattgtggatcattggagaggaccggaaggccaccctctgcatgaggtcttgctggaacaagccaaggttgtctggcaattccgggggaaagaagatttggataagtggacagtgacttctgataagacgattggaggcagaagtgaagtgtttttgaaaatgggcaagaataaccaaagtgcactgctatatggaactctgagctctgaggcgcctcaggacggggagtctacccgaagtgggtactgtgcaatgatatccaggattccaaggggtgcttttgagaggaagatgtcttacgattggtcccagttcaatactctgtatctccgtgtacgtggggatggtcggccttggatggtgaatatcaaggaggacacagatttcttccagaggacgaatcagatgtatagttacttcatgttcacccgcgggggaccctactggcaggaggtcaagattcctttttccaaatttttcttctctaatcgaggaagaatccgggatgttcagcatgagcttccgcttgataagatctcttctataggattcaccttggctgataaagtggatggtccattcttcctggagatagattttattggcgtgtttactgatccagctcatacagaagaatttgcctatgaaaattctccagagcttaacccaaggctttttaaataaagatcatatggtagttttgttttactaatctaagggtactagcatctacaatgatatagacaaaataaaatatttctttaatggcatccaaaaaaaaaatagtatgtattctctctc

SEQ ID NO: 300250 - DNA, 1235 bp, Homo sapiens
  misc_feature (32)..(32): n is a, c, g, or t
taggcatagctcgaggccgcgggcgaatcggncgaggctataggctcggggaggtagaattgggctatttgctgaagcttcttggtggcccttgctagcccaggaagaaacttacattttgatttttttgtaccatggctttggttcacaaattgctgcgtggtacttattttctcagaaaattctctaagccaacttctgccttgtatccatttttgggtattcgctttgcagagtattccagtagtcttcagaaaccagtggcttctcctggcaaagcctcctcacagaggaagactgaaggggatttgcaaggagatcaccagaaagaagttgctttggatataacttcttctgaggagaagcctgatgttagtttcgataaagcaattagagatgaagcaatataccattttaggcttttgaaggatgaaattgtggatcattggagaggaccggaaggccaccctctgcatgaggtcttgctggaacaagccaaggttgtctggcaattccgggggaaagaagatttggataagtggacagtgacttctgataagacgattggaggcagaagtgaagtgtttttgaaaatgggcaagaataaccaaagtgcactgctatatggaactctgagctctgaggcgcctcaggacggggagtctacccgaagtgggtactgtgcaatgatatccaggattccaaggggtgcttttgagaggaagatgtcttacgattggtcccagttcaatactctgtatctccgtgtacgtggggatggtcggccttggatggtgaatatcaaggaggacacagatttcttccagaggacgaatcagatgtatagttacttcatgttcacccgcgggggaccctactggcaggaggtcaagattcctttttccaaatttttcttctctaatcgaggaagaatccgggatgttcagcatgagcttccgcttgataagatctcttctataggattcaccttggctgataaagtggatggtccattcttcctggagatagattttattggcgtgtttactgatccagctcatacagaagaatttgcctatgaaaattctccagagcttaacccaaggctttttaaataaagatcatatggtagttttgttttactaatctaagggtactagcatctacaatgatatagacaaaataaaatatttctttaatggcatccaaaaaaaaaatagtatgtattctctctc

SEQ ID NO: 300251 - DNA, 1222 bp, Homo sapiens
tgtttggcatcggaagggaaaagcagatggacctatacgggtagaattgggctatttgctgaagcttcttggtggcccttgctagcccaggaagaaacttacattttgatttttttgtaccatggctttggttcacaaattgctgcgtggtacttattttctcagaaaattctctaagccaacttctgccttgtatccatttttgggtattcgctttgcagagtattccagtagtcttcagaaaccagtggcttctcctggcaaagcctcctcacagaggaagactgaaggggatttgcaaggagatcaccagaaagaagttgctttggatataacttcttctgaggagaagcctgatgttagtttcgataaagcaattagagatgaagcaatataccattttaggcttttgaaggatgaaattgtggatcattggagaggaccggaaggccaccctctgcatgaggtcttgctggaacaagccaaggttgtctggcaattccgggggaaagaagatttggataagtggacagtgacttctgataagacgattggaggcagaagtgaagtgtttttgaaaatgggcaagaataaccaaagtgcactgctatatggaactctgagctctgaggcgcctcaggacggggagtctacccgaagtgggtactgtgcaatgatatccaggattccaaggggtgcttttgagaggaagatgtcttacgattggtcccagttcaatactctgtatctccgtgtacgtggggatggtcggccttggatggtgaatatcaaggaggacacagatttcttccagaggacgaatcagatgtatagttacttcatgttcacccgcgggggaccctactggcaggaggtcaagattcctttttccaaatttttcttctctaatcgaggaagaatccgggatgttcagcatgagcttccgcttgataagatctcttctataggattcaccttggctgataaagtggatggtccattcttcctggagatagattttattggcgtgtttactgatccagctcatacagaagaatttgcctatgaaaattctccagagcttaacccaaggctttttaaataaagatcatatggtagttttgttttactaatctaagggtactagcatctacaatgatatagacaaaataaaatatttctttaatggcatccaaaaaaaaaatagtatgtattctctctc

SEQ ID NO: 300252 - DNA, 1453 bp, Homo sapiens
tgtttggcatcggaagggaaaagcagatggacctatacgggtaaagtggcttctgggcggaaggtacactataggctcggggaggtaagcggcggcaggccggcggttggtgtgtcccgggtgtggggaggcgacagagccctggcacttgagggttgagggggcctccccagcgcggcgaaccgtctagcctccggaggccaggccgtgagtgcgggaggtatacgccaaggcggaagaattttgccactcactacctgtgtgacctcgggtagaattgggctatttgctgaagcttcttggtggcccttgctagcccaggaagaaacttacattttgatttttttgtaccatggctttggttcacaaattgctgcgtggtacttattttctcagaaaattctctaagccaacttctgccttgtatccatttttgggtattcgctttgcagagtattccagtagtcttcagaaaccagtggcttctcctggcaaagcctcctcacagaggaagactgaaggggatttgcaaggagatcaccagaaagaagttgctttggatataacttcttctgaggagaagcctgatgttagtttcgataaagcaattagagatgaagcaatataccattttaggcttttgaaggatgaaattgtggatcattggagaggaccggaaggccaccctctgcatgaggtcttgctggaacaagccaaggttgtctggcaattccgggggaaagaagatttggataagtggacagtgacttctgataagacgattggaggcagaagtgaagtgtttttgaaaatgggcaagaataaccaaagtgcactgctatatggaactctgagctctgaggcgcctcaggacggggagtctacccgaagtgggtactgtgcaatgatatccaggattccaaggggtgcttttgagaggaagatgtcttacgattggtcccagttcaatactctgtatctccgtgtacgtggggatggtcggccttggatggtgaatatcaaggaggacacagatttcttccagaggacgaatcagatgtatagttacttcatgttcacccgcgggggaccctactggcaggaggtcaagattcctttttccaaatttttcttctctaatcgaggaagaatccgggatgttcagcatgagcttccgcttgataagatctcttctataggattcaccttggctgataaagtggatggtccattcttcctggagatagattttattggcgtgtttactgatccagctcatacagaagaatttgcctatgaaaattctccagagcttaacccaaggctttttaaataaagatcatatggtagttttgttttactaatctaagggtactagcatctacaatgatatagacaaaataaaatatttctttaatggcatccaaaaaaaaaatagtatgtattctctctc

SEQ ID NO: 300253 - DNA, 1581 bp, Homo sapiens
  misc_feature (375)..(375): n is a, c, g, or t
  misc_feature (391)..(392): n is a, c, g, or t
  misc_feature (394)..(394): n is a, c, g, or t
  misc_feature (396)..(396): n is a, c, g, or t
tgtttggcatcggaagggaaaagcagatggacctatacgggtaaagtggcttctgggcggaaggtacactataggctcggggaggtaagcggcggcaggccggcggttggtgtgtcccgggtgtggggaggcgacagagccctggcacttgagggttgagggggcctccccagcgcggcgaaccgtctagcctccggaggccaggccgtgagtgcgggaggtatacgccaaggcggaagaattttgccactcactacctgtgtgacctcgggtaaattagccttggaacgtcagtttcttcgtctctataattgaaataataataaataaaaacataaaaaaaaaaaaaaaagaaaaagaaaaaaaaaacaaaanaaaagaaagataatanngnanatggtagaattgggctatttgctgaagcttcttggtggcccttgctagcccaggaagaaacttacattttgatttttttgtaccatggctttggttcacaaattgctgcgtggtacttattttctcagaaaattctctaagccaacttctgccttgtatccatttttgggtattcgctttgcagagtattccagtagtcttcagaaaccagtggcttctcctggcaaagcctcctcacagaggaagactgaaggggatttgcaaggagatcaccagaaagaagttgctttggatataacttcttctgaggagaagcctgatgttagtttcgataaagcaattagagatgaagcaatataccattttaggcttttgaaggatgaaattgtggatcattggagaggaccggaaggccaccctctgcatgaggtcttgctggaacaagccaaggttgtctggcaattccgggggaaagaagatttggataagtggacagtgacttctgataagacgattggaggcagaagtgaagtgtttttgaaaatgggcaagaataaccaaagtgcactgctatatggaactctgagctctgaggcgcctcaggacggggagtctacccgaagtgggtactgtgcaatgatatccaggattccaaggggtgcttttgagaggaagatgtcttacgattggtcccagttcaatactctgtatctccgtgtacgtggggatggtcggccttggatggtgaatatcaaggaggacacagatttcttccagaggacgaatcagatgtatagttacttcatgttcacccgcgggggaccctactggcaggaggtcaagattcctttttccaaatttttcttctctaatcgaggaagaatccgggatgttcagcatgagcttccgcttgataagatctcttctataggattcaccttggctgataaagtggatggtccattcttcctggagatagattttattggcgtgtttactgatccagctcatacagaagaatttgcctatgaaaattctccagagcttaacccaaggctttttaaataaagatcatatggtagttttgttttactaatctaagggtactagcatctacaatgatatagacaaaataaaatatttctttaatggcatccaaaaaaaaaatagtatgtattctctctc

SEQ ID NO: 300254 - DNA, 708 bp, Homo sapiens
ggattacaggcgtgagccaccgcgcctggcacaaaaatactatttttaatatgtatcttctacacttttctagtcacacttttcccttccagtggtgttttataacatatatacagtattttcactgaactattgtttacaactttctcttcaaatatatttctacatcatttttaatgtctgcatgatattatataagtagacaacaattttggctgggtccagtggctcacatctgtaatcctagcactttgggaggctaaggcagtgaatcatttgaagctaggagtctaagacaagcctgagcaacatggcaaaaccctgtctctacaaaaatacaaaaattagcccagtgtggtggcatgtgcctttagtcccacctactcaggaggctgaggtgggaggattgcttgagcctgggaggtcaaggctgcagtgagctgagatcaccctactgcatgcacttcagcctgggtgacagagtaagaccctgtctcaaaaaaaaaaatttttttttcttaactggttcttcattatgtacatgtagatttagattgttttcagagttttctactgtcggaacaaactctgaggtaaacatccttaactattttcataggctatattcctagagataaaattactggaataactattaatatgtataattcatttttatttatgttcattaaaatttatttacttatt

SEQ ID NO: 300255 - DNA, 338 bp, Homo sapiens
cccagttataatcatcacctgatgggattttaaactcctggaataatctcagtacgtcactgtatgagattttaatcaatttctgtattttaaatttagatctcttctataggattcaccttggctgataaagtggatggtccattcttcctggagatagattttattggcgtgtttactgatccagctcatacagaagaatttgcctatgaaaattctccagagcttaacccaaggctttttaaataaagatcatatggtagttttgttttactaatctaagggtactagcatctacaatgatatagacaaaataaaatatttctttaatggcatcc

SEQ ID NO: 300256 - DNA, 344 bp, Homo sapiens
aaacaaataagttaacaaacttcaaaatacctgatttctgttgaatttgaaattgtgatgcattcattgctatgctgataattcttcaatgtctcttctgttataggtagaattgggctatttgctgaagcttcttggtggcccttgctagcccaggaagaaacttacattttgatttttttgtaccatggctttggttcacaaattgctgcgtggtacttattttctcagaaaattctctaagccaacttctgccttgtatccatttttgggtattcgctttgcagagtattccagtagtcttcagaaaccagtggcttctcctggcaaagcctcctcacaga

SEQ ID NO: 300257 - DNA, 2392 bp, Homo sapiens
atgcaaaaattagctgggtgtggtggcagcttcctgtaatcccagttactcaggaggctgaggcaggagaatcacttgaacccgtgaggcagaggctgcagtaagctgagatcgcaccgctgcacattccagcctgagtgacagagcaagactccatctagaaagaaagaaagaaaaagaaagaaagaaagaaagaaaggaaggaagggggagagagagagagacagagagagagagaaagaaagaaaggaaggaaggaaggaaggaaggagaggaaggaaggaaggaaggaaggaagaagagagagagagaaagaaagaaagagagaaagaaagaaggaaaagaaagaaggattccctagaagctcaatacatagaatagatgaaagggactagctgcctggggctgggggctcagctcagcatctcatccctctactactcttgacagtatacctcaatcctggggcatcataaagcatcacttgaaaagtagcaactcaacactctcacaggacaagggaaaggctcagagagggcaagcaatctgctcaaggtcacacattaagtttggatgaatgcatggctccctgcccagcactccatgccctgcaggaggggcaatgcccatctatctgtcaaccaggctgcagacctgacccacatgtccaggagcctgtatgctggccccctctacccttgagtgcccaggaggggatctcatacactctcaggctaacagagaggctgggctttatgctaagaccagaagaggatggaggtgtcctagtgtacattttaaggtcattttaagatatcatggaaagaagccagatttgaggcctgtcaatgctggggcaagttttaattccattctttattaagtcactagaccactctttctgctgtttttgtttttgtctttaatgaacatagtcatatgtgccttcctgggtgttctcatggaaggattggcaagaggaggtgttgagggctgtgcacaccctgcagtctccgtggctcaccaccacactgacgcaaggggctcagtgacccagacgtgtcagtacagtgagtgggcgtcttatgaagagctgtctggcatacggaggcgggcagcagaagccattcctgacgtggctttgatagttcatggaaataaaaagagcccatttctttctttctagatagactttctgtacacagaggcccccaacacagggatggtgaggtggggcaccacccagtcagactgtggctctgttggaccagaacaaatttgctgacaaaaccaggctataaatggggtttggcctaggccaggtcctggatacctctagatcatataagcaggctggcctagcaaacattggcaatgaagaaagagtggtaaagacaattattttaatcctagccattacatagaatggggaaacagtgactaggaaacaggccttttcttttcatttcaagtgtggatacttgagaaaggcaggtttcatcacagaaggtggaggtagatggaaactttcatgaacatcctaaaggtcacccaggcttctaggcacagggactataaagtccgtgatttctttattgcatcgtatttcccagcaagagttacttttcctttttattcgtacatgtgaatcacagcattactcataaacttatcaagcaagatgggaatcagcatttcacctgacacagcatttgccagtgacctgatctgggatctcccctcactgtcagtcacttgtccagggacatggaccccagaaccccacactctacagctcccaggcatttggtctaatggggcttggtctctctaaagagatctccatgatgtttttaatttgctattaatgtgctcctccttagctcctgttccctccttagctcctcaggaaagccaattgccttagggtgggtcacaattcgacggtcatttgtgtgactgagtggtgagtgaccgtctcccctactggactataagtgccttgagagcagccagcaggtttgtttctactctcggctggggctcagtagatgctccatagggaaataaaagggaacagttagaaacagaagaaaaaggccaggtgtggtggctcatgcctataatcccagcactttaggaggctgaggcaggcggatcatttgaggtcaggagttcaagaccagcccggccaacatggcaaaaatctcatcttgactaaaaatacaaaaatcagctgggcgtggtggcaggtgctgaaatcccagctacttgggaggctgaggcaggagaaatgcttgaacccaggagatggaggttgcagtgagccgagattgtgccactgaacttcagtctgggtgacagagcaaggctccagctccaaaaaaaaaaa

SEQ ID NO: 300258 - DNA, 3887 bp, Homo sapiens
  misc_feature (2555)..(2555): n is a, c, g, or t
gattacaggtgtaaatcaccacacctgggctgctttattttatagcacgtgaccctggaacgcaaaccctgatgcctgttccccaccacccgagcgctcctttctctgatatttggccccaagccgatgcatcacaggatgaatgaaatgaacctgagtccagtggggatggagcagctgacttcatcctctgtgagcaatgccttgccagtctcaggaagtcacctgggattggctgcctcacccactcacagtgccatccctgccccaggcctcccagtggcaattccaaacctgggtccctccctgagctctctgccttctgctctgtctttaatgctaccaatgggtattggggatcgaggggtgatgtgtgggttacctgaaagaaactacaccctacctccaccaccttaccctcacctggagagcagttatttcagaaccattctacctggcattttatcttatttagctgacagaccacctccacagtacatccaccctaactctataaatgttgatggtaatacagcattatctatcaccaataacccttcagcactagatccctatcagtccaatggaaatgttggattagaaccaggcattgtttcaatagactctcgctctgtgaacacacatggtgcccaaagtcttcatcccagtgatggccatgaggtggccttggacacagcaatcactatggagaacgtttctagggttaccagcccaatttcgacagatggaatggcagaggagcttacgatggacggtgttgcaggcgagcattcccaaatcccaaatggctccagaagtcatgaacctctgtctgtggattctgtgagcaacaaccttgcagcagacgctgtaggacatggtggtgtgatacccatgcatgggaatggcctggagctccctgtggtcatggagacagaccacattgcaagtcgggtcaatggcatgtctgacagtgccctcagtgactccattcacactgtggccatgagcaccaactctgtaagcgtggcactctctacctcacacaaccttgcctccctagaatctgtttccctccatgaagttggcctcagcctagaacctgtggctgtctcctccatcacccaggaggttgctatggggacaggtcatgtagatgtatcttcagacagtctttcttttgtatcaccttcactgcaaatggaagactccaattcaaacaaggagaacatggcaaccttgtttacaatttggtgtactctgtgtgaccgcgcctatccctcggactgtcccgaacatggaccagtgacttttgttcctgacactccaatagagagcagagcaaggctttctctcccaaagcagcttgttctccgtcagtcaattgtgggagcagaagttggtgtatggactggagaaaccattcctgtgcggacttgctttggacctctaattggccagcagagtcactccatggaagtagcagaatggacagacaaggcagttaaccatatctggaagatataccacaatggtgtcctagaattctgcatcattacaactgatgaaaatgaatgtaattggatgatgtttgtgcgcaaagccaggaaccgggaagagcagaatttggtggcttatcctcatgatggaaaaatctttttctgcacctcacaagatatccctcctgaaaatgaactgcttttttattatagccgagattatgctcaacagattggtgttcctgaacacccagatgtgcatctctgtaactgtggcaaggagtgcaattcttacacagagttcaaagcccatctgaccagccacatccataaccatcttcctacccagggacatagcggcagccatgggccaagtcacagcaaagaaaggaagtggaagtgctcaatgtgcccccaagcttttatctctccttccaaacttcatgtccactttatgggtcacatgggtatgaagccccacaagtgtgatttctgtagcaaggcttttagtgatcccagcaacctgcggacccacctcaagatacatacaggtcagaagaactacaggtgtaccttgtgtgacaagtctttcacccagaaggctcacctgggagtcccacatggttatccacactggggagaagaatcttaagtgtgattactgtgacaagttgtttatgcggaggcaggacctcaagcagcacgtgctcatccacactcaagaacgccagatcaagtgtcccaagtgtgataagctgttcttgagaacaaatcacttaaagaagcatctcaattctcatgaaggaaaacgggattatgtctgtgaaaaatgtacaaaggcttatctaaccaaataccatctcacccgccacctgaaaacctgcaaagggcccacctccagttcgtcagcaccagaggaggaagaagaggatgactcagaagaggaagatctagcagactctgtggggacagaagactgtaggattaacagtgctgtgtattcagcggatgagtctctttctgcacataaataaaaggaaaagaaacaagcaattntggatgaaaatgcaaatggaaaaatacacataaccagttatctactataatggtttttatataaaatggttcctgatttattttcagccagtaatcaaaacagactgggaatgaataaagcacttacagaagagtatcctaatgaaaacactttaaaacagattgggaaaactgagcatgtgtcctgttttaagtggtggactgggagggaagtgtcaacttctgaggtctttatttacatgataatctgggagatgcatttatgcctgaatcaaagctgccttctgctcaaacaaatcagatttatttcacattcttccattattccattttcctgctggtcctgtgacttggtaacattctaaacggtccttgccccatagccatcctgattgctgatagtgttttatgcagactcttgtgacttatactcaccacagaatggattgggacacagcagcataagtgtgctacttggcagctagtaagtttaaagcaggacctgccttaactgctcctggccacttggaagtttagggtagatcttgttttccaaagtttcggcaggtgcctggagggcaaataaaaaagcagcagtcagtcagtagtcagtgatggagagaacaagaggagagatgcctggcctctgcccaagaaattagctttgatggaagcctgagcaagtcacctggttattgtaacgtggagatctttgtaggtttagacatggctccctgtctccagtaaacatccagccattcagacaaagggggcctggagatacagagagcccaaataatgcctgctggattgtctcctgatgagtacatgtggactcacctgaggaagggaaggaagggaataatcttttatgtttcatttaccttatgaaaagtgttaaaacattgccaactcaaaataacattatttaatgcatgtgcaaagttaggtcttcccagttgtctcagtgctgaggaacctcatcagagaagcatggaagatgccaaaggatttttggaaggtaaagaaggctgaatagtgaccacatgggcctgttttcagggtcccagcttagttaagtcacccatgcacctggtcattgtgtctcccatgcacatccagcgtttctcagaagcagacccacccttaagttgacaggattgatggaacatgctctcctgctcaaggcacaacctctgggctggagtagaggactctggtgggaaggttttgctgctaatgtatttatggaatgaatgtatttcattcaaatctgtattcctctaggaaggattaaaattaaacttttttaaaatacaggaaaaacctctg

SEQ ID NO: 300259 - DNA, 411 bp, Homo sapiens
atgttcaatggggaaaaaagtcttaacaaatggggctgggcgcggtggctcatgcctataatcccagcactttgcaaggcagaggcaggcagatcacttgaggtccggagtttgagacaagcctggcctacatggtgaaaccctgtctctattaaaaatacaaaaattagccaggcatggtggcatgcaccagtaatcccagctactcaggaggctgaggcaggagaatcacttgaaccccagaggtggggggtgcagtgagctgagatcacaccactcactctagcctgggtgacagagtaagaccctgtctcacacaaaacaaaaacaaatggttcagggacaaatgaatcatcctcatgaaaaagaatgaagttggacccctacctcacaccatacacacaaaaaaaa

SEQ ID NO: 300260 - DNA, 306 bp, Homo sapiens
gattacaggtgtaaatcaccacacctgggctgctttattttatagcacgtgaccctggaacgcaaaccctgatgcctgttccccaccacccgagcgctcctttctctgatatttggccccaagccgatgcatcacaggtgagtagggaggtgggcttcagcactggtgacatcgttggaaactctggcgagtgagtgtccagggtcagtgccgttgtttttggtgccattgagaaggttacaggtgtgatttgcaaaggaaacaaatccagaaactagtgttgggtggaatgtaatctcatgcatc

SEQ ID NO: 300261 - DNA, 4135 bp, Homo sapiens
  misc_feature (2803)..(2803): n is a, c, g, or t
agaagggcgacgcggtgcgcgggcgccgcttgcgggccgcggcggggagggcgcacgcacgaggggcggagcggcgggcgctgagagtggctgaggatccggaaacgcgccgcagagggttgggcagcccccttcccgaagcttctggacggaaggccccaggtgttccccgagatgccccaacccgtggcggggtgcacggccaccggccctcgggagaagttgggcggccccgggcgaccccggggacgagtggccgcgtcggtgcagcggttgtgagcaagatgtggtagcacgtgaccctggaacgcaaaccctgatgcctgttccccaccacccgagcgctcctttctctgatatttggccccaagccgatgcatcacaggatgaatgaaatgaacctgagtccagtggggatggagcagctgacttcatcctctgtgagcaatgccttgccagtctcaggaagtcacctgggattggctgcctcacccactcacagtgccatccctgccccaggcctcccagtggcaattccaaacctgggtccctccctgagctctctgccttctgctctgtctttaatgctaccaatgggtattggggatcgaggggtgatgtgtgggttacctgaaagaaactacaccctacctccaccaccttaccctcacctggagagcagttatttcagaaccattctacctggcattttatcttatttagctgacagaccacctccacagtacatccaccctaactctataaatgttgatggtaatacagcattatctatcaccaataacccttcagcactagatccctatcagtccaatggaaatgttggattagaaccaggcattgtttcaatagactctcgctctgtgaacacacatggtgcccaaagtcttcatcccagtgatggccatgaggtggccttggacacagcaatcactatggagaacgtttctagggttaccagcccaatttcgacagatggaatggcagaggagcttacgatggacggtgttgcaggcgagcattcccaaatcccaaatggctccagaagtcatgaacctctgtctgtggattctgtgagcaacaaccttgcagcagacgctgtaggacatggtggtgtgatacccatgcatgggaatggcctggagctccctgtggtcatggagacagaccacattgcaagtcgggtcaatggcatgtctgacagtgccctcagtgactccattcacactgtggccatgagcaccaactctgtaagcgtggcactctctacctcacacaaccttgcctccctagaatctgtttccctccatgaagttggcctcagcctagaacctgtggctgtctcctccatcacccaggaggttgctatggggacaggtcatgtagatgtatcttcagacagtctttcttttgtatcaccttcactgcaaatggaagactccaattcaaacaaggagaacatggcaaccttgtttacaatttggtgtactctgtgtgaccgcgcctatccctcggactgtcccgaacatggaccagtgacttttgttcctgacactccaatagagagcagagcaaggctttctctcccaaagcagcttgttctccgtcagtcaattgtgggagcagaagttggtgtatggactggagaaaccattcctgtgcggacttgctttggacctctaattggccagcagagtcactccatggaagtagcagaatggacagacaaggcagttaaccatatctggaagatataccacaatggtgtcctagaattctgcatcattacaactgatgaaaatgaatgtaattggatgatgtttgtgcgcaaagccaggaaccgggaagagcagaatttggtggcttatcctcatgatggaaaaatctttttctgcacctcacaagatatccctcctgaaaatgaactgcttttttattatagccgagattatgctcaacagattggtgttcctgaacacccagatgtgcatctctgtaactgtggcaaggagtgcaattcttacacagagttcaaagcccatctgaccagccacatccataaccatcttcctacccagggacatagcggcagccatgggccaagtcacagcaaagaaaggaagtggaagtgctcaatgtgcccccaagcttttatctctccttccaaacttcatgtccactttatgggtcacatgggtatgaagccccacaagtgtgatttctgtagcaaggcttttagtgatcccagcaacctgcggacccacctcaagatacatacaggtcagaagaactacaggtgtaccttgtgtgacaagtctttcacccagaaggctcacctgggagtcccacatggttatccacactggggagaagaatcttaagtgtgattactgtgacaagttgtttatgcggaggcaggacctcaagcagcacgtgctcatccacactcaagaacgccagatcaagtgtcccaagtgtgataagctgttcttgagaacaaatcacttaaagaagcatctcaattctcatgaaggaaaacgggattatgtctgtgaaaaatgtacaaaggcttatctaaccaaataccatctcacccgccacctgaaaacctgcaaagggcccacctccagttcgtcagcaccagaggaggaagaagaggatgactcagaagaggaagatctagcagactctgtggggacagaagactgtaggattaacagtgctgtgtattcagcggatgagtctctttctgcacataaataaaaggaaaagaaacaagcaattntggatgaaaatgcaaatggaaaaatacacataaccagttatctactataatggtttttatataaaatggttcctgatttattttcagccagtaatcaaaacagactgggaatgaataaagcacttacagaagagtatcctaatgaaaacactttaaaacagattgggaaaactgagcatgtgtcctgttttaagtggtggactgggagggaagtgtcaacttctgaggtctttatttacatgataatctgggagatgcatttatgcctgaatcaaagctgccttctgctcaaacaaatcagatttatttcacattcttccattattccattttcctgctggtcctgtgacttggtaacattctaaacggtccttgccccatagccatcctgattgctgatagtgttttatgcagactcttgtgacttatactcaccacagaatggattgggacacagcagcataagtgtgctacttggcagctagtaagtttaaagcaggacctgccttaactgctcctggccacttggaagtttagggtagatcttgttttccaaagtttcggcaggtgcctggagggcaaataaaaaagcagcagtcagtcagtagtcagtgatggagagaacaagaggagagatgcctggcctctgcccaagaaattagctttgatggaagcctgagcaagtcacctggttattgtaacgtggagatctttgtaggtttagacatggctccctgtctccagtaaacatccagccattcagacaaagggggcctggagatacagagagcccaaataatgcctgctggattgtctcctgatgagtacatgtggactcacctgaggaagggaaggaagggaataatcttttatgtttcatttaccttatgaaaagtgttaaaacattgccaactcaaaataacattatttaatgcatgtgcaaagttaggtcttcccagttgtctcagtgctgaggaacctcatcagagaagcatggaagatgccaaaggatttttggaaggtaaagaaggctgaatagtgaccacatgggcctgttttcagggtcccagcttagttaagtcacccatgcacctggtcattgtgtctcccatgcacatccagcgtttctcagaagcagacccacccttaagttgacaggattgatggaacatgctctcctgctcaaggcacaacctctgggctggagtagaggactctggtgggaaggttttgctgctaatgtatttatggaatgaatgtatttcattcaaatctgtattcctctaggaaggattaaaattaaacttttttaaaatacaggaaaaacctctg

SEQ ID NO: 300262 - DNA, 4177 bp, Homo sapiens
  misc_feature (2845)..(2845): n is a, c, g, or t
agcggggcggggcgcggcggcccggcctgcgggccgcgggcgggctaatccacagcccttgggtggcggtgtcggcagcgcctggggctttcgggtagctgggatgggggctgcgaccttgttgtggttttggtgaccgctcttgtccccactcccccaggttgggcagcccccttcccgaagcttctggacggaaggccccaggtgttccccgagatgccccaacccgtggcggggtgcacggccaccggccctcgggagaagttgggcggccccgggcgaccccggggacgagtggccgcgtcggtgcagcggttgtgagcaagatgtggtagcacgtgaccctggaacgcaaaccctgatgcctgttccccaccacccgagcgctcctttctctgatatttggccccaagccgatgcatcacaggatgaatgaaatgaacctgagtccagtggggatggagcagctgacttcatcctctgtgagcaatgccttgccagtctcaggaagtcacctgggattggctgcctcacccactcacagtgccatccctgccccaggcctcccagtggcaattccaaacctgggtccctccctgagctctctgccttctgctctgtctttaatgctaccaatgggtattggggatcgaggggtgatgtgtgggttacctgaaagaaactacaccctacctccaccaccttaccctcacctggagagcagttatttcagaaccattctacctggcattttatcttatttagctgacagaccacctccacagtacatccaccctaactctataaatgttgatggtaatacagcattatctatcaccaataacccttcagcactagatccctatcagtccaatggaaatgttggattagaaccaggcattgtttcaatagactctcgctctgtgaacacacatggtgcccaaagtcttcatcccagtgatggccatgaggtggccttggacacagcaatcactatggagaacgtttctagggttaccagcccaatttcgacagatggaatggcagaggagcttacgatggacggtgttgcaggcgagcattcccaaatcccaaatggctccagaagtcatgaacctctgtctgtggattctgtgagcaacaaccttgcagcagacgctgtaggacatggtggtgtgatacccatgcatgggaatggcctggagctccctgtggtcatggagacagaccacattgcaagtcgggtcaatggcatgtctgacagtgccctcagtgactccattcacactgtggccatgagcaccaactctgtaagcgtggcactctctacctcacacaaccttgcctccctagaatctgtttccctccatgaagttggcctcagcctagaacctgtggctgtctcctccatcacccaggaggttgctatggggacaggtcatgtagatgtatcttcagacagtctttcttttgtatcaccttcactgcaaatggaagactccaattcaaacaaggagaacatggcaaccttgtttacaatttggtgtactctgtgtgaccgcgcctatccctcggactgtcccgaacatggaccagtgacttttgttcctgacactccaatagagagcagagcaaggctttctctcccaaagcagcttgttctccgtcagtcaattgtgggagcagaagttggtgtatggactggagaaaccattcctgtgcggacttgctttggacctctaattggccagcagagtcactccatggaagtagcagaatggacagacaaggcagttaaccatatctggaagatataccacaatggtgtcctagaattctgcatcattacaactgatgaaaatgaatgtaattggatgatgtttgtgcgcaaagccaggaaccgggaagagcagaatttggtggcttatcctcatgatggaaaaatctttttctgcacctcacaagatatccctcctgaaaatgaactgcttttttattatagccgagattatgctcaacagattggtgttcctgaacacccagatgtgcatctctgtaactgtggcaaggagtgcaattcttacacagagttcaaagcccatctgaccagccacatccataaccatcttcctacccagggacatagcggcagccatgggccaagtcacagcaaagaaaggaagtggaagtgctcaatgtgcccccaagcttttatctctccttccaaacttcatgtccactttatgggtcacatgggtatgaagccccacaagtgtgatttctgtagcaaggcttttagtgatcccagcaacctgcggacccacctcaagatacatacaggtcagaagaactacaggtgtaccttgtgtgacaagtctttcacccagaaggctcacctgggagtcccacatggttatccacactggggagaagaatcttaagtgtgattactgtgacaagttgtttatgcggaggcaggacctcaagcagcacgtgctcatccacactcaagaacgccagatcaagtgtcccaagtgtgataagctgttcttgagaacaaatcacttaaagaagcatctcaattctcatgaaggaaaacgggattatgtctgtgaaaaatgtacaaaggcttatctaaccaaataccatctcacccgccacctgaaaacctgcaaagggcccacctccagttcgtcagcaccagaggaggaagaagaggatgactcagaagaggaagatctagcagactctgtggggacagaagactgtaggattaacagtgctgtgtattcagcggatgagtctctttctgcacataaataaaaggaaaagaaacaagcaattntggatgaaaatgcaaatggaaaaatacacataaccagttatctactataatggtttttatataaaatggttcctgatttattttcagccagtaatcaaaacagactgggaatgaataaagcacttacagaagagtatcctaatgaaaacactttaaaacagattgggaaaactgagcatgtgtcctgttttaagtggtggactgggagggaagtgtcaacttctgaggtctttatttacatgataatctgggagatgcatttatgcctgaatcaaagctgccttctgctcaaacaaatcagatttatttcacattcttccattattccattttcctgctggtcctgtgacttggtaacattctaaacggtccttgccccatagccatcctgattgctgatagtgttttatgcagactcttgtgacttatactcaccacagaatggattgggacacagcagcataagtgtgctacttggcagctagtaagtttaaagcaggacctgccttaactgctcctggccacttggaagtttagggtagatcttgttttccaaagtttcggcaggtgcctggagggcaaataaaaaagcagcagtcagtcagtagtcagtgatggagagaacaagaggagagatgcctggcctctgcccaagaaattagctttgatggaagcctgagcaagtcacctggttattgtaacgtggagatctttgtaggtttagacatggctccctgtctccagtaaacatccagccattcagacaaagggggcctggagatacagagagcccaaataatgcctgctggattgtctcctgatgagtacatgtggactcacctgaggaagggaaggaagggaataatcttttatgtttcatttaccttatgaaaagtgttaaaacattgccaactcaaaataacattatttaatgcatgtgcaaagttaggtcttcccagttgtctcagtgctgaggaacctcatcagagaagcatggaagatgccaaaggatttttggaaggtaaagaaggctgaatagtgaccacatgggcctgttttcagggtcccagcttagttaagtcacccatgcacctggtcattgtgtctcccatgcacatccagcgtttctcagaagcagacccacccttaagttgacaggattgatggaacatgctctcctgctcaaggcacaacctctgggctggagtagaggactctggtgggaaggttttgctgctaatgtatttatggaatgaatgtatttcattcaaatctgtattcctctaggaaggattaaaattaaacttttttaaaatacaggaaaaacctctg

SEQ ID NO: 300263 - DNA, 4059 bp, Homo sapiens
agaagggcgacgcggtgcgcgggcgccgcttgcgggccgcggcggggagggcgcacgcacgaggggcggagcggcgggcgctgagagtggctgaggatccggaaacgcgccgcagagggttgggcagcccccttcccgaagcttctggacggaaggccccaggtgttccccgagatgccccaacccgtggcggggtgcacggccaccggccctcgggagaagttgggcggccccgggcgaccccggggacgagtggccgcgtcggtgcagcggttgtgagcaagatgtggtagcacgtgaccctggaacgcaaaccctgatgcctgttccccaccacccgagcgctcctttctctgatatttggccccaagccgatgcatcacaggatgaatgaaatgaacctgagtccagtggggatggagcagctgacttcatcctctgtgagcaatgccttgccagtctcaggaagtcacctgggattggctgcctcacccactcacagtgccatccctgccccaggcctcccagtggcaattccaaacctgggtccctccctgagctctctgccttctgctctgtctttaatgctaccaatgggtattggggatcgaggggtgatgtgtgggttacctgaaagaaactacaccctacctccaccaccttaccctcacctggagagcagttatttcagaaccattctacctggcattttatcttatttagctgacagaccacctccacagtacatccaccctaactctataaatgttgatggtaatacagcattatctatcaccaataacccttcagcactagatccctatcagtccaatggaaatgttggattagaaccaggcattgtttcaatagactctcgctctgtgaacacacatggtgcccaaagtcttcatcccagtgatggccatgaggtggccttggacacagcaatcactatggagaacgtttctagggttaccagcccaatttcgacagatggaatggcagaggagcttacgatggacggtgttgcaggcgagcattcccaaatcccaaatggctccagaagtcatgaacctctgtctgtggattctgtgagcaacaaccttgcagcagacgctgtaggacatggtggtgtgatacccatgcatgggaatggcctggagctccctgtggtcatggagacagaccacattgcaagtcgggtcaatggcatgtctgacagtgccctcagtgactccattcacactgtggccatgagcaccaactctgtaagcgtggcactctctacctcacacaaccttgcctccctagaatctgtttccctccatgaagttggcctcagcctagaacctgtggctgtctcctccatcacccaggaggttgctatggggacaggtcatgtagatgtatcttcagacagtctttcttttgtatcaccttcactgcaaatggaagactccaattcaaacaaggagaacatggcaaccttgtttacaatttggtgtactctgtgtgaccgcgcctatccctcggactgtcccgaacatggaccagtgacttttgttcctgacactccaatagagagcagagcaaggctttctctcccaaagcagcttgttctccgtcagtcaattgtgggagcagaagttggtgtatggactggagaaaccattcctgtgcggacttgctttggacctctaattggccagcagagtcactccatggaagtagcagaatggacagacaaggcagttaaccatatctggaagatataccacaatggtgtcctagaattctgcatcattacaactgatgaaaatgaatgtaattggatgatgtttgtgcgcaaagccaggaaccgggaagagcagaatttggtggcttatcctcatgatggaaaaatctttttctgcacctcacaagatatccctcctgaaaatgaactgcttttttattatagccgagattatgctcaacagattggtgttcctgaacacccagatgtgcatctctgtaactgtggcaaggagtgcaattcttacacagagttcaaagcccatctgaccagccacatccataaccatcttcctacccagggacatagcggcagccatgggccaagtcacagcaaagaaaggaagtggaagtgctcaatgtgcccccaagcttttatctctccttccaaacttcatgtccactttatgggtcacatgggtatgaagccccacaagtgtgatttctgtagcaaggcttttagtgatcccagcaacctgcggacccacctcaagatacatacaggtcagaagaactacaggtgtaccttgtgtgacaagtctttcacccagaaggctcacctgggagtcccacatggttatccacactggggagaagaatcttaagtgtgattactgtgacaagttgtttatgcggaggcaggacctcaagcagcacgtgctcatccacactcaagaacgccagatcaagtgtcccaagtgtgataagctgttcttgagaacaaatcacttaaagaagcatctcaattctcatgaaggaaaacgggattatgtctgtgaaaaatgtacaaaggcttatctaaccaaataccatctcacccgccacctgaaaacctgcaaagggcccacctccagttcgtcagcaccagaggaggaagaagaggatgactcagaagaggaagatctagcagactctgtggggacagaagactgtaggattaacagtgctgtgtattcagcggatgagtctctttctgcacataaataaaaggatataaaatggttcctgatttattttcagccagtaatcaaaacagactgggaatgaataaagcacttacagaagagtatcctaatgaaaacactttaaaacagattgggaaaactgagcatgtgtcctgttttaagtggtggactgggagggaagtgtcaacttctgaggtctttatttacatgataatctgggagatgcatttatgcctgaatcaaagctgccttctgctcaaacaaatcagatttatttcacattcttccattattccattttcctgctggtcctgtgacttggtaacattctaaacggtccttgccccatagccatcctgattgctgatagtgttttatgcagactcttgtgacttatactcaccacagaatggattgggacacagcagcataagtgtgctacttggcagctagtaagtttaaagcaggacctgccttaactgctcctggccacttggaagtttagggtagatcttgttttccaaagtttcggcaggtgcctggagggcaaataaaaaagcagcagtcagtcagtagtcagtgatggagagaacaagaggagagatgcctggcctctgcccaagaaattagctttgatggaagcctgagcaagtcacctggttattgtaacgtggagatctttgtaggtttagacatggctccctgtctccagtaaacatccagccattcagacaaagggggcctggagatacagagagcccaaataatgcctgctggattgtctcctgatgagtacatgtggactcacctgaggaagggaaggaagggaataatcttttatgtttcatttaccttatgaaaagtgttaaaacattgccaactcaaaataacattatttaatgcatgtgcaaagttaggtcttcccagttgtctcagtgctgaggaacctcatcagagaagcatggaagatgccaaaggatttttggaaggtaaagaaggctgaatagtgaccacatgggcctgttttcagggtcccagcttagttaagtcacccatgcacctggtcattgtgtctcccatgcacatccagcgtttctcagaagcagacccacccttaagttgacaggattgatggaacatgctctcctgctcaaggcacaacctctgggctggagtagaggactctggtgggaaggttttgctgctaatgtatttatggaatgaatgtatttcattcaaatctgtattcctctaggaaggattaaaattaaacttttttaaaatacaggaaaaacctctg

SEQ ID NO: 300264 - DNA, 2556 bp, Homo sapiens
  misc_feature (1224)..(1224): n is a, c, g, or t
gattctagaggaccccgggaatacctctaatcgattccaataacagactgtagtgtttttgactacaaaaggtcatcagctaatatgttgaagtaagaattctgtttctctacaactgccttctcatagataggacgggaaattacaaaaacattccagaggaaatagtaaatagttctgcctaagctttcatataggattttgcaatgggggaatgttgtacttagtacgcatttcaaaattaatgtgcttgatctattaaatgtgataactcaggaaccgggaagagcagaatttggtggcttatcctcatgatggaaaaatctttttctgcacctcacaagatatccctcctgaaaatgaactgcttttttattatagccgagattatgctcaacagattggtgttcctgaacacccagatgtgcatctctgtaactgtggcaaggagtgcaattcttacacagagttcaaagcccatctgaccagccacatccataaccatcttcctacccagggacatagcggcagccatgggccaagtcacagcaaagaaaggaagtggaagtgctcaatgtgcccccaagcttttatctctccttccaaacttcatgtccactttatgggtcacatgggtatgaagccccacaagtgtgatttctgtagcaaggcttttagtgatcccagcaacctgcggacccacctcaagatacatacaggtcagaagaactacaggtgtaccttgtgtgacaagtctttcacccagaaggctcacctgggagtcccacatggttatccacactggggagaagaatcttaagtgtgattactgtgacaagttgtttatgcggaggcaggacctcaagcagcacgtgctcatccacactcaagaacgccagatcaagtgtcccaagtgtgataagctgttcttgagaacaaatcacttaaagaagcatctcaattctcatgaaggaaaacgggattatgtctgtgaaaaatgtacaaaggcttatctaaccaaataccatctcacccgccacctgaaaacctgcaaagggcccacctccagttcgtcagcaccagaggaggaagaagaggatgactcagaagaggaagatctagcagactctgtggggacagaagactgtaggattaacagtgctgtgtattcagcggatgagtctctttctgcacataaataaaaggaaaagaaacaagcaattntggatgaaaatgcaaatggaaaaatacacataaccagttatctactataatggtttttatataaaatggttcctgatttattttcagccagtaatcaaaacagactgggaatgaataaagcacttacagaagagtatcctaatgaaaacactttaaaacagattgggaaaactgagcatgtgtcctgttttaagtggtggactgggagggaagtgtcaacttctgaggtctttatttacatgataatctgggagatgcatttatgcctgaatcaaagctgccttctgctcaaacaaatcagatttatttcacattcttccattattccattttcctgctggtcctgtgacttggtaacattctaaacggtccttgccccatagccatcctgattgctgatagtgttttatgcagactcttgtgacttatactcaccacagaatggattgggacacagcagcataagtgtgctacttggcagctagtaagtttaaagcaggacctgccttaactgctcctggccacttggaagtttagggtagatcttgttttccaaagtttcggcaggtgcctggagggcaaataaaaaagcagcagtcagtcagtagtcagtgatggagagaacaagaggagagatgcctggcctctgcccaagaaattagctttgatggaagcctgagcaagtcacctggttattgtaacgtggagatctttgtaggtttagacatggctccctgtctccagtaaacatccagccattcagacaaagggggcctggagatacagagagcccaaataatgcctgctggattgtctcctgatgagtacatgtggactcacctgaggaagggaaggaagggaataatcttttatgtttcatttaccttatgaaaagtgttaaaacattgccaactcaaaataacattatttaatgcatgtgcaaagttaggtcttcccagttgtctcagtgctgaggaacctcatcagagaagcatggaagatgccaaaggatttttggaaggtaaagaaggctgaatagtgaccacatgggcctgttttcagggtcccagcttagttaagtcacccatgcacctggtcattgtgtctcccatgcacatccagcgtttctcagaagcagacccacccttaagttgacaggattgatggaacatgctctcctgctcaaggcacaacctctgggctggagtagaggactctggtgggaaggttttgctgctaatgtatttatggaatgaatgtatttcattcaaatctgtattcctctaggaaggattaaaattaaacttttttaaaatacaggaaaaacctctg

SEQ ID NO: 300265 - DNA, 2533 bp, Homo sapiens
  misc_feature (1201)..(1201): n is a, c, g, or t
taaatcccacgtccagaagtagacagtagtgtgtaggagaatcagtaggtcatcagctaatatgttgaagtaagaattctgtttctctacaactgccttctcatagataggacgggaaattacaaaaacattccagaggaaatagtaaatagttctgcctaagctttcatataggattttgcaatgggggaatgttgtacttagtacgcatttcaaaattaatgtgcttgatctattaaatgtgataactcaggaaccgggaagagcagaatttggtggcttatcctcatgatggaaaaatctttttctgcacctcacaagatatccctcctgaaaatgaactgcttttttattatagccgagattatgctcaacagattggtgttcctgaacacccagatgtgcatctctgtaactgtggcaaggagtgcaattcttacacagagttcaaagcccatctgaccagccacatccataaccatcttcctacccagggacatagcggcagccatgggccaagtcacagcaaagaaaggaagtggaagtgctcaatgtgcccccaagcttttatctctccttccaaacttcatgtccactttatgggtcacatgggtatgaagccccacaagtgtgatttctgtagcaaggcttttagtgatcccagcaacctgcggacccacctcaagatacatacaggtcagaagaactacaggtgtaccttgtgtgacaagtctttcacccagaaggctcacctgggagtcccacatggttatccacactggggagaagaatcttaagtgtgattactgtgacaagttgtttatgcggaggcaggacctcaagcagcacgtgctcatccacactcaagaacgccagatcaagtgtcccaagtgtgataagctgttcttgagaacaaatcacttaaagaagcatctcaattctcatgaaggaaaacgggattatgtctgtgaaaaatgtacaaaggcttatctaaccaaataccatctcacccgccacctgaaaacctgcaaagggcccacctccagttcgtcagcaccagaggaggaagaagaggatgactcagaagaggaagatctagcagactctgtggggacagaagactgtaggattaacagtgctgtgtattcagcggatgagtctctttctgcacataaataaaaggaaaagaaacaagcaattntggatgaaaatgcaaatggaaaaatacacataaccagttatctactataatggtttttatataaaatggttcctgatttattttcagccagtaatcaaaacagactgggaatgaataaagcacttacagaagagtatcctaatgaaaacactttaaaacagattgggaaaactgagcatgtgtcctgttttaagtggtggactgggagggaagtgtcaacttctgaggtctttatttacatgataatctgggagatgcatttatgcctgaatcaaagctgccttctgctcaaacaaatcagatttatttcacattcttccattattccattttcctgctggtcctgtgacttggtaacattctaaacggtccttgccccatagccatcctgattgctgatagtgttttatgcagactcttgtgacttatactcaccacagaatggattgggacacagcagcataagtgtgctacttggcagctagtaagtttaaagcaggacctgccttaactgctcctggccacttggaagtttagggtagatcttgttttccaaagtttcggcaggtgcctggagggcaaataaaaaagcagcagtcagtcagtagtcagtgatggagagaacaagaggagagatgcctggcctctgcccaagaaattagctttgatggaagcctgagcaagtcacctggttattgtaacgtggagatctttgtaggtttagacatggctccctgtctccagtaaacatccagccattcagacaaagggggcctggagatacagagagcccaaataatgcctgctggattgtctcctgatgagtacatgtggactcacctgaggaagggaaggaagggaataatcttttatgtttcatttaccttatgaaaagtgttaaaacattgccaactcaaaataacattatttaatgcatgtgcaaagttaggtcttcccagttgtctcagtgctgaggaacctcatcagagaagcatggaagatgccaaaggatttttggaaggtaaagaaggctgaatagtgaccacatgggcctgttttcagggtcccagcttagttaagtcacccatgcacctggtcattgtgtctcccatgcacatccagcgtttctcagaagcagacccacccttaagttgacaggattgatggaacatgctctcctgctcaaggcacaacctctgggctggagtagaggactctggtgggaaggttttgctgctaatgtatttatggaatgaatgtatttcattcaaatctgtattcctctaggaaggattaaaattaaacttttttaaaatacaggaaaaacctctg

SEQ ID NO: 300266 - DNA, 2441 bp, Homo sapiens
  misc_feature (1109)..(1109): n is a, c, g, or t
tttatggagatggggtcttgctgtgttgcccaggctgatcttaaactcctggcctcaaatgatcatgccactttgggctctcaaagcactaagattgcaggcctgagccactgtgcctggcccatagtacattattttagatgcccttagtacattattttagttttataggaagtgggcaaattggaaatatggagagaaaggagaactggaagcaatgattgttaatatcaagaacaagttttaagattcaagtattgggagataatgagtaatttttttttaaaaggtgttcctgaacacccagatgtgcatctctgtaactgtggcaaggagtgcaattcttacacagagttcaaagcccatctgaccagccacatccataaccatcttcctacccagggacatagcggcagccatgggccaagtcacagcaaagaaaggaagtggaagtgctcaatgtgcccccaagcttttatctctccttccaaacttcatgtccactttatgggtcacatgggtatgaagccccacaagtgtgatttctgtagcaaggcttttagtgatcccagcaacctgcggacccacctcaagatacatacaggtcagaagaactacaggtgtaccttgtgtgacaagtctttcacccagaaggctcacctgggagtcccacatggttatccacactggggagaagaatcttaagtgtgattactgtgacaagttgtttatgcggaggcaggacctcaagcagcacgtgctcatccacactcaagaacgccagatcaagtgtcccaagtgtgataagctgttcttgagaacaaatcacttaaagaagcatctcaattctcatgaaggaaaacgggattatgtctgtgaaaaatgtacaaaggcttatctaaccaaataccatctcacccgccacctgaaaacctgcaaagggcccacctccagttcgtcagcaccagaggaggaagaagaggatgactcagaagaggaagatctagcagactctgtggggacagaagactgtaggattaacagtgctgtgtattcagcggatgagtctctttctgcacataaataaaaggaaaagaaacaagcaattntggatgaaaatgcaaatggaaaaatacacataaccagttatctactataatggtttttatataaaatggttcctgatttattttcagccagtaatcaaaacagactgggaatgaataaagcacttacagaagagtatcctaatgaaaacactttaaaacagattgggaaaactgagcatgtgtcctgttttaagtggtggactgggagggaagtgtcaacttctgaggtctttatttacatgataatctgggagatgcatttatgcctgaatcaaagctgccttctgctcaaacaaatcagatttatttcacattcttccattattccattttcctgctggtcctgtgacttggtaacattctaaacggtccttgccccatagccatcctgattgctgatagtgttttatgcagactcttgtgacttatactcaccacagaatggattgggacacagcagcataagtgtgctacttggcagctagtaagtttaaagcaggacctgccttaactgctcctggccacttggaagtttagggtagatcttgttttccaaagtttcggcaggtgcctggagggcaaataaaaaagcagcagtcagtcagtagtcagtgatggagagaacaagaggagagatgcctggcctctgcccaagaaattagctttgatggaagcctgagcaagtcacctggttattgtaacgtggagatctttgtaggtttagacatggctccctgtctccagtaaacatccagccattcagacaaagggggcctggagatacagagagcccaaataatgcctgctggattgtctcctgatgagtacatgtggactcacctgaggaagggaaggaagggaataatcttttatgtttcatttaccttatgaaaagtgttaaaacattgccaactcaaaataacattatttaatgcatgtgcaaagttaggtcttcccagttgtctcagtgctgaggaacctcatcagagaagcatggaagatgccaaaggatttttggaaggtaaagaaggctgaatagtgaccacatgggcctgttttcagggtcccagcttagttaagtcacccatgcacctggtcattgtgtctcccatgcacatccagcgtttctcagaagcagacccacccttaagttgacaggattgatggaacatgctctcctgctcaaggcacaacctctgggctggagtagaggactctggtgggaaggttttgctgctaatgtatttatggaatgaatgtatttcattcaaatctgtattcctctaggaaggattaaaattaaacttttttaaaatacaggaaaaacctctg

SEQ ID NO: 300267 - DNA, 2602 bp, Homo sapiens
agaagggcgacgcggtgcgcgggcgccgcttgcgggccgcggcggggagggcgcacgcacgaggggcggagcggcgggcgctgagagtggctgaggatccggaaacgcgccgcagagggttgggcagcccccttcccgaagcttctggacggaaggccccaggtgttccccgagatgccccaacccgtggcggggtgcacggccaccggccctcgggagaagttgggcggccccgggcgaccccggggacgagtggccgcgtcggtgcagcggttgtgagcaagatgtggtagcacgtgaccctggaacgcaaaccctgatgcctgttccccaccacccgagcgctcctttctctgatatttggccccaagccgatgcatcacaggatgaatgaaatgaacctgagtccagtggggatggagcagctgacttcatcctctgtgagcaatgccttgccagtctcaggaagtcacctgggattggctgcctcacccactcacagtgccatccctgccccaggcctcccagtggcaattccaaacctgggtccctccctgagctctctgccttctgctctgtctttaatgctaccaatgggtattggggatcgaggggtgatgtgtgggttacctgaaagaaactacaccctacctccaccaccttaccctcacctggagagcagttatttcagaaccattctacctggcattttatcttatttagctgacagaccacctccacagtacatccaccctaactctataaatgttgatggtaatacagcattatctatcaccaataacccttcagcactagatccctatcagtccaatggaaatgttggattagaaccaggcattgtttcaatagactctcgctctgtgaacacacatggtgcccaaagtcttcatcccagtgatggccatgaggtggccttggacacagcaatcactatggagaacgtttctagggttaccagcccaatttcgacagatggaatggcagaggagcttacgatggacggtgttgcaggcgagcattcccaaatcccaaatggctccagaagtcatgaacctctgtctgtggattctgtgagcaacaaccttgcagcagacgctgtaggacatggtggtgtgatacccatgcatgggaatggcctggagctccctgtggtcatggagacagaccacattgcaagtcgggtcaatggcatgtctgacagtgccctcagtgactccattcacactgtggccatgagcaccaactctgtaagcgtggcactctctacctcacacaaccttgcctccctagaatctgtttccctccatgaagttggcctcagcctagaacctgtggctgtctcctccatcacccaggaggttgctatggggacaggtcatgtagatgtatcttcagacagtctttcttttgtatcaccttcactgcaaatggaagactccaattcaaacaaggagaacatggcaaccttgtttacaatttggtgtactctgtgtgaccgcgcctatccctcggactgtcccgaacatggaccagtgacttttgttcctgacactccaatagagagcagagcaaggctttctctcccaaagcagcttgttctccgtcagtcaattgtgggagcagaagttggtgtatggactggagaaaccattcctgtgcggacttgctttggacctctaattggccagcagagtcactccatggaagtagcagaatggacagacaaggcagttaaccatatctggaagatataccacaatggtgtcctagaattctgcatcattacaactgatgaaaatgaatgtaattggatgatgtttgtgcgcaaagccaggaaccgggaagagcagaatttggtggcttatcctcatgatggaaaaatctttttctgcacctcacaagatatccctcctgaaaatgaactgcttttttattatagccgagattatgctcaacagattggtgttcctgaacacccagatgtgcatctctgtaactgtggcaaggagtgcaattcttacacagagttcaaagcccatctgaccagccacatccataaccatcttcctacccagggacatagcggcagccatgggccaagtcacagcaaagaaaggaagtggaagtgctcaatgtgcccccaagcttttatctctccttccaaacttcatgtccactttatgggtcacatgggtatgaagccccacaagtgtgatttctgtagcaaggcttttagtgatcccagcaacctgcggacccacctcaagatacatacaggtcagaagaactacaggtgtaccttgtgtgacaagtctttcacccagaaggctcacctgggagtcccacatggttatccacactggggagaagaatcttaagtgtgattactgtgacaagttgtttatgcggaggcaggacctcaagcagcacgtgctcatccacactcatcactctagcctgggtgacagagtaagaccctgtctcacacaaaacaaaaacaaatggttcagggacaaatgaatcatcctcatgaaaaagaatgaagttggacccctacctcacaccatacacacaaaaaaaa

SEQ ID NO: 300268 - DNA, 2499 bp, Homo sapiens
agaagggcgacgcggtgcgcgggcgccgcttgcgggccgcggcggggagggcgcacgcacgaggggcggagcggcgggcgctgagagtggctgaggatccggaaacgcgccgcagagggttgggcagcccccttcccgaagcttctggacggaaggccccaggtgttccccgagatgccccaacccgtggcggggtgcacggccaccggccctcgggagaagttgggcggccccgggcgaccccggggacgagtggccgcgtcggtgcagcggttgtgagcaagatgtggtagcacgtgaccctggaacgcaaaccctgatgcctgttccccaccacccgagcgctcctttctctgatatttggccccaagccgatgcatcacaggatgaatgaaatgaacctgagtccagtggggatggagcagctgacttcatcctctgtgagcaatgccttgccagtctcaggaagtcacctgggattggctgcctcacccactcacagtgccatccctgccccaggcctcccagtggcaattccaaacctgggtccctccctgagctctctgccttctgctctgtctttaatgctaccaatgggtattggggatcgaggggtgatgtgtgggttacctgaaagaaactacaccctacctccaccaccttaccctcacctggagagcagttatttcagaaccattctacctggcattttatcttatttagctgacagaccacctccacagtacatccaccctaactctataaatgttgatggtaatacagcattatctatcaccaataacccttcagcactagatccctatcagtccaatggaaatgttggattagaaccaggcattgtttcaatagactctcgctctgtgaacacacatggtgcccaaagtcttcatcccagtgatggccatgaggtggccttggacacagcaatcactatggagaacgtttctagggttaccagcccaatttcgacagatggaatggcagaggagcttacgatggacggtgttgcaggcgagcattcccaaatcccaaatggctccagaagtcatgaacctctgtctgtggattctgtgagcaacaaccttgcagcagacgctgtaggacatggtggtgtgatacccatgcatgggaatggcctggagctccctgtggtcatggagacagaccacattgcaagtcgggtcaatggcatgtctgacagtgccctcagtgactccattcacactgtggccatgagcaccaactctgtaagcgtggcactctctacctcacacaaccttgcctccctagaatctgtttccctccatgaagttggcctcagcctagaacctgtggctgtctcctccatcacccaggaggttgctatggggacaggtcatgtagatgtatcttcagacagtctttcttttgtatcaccttcactgcaaatggaagactccaattcaaacaaggagaacatggcaaccttgtttacaatttggtgtactctgtgtgaccgcgcctatccctcggactgtcccgaacatggaccagtgacttttgttcctgacactccaatagagagcagagcaaggctttctctcccaaagcagcttgttctccgtcagtcaattgtgggagcagaagttggtgtatggactggagaaaccattcctgtgcggacttgctttggacctctaattggccagcagagtcactccatggaagtagcagaatggacagacaaggcagttaaccatatctggaagatataccacaatggtgtcctagaattctgcatcattacaactgatgaaaatgaatgtaattggatgatgtttgtgcgcaaagccaggaaccgggaagagcagaatttggtggcttatcctcatgatggaaaaatctttttctgcacctcacaagatatccctcctgaaaatgaactgcttttttattatagccgagattatgctcaacagattggtgttcctgaacacccagatgtgcatctctgtaactgtggcaaggagtgcaattcttacacagagttcaaagcccatctgaccagccacatccataaccatcttcctacccagggacatagcggcagccatgggccaagtcacagcaaagaaaggaagtggaagtgctcaatgtgcccccaagcttttatctctccttccaaacttcatgtccactttatgggtcacatgggtatgaagccccacaagtgtgatttctgtagcaaggcttttagtgatcccagcaacctgcggacccacctcaagatacatacaggtcagaagaactacaggtgtaccttgtgtgacaagtctttcacccagaaggctcacctgggagtcccacatggttatccacactggggagaagaatcttaagtgtgattactgtgacaagttgtttatgcggaggcaggacctcaagcagcacgtgctcatccacactcaactcagtaagttaccctgcagccaagacgtc

SEQ ID NO: 300269 - DNA, 831 bp, Homo sapiens
taaatcccacgtccagaagtagacagtagtgtgtaggagaatcagtaggtcatcagctaatatgttgaagtaagaattctgtttctctacaactgccttctcatagataggacgggaaattacaaaaacattccagaggaaatagtaaatagttctgcctaagctttcatataggattttgcaatgggggaatgttgtacttagtacgcatttcaaaattaatgtgcttgatctattaaatgtgataactcaggaaccgggaagagcagaatttggtggcttatcctcatgatggaaaaatctttttctgcacctcacaagatatccctcctgaaaatgaactgcttttttattatagccgagattatgctcaacagattggtaagttaatatgtgtttataatgaatctggcttagtaaaaataccaaagaccaggattaaagttttggtaatgatttacatgttagctgaagcaaatcatatacctttgtttgtataaatgcaaactattacttgtatttgaggtgttaaaatctgtgagattcttcacaagctgaatgttattgaccaagcaataattcatatgatacggtcttttatggtaggactttggtttggggcattgaagttccttaggctacttttcgagctagcaccattgagatataaattcatgaaggacagcgaagtccctcggtttgatttaacctgcatatgctttctctttgctgtgctgtttcatgatgacagctaatgtttaagagtttgggtatgctataaaacctaaatattttgcttacaaaagaggccttataatccagtatttacca

SEQ ID NO: 300270 - DNA, 219 bp, Homo sapiens
agaagggcgacgcggtgcgcgggcgccgcttgcgggccgcggcggggagggcgcacgcacgaggggcggagcggcgggcgctgagagtggctgaggatccggaaacgcgccgcagagggtgcggcccagaggaggccgcgggccgggaagggccgggcgggacgggaaacgttagggcagcggcccccggggtgagggggccgagcggacgggcagggc

SEQ ID NO: 300271 - DNA, 300 bp, Homo sapiens
gattacaggtgtaaatcaccacacctgggctgctttattttatagcacgtgaccctggaacgcaaaccctgatgcctgttccccaccacccgagcgctcctttctctgatatttggccccaagccgatgcatcacaggatgaatgaaatgaacctgagtccagtggggatggagcagctgacttcatcctctgtgagcaatgccttgccagtctcaggaagtcacctgggattggctgcctcacccgtagctgtacgtcccccgtagctgtacctcacccgtagctgtacctcacccgta

SEQ ID NO: 300272 - DNA, 533 bp, Homo sapiens
cacatgggtatgaagccccacaagtgtgatttctgtagcaaggcttttagtgatcccagcaacctgcggacccacctcaagatacatacaggtaagttgtgttggcccatcagaatggaatttttgcaacaattagaaaatgcggtagtaaaggctttgtagagggattgtaggtggagttgagatttgatgtcagagaaagaaaccttcgtggtttaactgagattccttggaggctgtcacttccaattattaggatgttctgctttccaggtctccccaccatagttggaaggtgcctgggaaaatgcacttaataatcaggaagttgatcaatgtgtttggtcttaaatagaagcttctgagtctgagtctgagcctctcattagagctcaccccccagtcaccagccagagccagtttctctcctttaatattattgctcaataaatattgccacagtttattttttgagcttccattttctaaatcccatgcaaaccaacacctttcttttagtactttttaagaaa

SEQ ID NO: 300273 - DNA, 744 bp, Homo sapiens
tcatcgtttcgtctcccacgtggagtgacgatacgtgcggtcgccagccgccttcagggcacaaccatattaatttccctgacttctgtgctacatgacaacaaagaatttcccaacccagagatgtttgaccctcatcactttctggatgaaggtggcaattttaagaaaagtaaatacttcatgcctttctcagcaggaaaacggatttgtgtgggagaagccctggccggcatggagctgtttttattcctgacctccattttacagaactttaacctgaaatctctggttgacccaaagaaccttgacaccactccagttgtcaatggatttgcctctgtgccgcccttctaccagctgtgcttcattcctgtctgaagaagagcagatggcctggctgctgctgtgcagtccctgcagctctctttcctctggggcattatccatctttcactatctgtaatgccttttctcacctgtcatctcacattttcccttccctgaagatctagtgaacattcgacctccattacggagagtttcctatgtttcactgtgcaaatatatctgctattctccatactctgtaacagttgcattgactgtcacataatgctcatacttatctaatgttgagttattaatatgttattattaaatagagaaatatgatttgtgtattataattcaaaggcatttcttttctgcatgttctaaataaaaagcattattatttgctga

SEQ ID NO: 300274 - DNA, 805 bp, Homo sapiens
cgaattagcatggagtgttataaaaggcttggagtgcaagctcatggttgtcttaacaagaagagaaggcttcaatggattctcttgtggtccttgtgctctgtctctcatgtttgcttctcctttcactctggagacagagctctgggagaggaaaactccctcctggccccactcctctcccagtgattggaaatatcctacagataggtattaaggacatcagcaaatccttaaccaatgtaagtatgctccttcagtggcttgcaaaaggtaagtaaattcacctgtattttttaaataaagtgtatccctagaggtacatgttacaagaggtaatggtaaagtaaaatactttgaaaggcttttgttgccttttccagtctgtcagtgtcagaaatagtggaatgaaaccatgtattttgtgagtagagaaagatttgggtctttgcatgttagattcaaaataacaagtgtcaatagtttgaaaagctgtgttccttcttcatttcataaccatttgctataatttttggctgaaggtaaatggtaaggtattgtgggatctggtcagcagcccacaaagcaactgggctctctcttttttcccaggtggatcggcaggttgagaaataatagacacacaagatagtgaaagctgggtccaggggggtcaccgccttctggtcccatggtgccaagaatgcactggatataccagcatttattattaagtttagtgagggcaggggtaggttagtgagggatttagggtcatttgattatgaggtgagatggtcacatg

SEQ ID NO: 300275 - DNA, 1910 bp, Homo sapiens
cgaattagcatggagtgttataaaaggcttggagtgcaagctcatggttgtcttaacaagaagagaaggcttcaatggattctcttgtggtccttgtgctctgtctctcatgtttgcttctcctttcactctggagacagagctctgggagaggaaaactccctcctggccccactcctctcccagtgattggaaatatcctacagataggtattaaggacatcagcaaatccttaaccaatctctcaaaggtctatggccctgtgttcactctgtattttggcctgaaacccatagtggtgctgcatggatatgaagcagtgaaggaagccctgattgatcttggagaggagttttctggaagaggcattttcccactggctgaaagagctaacagaggatttggaattgttttcagcaatggaaagaaatggaaggagatccggcgtttctccctcatgacgctgcggaattttgggatggggaagaggagcattgaggaccgtgttcaagaggaagcccgctgccttgtggaggagttgagaaaaaccaaggcctcaccctgtgatcccactttcatcctgggctgtgctccctgcaatgtgatctgctccattattttccataaacgttttgattataaagatcagcaatttcttaacttaatggaaaagttgaatgaaaacatcaagattttgagcagcccctggatccagatctgcaataatttttctcctatcattgattacttcccgggaactcacaacaaattacttaaaaacgttgcttttatgaaaagttatattttggaaaaagtaaaagaacaccaagaatcaatggacatgaacaaccctcaggactttattgattgcttcctgatgaaaatggagaaggaaaagcacaaccaaccatctgaatttactattgaaagcttggaaaacactgcagttgacttgtttggagctgggacagagacgacaagcacaaccctgagatatgctctccttctcctgctgaagcacccagaggtcacagctaaagtccaggaagagattgaacgtgtgattggcagaaaccggagcccctgcatgcaagacaggagccacatgccctacacagatgctgtggtgcacgaggtccagagatacattgaccttctccccaccagcctgccccatgcagtgacctgtgacattaaattcagaaactatctcattcccaagggcacaaccatattaatttccctgacttctgtgctacatgacaacaaagaatttcccaacccagagatgtttgaccctcatcactttctggatgaaggtggcaattttaagaaaagtaaatacttcatgcctttctcagcaggaaaacggatttgtgtgggagaagccctggccggcatggagctgtttttattcctgacctccattttacagaactttaacctgaaatctctggttgacccaaagaaccttgacaccactccagttgtcaatggatttgcctctgtgccgcccttctaccagctgtgcttcattcctgtctgaagaagagcagatggcctggctgctgctgtgcagtccctgcagctctctttcctctggggcattatccatctttcactatctgtaatgccttttctcacctgtcatctcacattttcccttccctgaagatctagtgaacattcgacctccattacggagagtttcctatgtttcactgtgcaaatatatctgctattctccatactctgtaacagttgcattgactgtcacataatgctcatacttatctaatgttgagttattaatatgttattattaaatagagaaatatgatttgtgtattataattcaaaggcatttcttttctgcatgttctaaataaaaagcattattatttgctga

SEQ ID NO: 300276 - DNA, 1994 bp, Homo sapiens
  misc_feature (1923)..(1923): n is a, c, g, or t
  misc_feature (1930)..(1932): n is a, c, g, or t
  misc_feature (1938)..(1938): n is a, c, g, or t
  misc_feature (1940)..(1940): n is a, c, g, or t
cgaattagcatggagtgttataaaaggcttggagtgcaagctcatggttgtcttaacaagaagagaaggcttcaatggattctcttgtggtccttgtgctctgtctctcatgtttgcttctcctttcactctggagacagagctctgggagaggaaaactccctcctggccccactcctctcccagtgattggaaatatcctacagataggtattaaggacatcagcaaatccttaaccaatctctcaaaggtctatggccctgtgttcactctgtattttggcctgaaacccatagtggtgctgcatggatatgaagcagtgaaggaagccctgattgatcttggagaggagttttctggaagaggcattttcccactggctgaaagagctaacagaggatttggaattgttttcagcaatggaaagaaatggaaggagatccggcgtttctccctcatgacgctgcggaattttgggatggggaagaggagcattgaggaccgtgttcaagaggaagcccgctgccttgtggaggagttgagaaaaaccaaggcctcaccctgtgatcccactttcatcctgggctgtgctccctgcaatgtgatctgctccattattttccataaacgttttgattataaagatcagcaatttcttaacttaatggaaaagttgaatgaaaacatcaagattttgagcagcccctggatccagatctgcaataatttttctcctatcattgattacttcccgggaactcacaacaaattacttaaaaacgttgcttttatgaaaagttatattttggaaaaagtaaaagaacaccaagaatcaatggacatgaacaaccctcaggactttattgattgcttcctgatgaaaatggagaaggaaaagcacaaccaaccatctgaatttactattgaaagcttggaaaacactgcagttgacttgtttggagctgggacagagacgacaagcacaaccctgagatatgctctccttctcctgctgaagcacccagaggtcacagctaaagtccaggaagagattgaacgtgtgattggcagaaaccggagcccctgcatgcaagacaggagccacatgccctacacagatgctgtggtgcacgaggtccagagatacattgaccttctccccaccagcctgccccatgcagtgacctgtgacattaaattcagaaactatctcattcccaagggcacaaccatattaatttccctgacttctgtgctacatgacaacaaagaatttcccaacccagagatgtttgaccctcatcactttctggatgaaggtggcaattttaagaaaagtaaatacttcatgcctttctcagcaggaaaacggatttgtgtgggagaagccctggccggcatggagctgtttttattcctgacctccattttacagaactttaacctgaaatctctggttgacccaaagaaccttgacaccactccagttgtcaatggatttgcctctgtgccgcccttctaccagctgtgcttcattcctgtctgaagaagagcagatggcctggctgctgctgtgcagtccctgcagctctctttcctctggggcattatccatctttcactatctgtaatgccttttctcacctgtcatctcacattttcccttccctgaagatctagtgaacattcgacctccattacggagagtttcctatgtttcactgtgcaaatatatctgctattctccatactctgtaacagttgcattgactgtcacataatgctcatacttatctaatgttgagttattaatatgttattattaaatagagaaatatgatttgtgtattataattcaaaggcatttcttttctgcatgttctaaataaaaagcattattatttgctgaaaaaaaaaaaaanatggccnnnttggcntnacgtggagctttgctgcccgttcctttagtgaggcgtatccatgacccccttat

SEQ ID NO: 300277 - DNA, 1856 bp, Homo sapiens
cgaattagcatggagtgttataaaaggcttggagtgcaagctcatggttgtcttaacaagaagagaaggcttcaatggattctcttgtggtccttgtgctctgtctctcatgtttgcttctcctttcactctggagacagagctctgggagaggaagtattaaggacatcagcaaatccttaaccaatctctcaaaggtctatggccctgtgttcactctgtattttggcctgaaacccatagtggtgctgcatggatatgaagcagtgaaggaagccctgattgatcttggagaggagttttctggaagaggcattttcccactggctgaaagagctaacagaggatttggaattgttttcagcaatggaaagaaatggaaggagatccggcgtttctccctcatgacgctgcggaattttgggatggggaagaggagcattgaggaccgtgttcaagaggaagcccgctgccttgtggaggagttgagaaaaaccaaggcctcaccctgtgatcccactttcatcctgggctgtgctccctgcaatgtgatctgctccattattttccataaacgttttgattataaagatcagcaatttcttaacttaatggaaaagttgaatgaaaacatcaagattttgagcagcccctggatccagatctgcaataatttttctcctatcattgattacttcccgggaactcacaacaaattacttaaaaacgttgcttttatgaaaagttatattttggaaaaagtaaaagaacaccaagaatcaatggacatgaacaaccctcaggactttattgattgcttcctgatgaaaatggagaaggaaaagcacaaccaaccatctgaatttactattgaaagcttggaaaacactgcagttgacttgtttggagctgggacagagacgacaagcacaaccctgagatatgctctccttctcctgctgaagcacccagaggtcacagctaaagtccaggaagagattgaacgtgtgattggcagaaaccggagcccctgcatgcaagacaggagccacatgccctacacagatgctgtggtgcacgaggtccagagatacattgaccttctccccaccagcctgccccatgcagtgacctgtgacattaaattcagaaactatctcattcccaagggcacaaccatattaatttccctgacttctgtgctacatgacaacaaagaatttcccaacccagagatgtttgaccctcatcactttctggatgaaggtggcaattttaagaaaagtaaatacttcatgcctttctcagcaggaaaacggatttgtgtgggagaagccctggccggcatggagctgtttttattcctgacctccattttacagaactttaacctgaaatctctggttgacccaaagaaccttgacaccactccagttgtcaatggatttgcctctgtgccgcccttctaccagctgtgcttcattcctgtctgaagaagagcagatggcctggctgctgctgtgcagtccctgcagctctctttcctctggggcattatccatctttcactatctgtaatgccttttctcacctgtcatctcacattttcccttccctgaagatctagtgaacattcgacctccattacggagagtttcctatgtttcactgtgcaaatatatctgctattctccatactctgtaacagttgcattgactgtcacataatgctcatacttatctaatgttgagttattaatatgttattattaaatagagaaatatgatttgtgtattataattcaaaggcatttcttttctgcatgttctaaataaaaagcattattatttgctga

SEQ ID NO: 300278 - DNA, 2672 bp, Homo sapiens
gcttatggaaaagtaatgagtgattttagatcagtttggcacagacaaaaggagcttgttatgattatttctcaaaaggatagtaagaaggaggaataagctataaactctgttagggggttaagaattaaggtgatttgtataatcctatagccatctaattttaggagtactgctgtgaggactattgacctggcaattgcggcctctatgtgggcttttgggagtcctaggtggagtccatagagagatatttttagtataaatgctatgatgcatgctaatcataaaaggctattaaaccaggaaattgttagttcttgaagctgggtattggtcttaaggtagactcgaaagtgctgataaatttctcaagcatcagtgtttgaataagcggagtttcaaattttggtctgctgtacattagctgtgagacactggagacagagtcttactctgtagctcaggctggagtgcagtggtacaatcttggctcactgcaacctccatctcccaggtccccattcaagaaattctcctgcctcagtcccccaagtagctagcattacaggcatgcaccaccatgctcagctaatttttgtatttttagtagagacgtggtatcaccttgttggccaggctggtcttgaactcctgaccttgtgatccacctgccttggcctcccaaagtgttgggattacaggcaggagccaccacacctggccgtttgtttaaaatagagtaaatagacctgctgaatatgttgatgtgagtattaattgtaatctgcatagcaattgtctgaccattgccttgaacatcacaggccatctgagtggcaagtataatcatcatcatgtttctatttaaaattcagaaatatttgaagcctgtgtggctgaataaaagcatacaaatacaatgaaaatatcatgctaaatcaggcttagcaaatggacaaaatagtaacttcgtttgctgttatctctgtctactttcctagctctcaaaggtctatggccctgtgttcactctgtattttggcctgaaacccatagtggtgctgcatggatatgaagcagtgaaggaagccctgattgatcttggagaggagttttctggaagaggcattttcccactggctgaaagagctaacagaggatttggaattgttttcagcaatggaaagaaatggaaggagatccggcgtttctccctcatgacgctgcggaattttgggatggggaagaggagcattgaggaccgtgttcaagaggaagcccgctgccttgtggaggagttgagaaaaaccaaggcctcaccctgtgatcccactttcatcctgggctgtgctccctgcaatgtgatctgctccattattttccataaacgttttgattataaagatcagcaatttcttaacttaatggaaaagttgaatgaaaacatcaagattttgagcagcccctggatccagatctgcaataatttttctcctatcattgattacttcccgggaactcacaacaaattacttaaaaacgttgcttttatgaaaagttatattttggaaaaagtaaaagaacaccaagaatcaatggacatgaacaaccctcaggactttattgattgcttcctgatgaaaatggagaaggaaaagcacaaccaaccatctgaatttactattgaaagcttggaaaacactgcagttgacttgtttggagctgggacagagacgacaagcacaaccctgagatatgctctccttctcctgctgaagcacccagaggtcacagctaaagtccaggaagagattgaacgtgtgattggcagaaaccggagcccctgcatgcaagacaggagccacatgccctacacagatgctgtggtgcacgaggtccagagatacattgaccttctccccaccagcctgccccatgcagtgacctgtgacattaaattcagaaactatctcattcccaagggcacaaccatattaatttccctgacttctgtgctacatgacaacaaagaatttcccaacccagagatgtttgaccctcatcactttctggatgaaggtggcaattttaagaaaagtaaatacttcatgcctttctcagcaggaaaacggatttgtgtgggagaagccctggccggcatggagctgtttttattcctgacctccattttacagaactttaacctgaaatctctggttgacccaaagaaccttgacaccactccagttgtcaatggatttgcctctgtgccgcccttctaccagctgtgcttcattcctgtctgaagaagagcagatggcctggctgctgctgtgcagtccctgcagctctctttcctctggggcattatccatctttcactatctgtaatgccttttctcacctgtcatctcacattttcccttccctgaagatctagtgaacattcgacctccattacggagagtttcctatgtttcactgtgcaaatatatctgctattctccatactctgtaacagttgcattgactgtcacataatgctcatacttatctaatgttgagttattaatatgttattattaaatagagaaatatgatttgtgtattataattcaaaggcatttcttttctgcatgttctaaataaaaagcattattatttgctga

SEQ ID NO: 300279 - DNA, 2618 bp, Homo sapiens
gcttatggaaaagtaatgagtgattttagatcagtttggcacagacaaaaggagcttgttatgattatttctcaaaaggatagtaagaaggaggaataagctataaactctgttagggggttaagaattaaggtgatttgtataatcctatagccatctaattttaggagtactgctgtgaggactattgacctggcaattgcggcctctatgtgggcttttgggagtcctaggtggagtccatagagagatatttttagtataaatgctatgatgcatgctaatcataaaaggctattaaaccaggaaattgttagttcttgaagctgggtattggtcttaaggtagactcgaaagtgctgataaatttctcaagcatcagtgtttgaataagcggagtttcaaattttggtctgctgtacattagctgtgagacactggagacagagtcttactctgtagctcaggctggagtgcagtggtacaatcttggctcactgcaacctccatctcccaggtccccattcaagaaattctcctgcctcagtcccccaagtagctagcattacaggcatgcaccaccatgctcagctaatttttgtatttttagtagagacgtggtatcaccttgttggccaggctggtcttgaactcctgaccttgtgatccacctgccttggcctcccaaagtgttgggattacaggcaggagccaccacacctggccgtttgtttaaaatagagtaaatagacctgctgaatatgttgatgtgagtattaattgtaatctgcatagcaattgtctgaccattgccttgaacatcacaggccatctgagtggcaagtataatcatcatcatgtttctatttaaaattcagaaatatttgaagcctgtgtggctgaataaaaatagtaacttcgtttgctgttatctctgtctactttcctagctctcaaaggtctatggccctgtgttcactctgtattttggcctgaaacccatagtggtgctgcatggatatgaagcagtgaaggaagccctgattgatcttggagaggagttttctggaagaggcattttcccactggctgaaagagctaacagaggatttggaattgttttcagcaatggaaagaaatggaaggagatccggcgtttctccctcatgacgctgcggaattttgggatggggaagaggagcattgaggaccgtgttcaagaggaagcccgctgccttgtggaggagttgagaaaaaccaaggcctcaccctgtgatcccactttcatcctgggctgtgctccctgcaatgtgatctgctccattattttccataaacgttttgattataaagatcagcaatttcttaacttaatggaaaagttgaatgaaaacatcaagattttgagcagcccctggatccagatctgcaataatttttctcctatcattgattacttcccgggaactcacaacaaattacttaaaaacgttgcttttatgaaaagttatattttggaaaaagtaaaagaacaccaagaatcaatggacatgaacaaccctcaggactttattgattgcttcctgatgaaaatggagaaggaaaagcacaaccaaccatctgaatttactattgaaagcttggaaaacactgcagttgacttgtttggagctgggacagagacgacaagcacaaccctgagatatgctctccttctcctgctgaagcacccagaggtcacagctaaagtccaggaagagattgaacgtgtgattggcagaaaccggagcccctgcatgcaagacaggagccacatgccctacacagatgctgtggtgcacgaggtccagagatacattgaccttctccccaccagcctgccccatgcagtgacctgtgacattaaattcagaaactatctcattcccaagggcacaaccatattaatttccctgacttctgtgctacatgacaacaaagaatttcccaacccagagatgtttgaccctcatcactttctggatgaaggtggcaattttaagaaaagtaaatacttcatgcctttctcagcaggaaaacggatttgtgtgggagaagccctggccggcatggagctgtttttattcctgacctccattttacagaactttaacctgaaatctctggttgacccaaagaaccttgacaccactccagttgtcaatggatttgcctctgtgccgcccttctaccagctgtgcttcattcctgtctgaagaagagcagatggcctggctgctgctgtgcagtccctgcagctctctttcctctggggcattatccatctttcactatctgtaatgccttttctcacctgtcatctcacattttcccttccctgaagatctagtgaacattcgacctccattacggagagtttcctatgtttcactgtgcaaatatatctgctattctccatactctgtaacagttgcattgactgtcacataatgctcatacttatctaatgttgagttattaatatgttattattaaatagagaaatatgatttgtgtattataattcaaaggcatttcttttctgcatgttctaaataaaaagcattattatttgctga

SEQ ID NO: 300280 - DNA, 1812 bp, Homo sapiens
cgaattagcatggagtgttataaaaggcttggagtgcaagctcatggttgtcttaacaagaagagaaggcttcaatggattctcttgtggtccttgtgctctgtctctcatgtttgcttctcctttcactctggagacagagctctgggagaggaagtattaaggacatcagcaaatccttaaccaatctctcaaaggtctatggccctgtgttcactctgtattttggcctgaaacccatagtggtgctgcatggatatgaagcagtgaaggaagccctgattgatcttggagaggagttttctggaagaggcattttcccactggctgaaagagctaacagaggatttggaattgttttcagcaatggaaagaaatggaaggagatccggcgtttctccctcatgacgctgcggaattttgggatggggaagaggagcattgaggaccgtgttcaagaggaagcccgctgccttgtggaggagttgagaaaaaccaaggaatgtgatctgctccattattttccataaacgttttgattataaagatcagcaatttcttaacttaatggaaaagttgaatgaaaacatcaagattttgagcagcccctggatccagatctgcaataatttttctcctatcattgattacttcccgggaactcacaacaaattacttaaaaacgttgcttttatgaaaagttatattttggaaaaagtaaaagaacaccaagaatcaatggacatgaacaaccctcaggactttattgattgcttcctgatgaaaatggagaaggaaaagcacaaccaaccatctgaatttactattgaaagcttggaaaacactgcagttgacttgtttggagctgggacagagacgacaagcacaaccctgagatatgctctccttctcctgctgaagcacccagaggtcacagctaaagtccaggaagagattgaacgtgtgattggcagaaaccggagcccctgcatgcaagacaggagccacatgccctacacagatgctgtggtgcacgaggtccagagatacattgaccttctccccaccagcctgccccatgcagtgacctgtgacattaaattcagaaactatctcattcccaagggcacaaccatattaatttccctgacttctgtgctacatgacaacaaagaatttcccaacccagagatgtttgaccctcatcactttctggatgaaggtggcaattttaagaaaagtaaatacttcatgcctttctcagcaggaaaacggatttgtgtgggagaagccctggccggcatggagctgtttttattcctgacctccattttacagaactttaacctgaaatctctggttgacccaaagaaccttgacaccactccagttgtcaatggatttgcctctgtgccgcccttctaccagctgtgcttcattcctgtctgaagaagagcagatggcctggctgctgctgtgcagtccctgcagctctctttcctctggggcattatccatctttcactatctgtaatgccttttctcacctgtcatctcacattttcccttccctgaagatctagtgaacattcgacctccattacggagagtttcctatgtttcactgtgcaaatatatctgctattctccatactctgtaacagttgcattgactgtcacataatgctcatacttatctaatgttgagttattaatatgttattattaaatagagaaatatgatttgtgtattataattcaaaggcatttcttttctgcatgttctaaataaaaagcattattatttgctga

SEQ ID NO: 300281 - DNA, 1866 bp, Homo sapiens
cgaattagcatggagtgttataaaaggcttggagtgcaagctcatggttgtcttaacaagaagagaaggcttcaatggattctcttgtggtccttgtgctctgtctctcatgtttgcttctcctttcactctggagacagagctctgggagaggaaaactccctcctggccccactcctctcccagtgattggaaatatcctacagataggtattaaggacatcagcaaatccttaaccaatctctcaaaggtctatggccctgtgttcactctgtattttggcctgaaacccatagtggtgctgcatggatatgaagcagtgaaggaagccctgattgatcttggagaggagttttctggaagaggcattttcccactggctgaaagagctaacagaggatttggaattgttttcagcaatggaaagaaatggaaggagatccggcgtttctccctcatgacgctgcggaattttgggatggggaagaggagcattgaggaccgtgttcaagaggaagcccgctgccttgtggaggagttgagaaaaaccaaggaatgtgatctgctccattattttccataaacgttttgattataaagatcagcaatttcttaacttaatggaaaagttgaatgaaaacatcaagattttgagcagcccctggatccagatctgcaataatttttctcctatcattgattacttcccgggaactcacaacaaattacttaaaaacgttgcttttatgaaaagttatattttggaaaaagtaaaagaacaccaagaatcaatggacatgaacaaccctcaggactttattgattgcttcctgatgaaaatggagaaggaaaagcacaaccaaccatctgaatttactattgaaagcttggaaaacactgcagttgacttgtttggagctgggacagagacgacaagcacaaccctgagatatgctctccttctcctgctgaagcacccagaggtcacagctaaagtccaggaagagattgaacgtgtgattggcagaaaccggagcccctgcatgcaagacaggagccacatgccctacacagatgctgtggtgcacgaggtccagagatacattgaccttctccccaccagcctgccccatgcagtgacctgtgacattaaattcagaaactatctcattcccaagggcacaaccatattaatttccctgacttctgtgctacatgacaacaaagaatttcccaacccagagatgtttgaccctcatcactttctggatgaaggtggcaattttaagaaaagtaaatacttcatgcctttctcagcaggaaaacggatttgtgtgggagaagccctggccggcatggagctgtttttattcctgacctccattttacagaactttaacctgaaatctctggttgacccaaagaaccttgacaccactccagttgtcaatggatttgcctctgtgccgcccttctaccagctgtgcttcattcctgtctgaagaagagcagatggcctggctgctgctgtgcagtccctgcagctctctttcctctggggcattatccatctttcactatctgtaatgccttttctcacctgtcatctcacattttcccttccctgaagatctagtgaacattcgacctccattacggagagtttcctatgtttcactgtgcaaatatatctgctattctccatactctgtaacagttgcattgactgtcacataatgctcatacttatctaatgttgagttattaatatgttattattaaatagagaaatatgatttgtgtattataattcaaaggcatttcttttctgcatgttctaaataaaaagcattattatttgctga

SEQ ID NO: 300282 - DNA, 1856 bp, Homo sapiens
cgaattagcatggagtgttataaaaggcttggagtgcaagctcatggttgtcttaacaagaagagaaggcttcaatggattctcttgtggtccttgtgctctgtctctcatgtttgcttctcctttcactctggagacagagctctgggagaggaaaactccctcctggccccactcctctcccagtgattggaaatatcctacagataggtattaaggacatcagcaaatccttaaccaatctctcaaaggtctatggccctgtgttcactctgtattttggcctgaaacccatagtggtgctgcatggatatgaagcagtgaaggaagccctgattgatcttggagaggagttttctggaagaggcattttcccactggctgaaagagctaacagaggatttggaattgttttcagcaatggaaagaaatggaaggagatccggcgtttctccctcatgacgctgcggaattttgggatggggaagaggagcattgaggaccgtgttcaagaggaagcccgctgccttgtggaggagttgagaaaaaccaaggcctcaccctgtgatcccactttcatcctgggctgtgctccctgcaatgtgatctgctccattattttccataaacgttttgattataaagatcagcaatttcttaacttaatggaaaagttgaatgctatcattgattacttcccgggaactcacaacaaattacttaaaaacgttgcttttatgaaaagttatattttggaaaaagtaaaagaacaccaagaatcaatggacatgaacaaccctcaggactttattgattgcttcctgatgaaaatggagaaggaaaagcacaaccaaccatctgaatttactattgaaagcttggaaaacactgcagttgacttgtttggagctgggacagagacgacaagcacaaccctgagatatgctctccttctcctgctgaagcacccagaggtcacagctaaagtccaggaagagattgaacgtgtgattggcagaaaccggagcccctgcatgcaagacaggagccacatgccctacacagatgctgtggtgcacgaggtccagagatacattgaccttctccccaccagcctgccccatgcagtgacctgtgacattaaattcagaaactatctcattcccaagggcacaaccatattaatttccctgacttctgtgctacatgacaacaaagaatttcccaacccagagatgtttgaccctcatcactttctggatgaaggtggcaattttaagaaaagtaaatacttcatgcctttctcagcaggaaaacggatttgtgtgggagaagccctggccggcatggagctgtttttattcctgacctccattttacagaactttaacctgaaatctctggttgacccaaagaaccttgacaccactccagttgtcaatggatttgcctctgtgccgcccttctaccagctgtgcttcattcctgtctgaagaagagcagatggcctggctgctgctgtgcagtccctgcagctctctttcctctggggcattatccatctttcactatctgtaatgccttttctcacctgtcatctcacattttcccttccctgaagatctagtgaacattcgacctccattacggagagtttcctatgtttcactgtgcaaatatatctgctattctccatactctgtaacagttgcattgactgtcacataatgctcatacttatctaatgttgagttattaatatgttattattaaatagagaaatatgatttgtgtattataattcaaaggcatttcttttctgcatgttctaaataaaaagcattattatttgctga

SEQ ID NO: 300283 - DNA, 2505 bp, Homo sapiens
cgaattagcatggagtgttataaaaggcttggagtgcaagctcatggttgtcttaacaagaagagaaggcttcaatggattctcttgtggtccttgtgctctgtctctcatgtttgcttctcctttcactctggagacagagctctgggagaggaagtattaaggacatcagcaaatccttaaccaatctctcaaaggtctatggccctgtgttcactctgtattttggcctgaaacccatagtggtgctgcatggatatgaagcagtgaaggaagccctgattgatcttggagaggagttttctggaagaggcattttcccactggctgaaagagctaacagaggatttggaattgttttcagcaatggaaagaaatggaaggagatccggcgtttctccctcatgacgctgcggaattttgggatggggaagaggagcattgaggaccgtgttcaagaggaagcccgctgccttgtggaggagttgagaaaaaccaaggcctcaccctgtgatcccactttcatcctgggctgtgctccctgcaatgtgatctgctccattattttccataaacgttttgattataaagatcagcaatttcttaacttaatggaaaagttgaatgaaaacatcaagattttgagcagcccctggatccagatctgcaataatttttctcctatcattgattacttcccgggaactcacaacaaattacttaaaaacgttgcttttatgaaaagttatattttggaaaaagtaaaagaacaccaagaatcaatggacatgaacaaccctcaggactttattgattgcttcctgatgaaaatggagaaggaaaagcacaaccaaccatctgaatttactattgaaagcttggaaaacactgcagttgacttgtttggagctgggacagagacgacaagcacaaccctgagatatgctctccttctcctgctgaagcacccagaggtcacagctaaagtccaggaagagattgaacgtgtgattggcagaaaccggagcccctgcatgcaagacaggagccacatgccctacacagatgctgtggtgcacgaggtccagagatacattgaccttctccccaccagcctgccccatgcagtgacctgtgacattaaattcagaaactatctcattcccaagggcacaaccatattaatttccctgacttctgtgctacatgacaacaaagaatttcccaacccagagatgtttgaccctcatcactttctggatgaaggtggcaattttaagaaaagtaaatacttcatgcctttctcagcaggaaaacggatttgtgtgggagaagccctggccggcatggagctgtttttattcctgacctccattttacagaactttaacctgaaatctctggttgacccaaagaaccttgacaccactccagttgtcaatggatttgcctctgtgccgcccttctaccagctgtgcttcattcctgtctgaagaagagcagatggcctggctgctgctgtgcagtccctgcagctctctttcctctggggcattatccatctttcactatctgtaatgccttttctcacctgtcatctcacattttcccttccctgaagatctagtgaacattcgacctccattacggagagtttcctatgtttcactgtgcaaatatatctgctattctccatactctgtaacagttgcattgactgtcacataatgctcatacttatctaatgttgagttattaatatgttattattaaatagagaaatatgatttgtgtattataattcaaaggcatttcttttctgcatgttctaaataaaaagcattattatttgctgatgagtcagtttattagaccttccttcttttatgcataatgtaggtcagaaattaaagaaaatagagttccaggaggccatgctggttctcgtgagtgttagagttacttgaggattggatttgaaagtgagaaactgtgtccaggggcagctctaacctctagggaaatattcagaggatcagtcaaagggtggaatggacattaaatgctagaattcttatatccacattggtgttcctttttttttgagacaaagtcttgctctgtcacccaggctggagtgcagtggtgtgatctcagctctctataacctccgcctcccaggttcaagtgattctcctgcctcagcctcctgagtagctgggattacaggtgcatgccaccacacctggctaattttttgtatttttagtacagacgggttttcaccgtgttagccaggatggtcttaatctcctgaccttgtgatctgcctgcctcagcctcccaaagtgctgggattacaggtgtgagccactgcgcctggcctggtgttactttgaagtgtcattactttatctctaaataaagaatcagattacttttattacttcatgtttccaacttagaatgatgtaatgaagtataaatacatgctttcatatcgct

SEQ ID NO: 300284 - DNA, 1796 bp, Homo sapiens
cgaattagcatggagtgttataaaaggcttggagtgcaagctcatggttgtcttaacaagaagagaaggcttcaatggattctcttgtggtccttgtgctctgtctctcatgtttgcttctcctttcactctggagacagagctctgggagaggaagtattaaggacatcagcaaatccttaaccaatctctcaaaggtctatggccctgtgttcactctgtattttggcctgaaacccatagtggtgctgcatggatatgaagcagtgaaggaagccctgattgatcttggagaggagttttctggaagaggcattttcccactggctgaaagagctaacagaggatttggaattgttttcagcaatggaaagaaatggaaggagatccggcgtttctccctcatgacgctgcggaattttgggatggggaagaggagcattgaggaccgtgttcaagaggaagcccgctgccttgtggaggagttgagaaaaaccaaggcctcaccctgtgatcccactttcatcctgggctgtgctccctgcaatgtgatctgctccattattttccataaacgttttgattataaagatcagcaatttcttaacttaatggaaaagttgaatgaaaacatcaagattttgagcagcccctggatccagatctgcaataatttttctcctatcattgattacttcccgggaactcacaacaaattacttaaaaacgttgcttttatgaaaagttatattttggaaaaagtaaaagaacaccaagaatcaatggacatgaacaaccctcaggactttattgattgcttcctgatgaaaatggagaaggaaaagcacaaccaaccatctgaatttactattgaaagcttggaaaacactgcagttgacttgtttggagctgggacagagacgacaagcacaaccctgagatatgctctccttctcctgctgaagcacccagaggtcacagctaaagtccaggaagagattgaacgtgtgattggcagaaaccggagcccctgcatgcaagacaggagccacatgccctacacagatgctgtggtgcacgaggtccagagatacattgaccttctccccaccagcctgccccatgcagtgacctgtgacattaaattcagaaactatctcattcccaagggcacaaccatattaatttccctgacttctgtgctacatgacaacaaagaatttcccaacccagagatgtttgaccctcatcactttctggatgaaggtggcaattttaagaaaagtaaatacttcatgcctttctcagcaggaaaacggatttgtgtgggagaagccctggccggcatggagctgtttttattcctgacctccattttacagaactttaacctgaaatctctggttgacccaaagaaccttgacaccactccagttgtcaatggatttgcctctgtgccgcccttctaccagctgtgcttcattcctgtctgaagaagagcagatggcctggctgctgctgtgcagtccctgcagctctctttcctctggggcattatccatctttcactatctgtaatgccttttctcacctgtcatctcacattttcccttccctgaagatctagtgaacattcgacctccattacggagagtttcctatgtttcactgtgcaaatatatctgctttgagttattaatatgttattattaaatagagaaatatgatttgtgtattataattcaaaggcatttcttttctgcatgttctaaataaaaagcattattatttgctga

SEQ ID NO: 300285 - DNA, 1802 bp, Homo sapiens
cgaattagcatggagtgttataaaaggcttggagtgcaagctcatggttgtcttaacaagaagagaaggcttcaatggattctcttgtggtccttgtgctctgtctctcatgtttgcttctcctttcactctggagacagagctctgggagaggaagtattaaggacatcagcaaatccttaaccaatctctcaaaggtctatggccctgtgttcactctgtattttggcctgaaacccatagtggtgctgcatggatatgaagcagtgaaggaagccctgattgatcttggagaggagttttctggaagaggcattttcccactggctgaaagagctaacagaggatttggaattgttttcagcaatggaaagaaatggaaggagatccggcgtttctccctcatgacgctgcggaattttgggatggggaagaggagcattgaggaccgtgttcaagaggaagcccgctgccttgtggaggagttgagaaaaaccaaggcctcaccctgtgatcccactttcatcctgggctgtgctccctgcaatgtgatctgctccattattttccataaacgttttgattataaagatcagcaatttcttaacttaatggaaaagttgaatgaaaacatcaagattttgagcagcccctggatccagatctgcaataatttttctcctatcattgattacttcccgggaactcacaacaaattacttaaaaacgttgcttttatgaaaagttatattttggaaaaagtaaaagaacaccaagaatcaatggacatgaacaaccctcaggactttattgattgcttcctgatgaaaatggagaaggaaaagcacaaccaaccatctgaatttactattgaaagcttggtgagatatgctctccttctcctgctgaagcacccagaggtcacagctaaagtccaggaagagattgaacgtgtgattggcagaaaccggagcccctgcatgcaagacaggagccacatgccctacacagatgctgtggtgcacgaggtccagagatacattgaccttctccccaccagcctgccccatgcagtgacctgtgacattaaattcagaaactatctcattcccaagggcacaaccatattaatttccctgacttctgtgctacatgacaacaaagaatttcccaacccagagatgtttgaccctcatcactttctggatgaaggtggcaattttaagaaaagtaaatacttcatgcctttctcagcaggaaaacggatttgtgtgggagaagccctggccggcatggagctgtttttattcctgacctccattttacagaactttaacctgaaatctctggttgacccaaagaaccttgacaccactccagttgtcaatggatttgcctctgtgccgcccttctaccagctgtgcttcattcctgtctgaagaagagcagatggcctggctgctgctgtgcagtccctgcagctctctttcctctggggcattatccatctttcactatctgtaatgccttttctcacctgtcatctcacattttcccttccctgaagatctagtgaacattcgacctccattacggagagtttcctatgtttcactgtgcaaatatatctgctattctccatactctgtaacagttgcattgactgtcacataatgctcatacttatctaatgttgagttattaatatgttattattaaatagagaaatatgatttgtgtattataattcaaaggcatttcttttctgcatgttctaaataaaaagcattattatttgctga

SEQ ID NO: 300286 - DNA, 1667 bp, Homo sapiens
cgaattagcatggagtgttataaaaggcttggagtgcaagctcatggttgtcttaacaagaagagaaggcttcaatggattctcttgtggtccttgtgctctgtctctcatgtttgcttctcctttcactctggagacagagctctgggagaggaaaactccctcctggccccactcctctcccagtgattggaaatatcctacagataggtattaaggacatcagcaaatccttaaccaatctctcaaaggtctatggccctgtgttcactctgtattttggcctgaaacccatagtggtgctgcatggatatgaagcagtgaaggaagccctgattgatcttggagaggagttttctggaagaggcattttcccactggctgaaagagctaacagaggatttggaattgttttcagcaatggaaagaaatggaaggagatccggcgtttctccctcatgacgctgcggaattttgggatggggaagaggagcattgaggaccgtgttcaagaggaagcccgctgccttgtggaggagttgagaaaaaccaaggcctcaccctgtgatcccactttcatcctgggctgtgctccctgcaatgtgatctgctccattattttccataaacgttttgattataaagatcagcaatttcttaacttaatggaaaagttgaatgaaaacatcaagattttgagcagcccctggatccagatctgcaataatttttctcctatcattgattacttcccgggaactcacaacaaattacttaaaaacgttgcttttatgaaaagttatattttggaaaaagtaaaagaacaccaagaatcaatggacatgaacaaccctcaggactttattgattgcttcctgatgaaaatggagaaggaaaagcacaaccaaccatctgaatttactattgaaagcttggaaaacactgcagttgacttgtttggagctgggacagagacgacaagcacaaccctgagatatgctctccttctcctgctgaagcacccagaggtcacagctaaagtccaggaagagattgaacgtgtgattggcagaaaccggagcccctgcatgcaagacaggagccacatgccctacacagatgctgtggtgcacgaggtccagagatacattgaccttctccccaccagcctgccccatgcagtgacctgtgacattaaattcagaaactatctcattcccaagggcacaaccatattaatttccctgacttctgtgctacatgacaacaaagaatttcccaacccagagatgtttgaccctcatcactttctggatgaaggtggcaattttaagaaaagtaaatacttcatgcctttctcagcaggaaaacggatttgtgtgggagaagccctggccggcatggagctgtttttattcctgacctccattttacagaactttaacctgaaatctctggttgacccaaagaaccttgacaccactccagttgtcaatggatttgcctctgtgccgcccttctaccagctgtgcttcattcctgtctgaagaagagcagatggcctggctgctgctgtgcagtccctgcagctctctttcctctggggcattatccatctttgctacattacagaaatggagatgctgctgagatgagaaagggaattc

SEQ ID NO: 300287 - DNA, 2397 bp, Homo sapiens
cgaattagcatggagtgttataaaaggcttggagtgcaagctcatggttgtcttaacaagaagagaaggcttcaatggattctcttgtggtccttgtgctctgtctctcatgtttgcttctcctttcactctggagacagagctctgggagaggaagtattaaggacatcagcaaatccttaaccaatctctcaaaggtctatggccctgtgttcactctgtattttggcctgaaacccatagtggtgctgcatggatatgaagcagtgaaggaagccctgattgatcttggagaggagttttctggaagaggcattttcccactggctgaaagagctaacagaggatttggaattgttttcagcaatggaaagaaatggaaggagatccggcgtttctccctcatgacgctgcggaattttgggatggggaagaggagcattgaggaccgtgttcaagaggaagcccgctgccttgtggaggagttgagaaaaaccaaggcctcaccctgtgatcccactttcatcctgggctgtgctccctgcaatgtgatctgctccattattttccataaacgttttgattataaagatcagcaatttcttaacttaatggaaaagttgaatgaaaacatcaagattttgagcagcccctggatccagatctgcaataatttttctcctatcattgattacttcccgggaactcacaacaaattacttaaaaacgttgcttttatgaaaagttatattttggaaaaagtaaaagaacaccaagaatcaatggacatgaacaaccctcaggactttattgattgcttcctgatgaaaatggagaaggaaaagcacaaccaaccatctgaatttactattgaaagcttggtgagatatgctctccttctcctgctgaagcacccagaggtcacagctaaagtccaggaagagattgaacgtgtgattggcagaaaccggagcccctgcatgcaagacaggagccacatgccctacacagatgctgtggtgcacgaggtccagagatacattgaccttctccccaccagcctgccccatgcagtgacctgtgacattaaattcagaaactatctcattcccaagggcacaaccatattaatttccctgacttctgtgctacatgacaacaaagaatttcccaacccagagatgtttgaccctcatcactttctggatgaaggtggcaattttaagaaaagtaaatacttcatgcctttctcagcagtgacctccattttacagaactttaacctgaaatctctggttgacccaaagaaccttgacaccactccagttgtcaatggatttgcctctgtgccgcccttctaccagctgtgcttcattcctgtctgaagaagagcagatggcctggctgctgctgtgcagtccctgcagctctctttcctctggggcattatccatctttcactatctgtaatgccttttctcacctgtcatctcacattttcccttccctgaagatctagtgaacattcgacctccattacggagagtttcctatgtttcactgtgcaaatatatctgctattctccatactctgtaacagttgcattgactgtcacataatgctcatacttatctaatgttgagttattaatatgttattattaaatagagaaatatgatttgtgtattataattcaaaggcatttcttttctgcatgttctaaataaaaagcattattatttgctgatgagtcagtttattagaccttccttcttttatgcataatgtaggtcagaaattaaagaaaatagagttccaggaggccatgctggttctcgtgagtgttagagttacttgaggattggatttgaaagtgagaaactgtgtccaggggcagctctaacctctagggaaatattcagaggatcagtcaaagggtggaatggacattaaatgctagaattcttatatccacattggtgttcctttttttttgagacaaagtcttgctctgtcacccaggctggagtgcagtggtgtgatctcagctctctataacctccgcctcccaggttcaagtgattctcctgcctcagcctcctgagtagctgggattacaggtgcatgccaccacacctggctaattttttgtatttttagtacagacgggttttcaccgtgttagccaggatggtcttaatctcctgaccttgtgatctgcctgcctcagcctcccaaagtgctgggattacaggtgtgagccactgcgcctggcctggtgttactttgaagtgtcattactttatctctaaataaagaatcagattacttttattacttcatgtttccaacttagaatgatgtaatgaagtataaatacatgctttcatatcgct

SEQ ID NO: 300288 - DNA, 2451 bp, Homo sapiens
cgaattagcatggagtgttataaaaggcttggagtgcaagctcatggttgtcttaacaagaagagaaggcttcaatggattctcttgtggtccttgtgctctgtctctcatgtttgcttctcctttcactctggagacagagctctgggagaggaagtattaaggacatcagcaaatccttaaccaatctctcaaaggtctatggccctgtgttcactctgtattttggcctgaaacccatagtggtgctgcatggatatgaagcagtgaaggaagccctgattgatcttggagaggagttttctggaagaggcattttcccactggctgaaagagctaacagaggatttggaattgttttcagcaatggaaagaaatggaaggagatccggcgtttctccctcatgacgctgcggaattttgggatggggaagaggagcattgaggaccgtgttcaagaggaagcccgctgccttgtggaggagttgagaaaaaccaaggcctcaccctgtgatcccactttcatcctgggctgtgctccctgcaatgtgatctgctccattattttccataaacgttttgattataaagatcagcaatttcttaacttaatggaaaagttgaatgaaaacatcaagattttgagcagcccctggatccagatctgcaataatttttctcctatcattgattacttcccgggaactcacaacaaattacttaaaaacgttgcttttatgaaaagttatattttggaaaaagtaaaagaacaccaagaatcaatggacatgaacaaccctcaggactttattgattgcttcctgatgaaaatggagaaggaaaagcacaaccaaccatctgaatttactattgaaagcttggaaaacactgcagttgacttgtttggagctgggacagagacgacaagcacaaccctgagatatgctctccttctcctgctgaagcacccagaggtcacagctaaagtccaggaagagattgaacgtgtgattggcagaaaccggagcccctgcatgcaagacaggagccacatgccctacacagatgctgtggtgcacgaggtccagagatacattgaccttctccccaccagcctgccccatgcagtgacctgtgacattaaattcagaaactatctcattcccaagggcacaaccatattaatttccctgacttctgtgctacatgacaacaaagaatttcccaacccagagatgtttgaccctcatcactttctggatgaaggtggcaattttaagaaaagtaaatacttcatgcctttctcagcagtgacctccattttacagaactttaacctgaaatctctggttgacccaaagaaccttgacaccactccagttgtcaatggatttgcctctgtgccgcccttctaccagctgtgcttcattcctgtctgaagaagagcagatggcctggctgctgctgtgcagtccctgcagctctctttcctctggggcattatccatctttcactatctgtaatgccttttctcacctgtcatctcacattttcccttccctgaagatctagtgaacattcgacctccattacggagagtttcctatgtttcactgtgcaaatatatctgctattctccatactctgtaacagttgcattgactgtcacataatgctcatacttatctaatgttgagttattaatatgttattattaaatagagaaatatgatttgtgtattataattcaaaggcatttcttttctgcatgttctaaataaaaagcattattatttgctgatgagtcagtttattagaccttccttcttttatgcataatgtaggtcagaaattaaagaaaatagagttccaggaggccatgctggttctcgtgagtgttagagttacttgaggattggatttgaaagtgagaaactgtgtccaggggcagctctaacctctagggaaatattcagaggatcagtcaaagggtggaatggacattaaatgctagaattcttatatccacattggtgttcctttttttttgagacaaagtcttgctctgtcacccaggctggagtgcagtggtgtgatctcagctctctataacctccgcctcccaggttcaagtgattctcctgcctcagcctcctgagtagctgggattacaggtgcatgccaccacacctggctaattttttgtatttttagtacagacgggttttcaccgtgttagccaggatggtcttaatctcctgaccttgtgatctgcctgcctcagcctcccaaagtgctgggattacaggtgtgagccactgcgcctggcctggtgttactttgaagtgtcattactttatctctaaataaagaatcagattacttttattacttcatgtttccaacttagaatgatgtaatgaagtataaatacatgctttcatatcgct

SEQ ID NO: 300289 - DNA, 1585 bp, Homo sapiens
cgaattagcatggagtgttataaaaggcttggagtgcaagctcatggttgtcttaacaagaagagaaggcttcaatggattctcttgtggtccttgtgctctgtctctcatgtttgcttctcctttcactctggagacagagctctgggagaggaaaactccctcctggccccactcctctcccagtgattggaaatatcctacagataggtattaaggacatcagcaaatccttaaccaatctctcaaaggtctatggccctgtgttcactctgtattttggcctgaaacccatagtggtgctgcatggatatgaagcagtgaaggaagccctgattgatcttggagaggagttttctggaagaggcattttcccactggctgaaagagctaacagaggatttggaattgttttcagcaatggaaagaaatggaaggagatccggcgtttctccctcatgacgctgcggaattttgggatggggaagaggagcattgaggaccgtgttcaagaggaagcccgctgccttgtggaggagttgagaaaaaccaagggggtgggtgaccctactccatatcactgaccttactggactactatcttctctactgacattcttggaaacatttcaggggtggccatatctttcattatgagtcctggttgttagctcatgtgaagcgggggtttgaagctgagagccaagggaatttgcacatatttgtgctgtgtgtgtacaggcatgattgtgcgtacagtgtgggtataaaaggttcatttaatcccatgttctcctgaactttgcttttttgctttcaaataagaaatgatgaatatagattttgagttcattttttgaaagagttaaagagcagtgtttttcccattacctattccagaacatgtcaccagagaatacttgacaagtcaacatggtgggaatggccctatcatacccatatggagcatgaaccaaatggcatgtgcttttatttaattggactgtgtttgtatggtcagcctcactgacttctctggggtttcttttaggcccgtgcttgccattctggccagtaatgacattctacagtttttattgcttaggcatatcttagtgcagttctcatcaattattatttctctgtaaacacagcattattttaaaaatagtattaattatttcttgttactgtattgatttatatattttcagtaaatacatcctgtagcataattctgtgaaatacccaaatgtcaatttataaaatgatttatttaacaagattttacttattagtaatagctctgtaatctgcattccctatgtatgatttggctctgtttcagttttgcttatctctttccaaccatatttatgaaattttggcttagaaatttatgttaattattttttttccatggccaactctactcatctatgaagttttacaatgaatctgtttatcagcttggataccaaattaccttggttttaaattctgttttcccaatgaagttaaagactgaaaatcagatttatctgtgaatgacacacacaaactaacagatttccaactgttcaat

SEQ ID NO: 300290 - DNA, 1149 bp, Homo sapiens
cgaattagcatggagtgttataaaaggcttggagtgcaagctcatggttgtcttaacaagaagagaaggcttcaatggattctcttgtggtccttgtgctctgtctctcatgtttgcttctcctttcactctggagacagagctctgggagaggaagtattaaggacatcagcaaatccttaaccaatctctcaaaggtctatggccctgtgttcactctgtattttggcctgaaacccatagtggtgctgcatggatatgaagcagtgaaggaagccctgattgatcttggagaggagttttctggaagaggcattttcccactggctgaaagagctaacagaggatttggaattgttttcagcaatggaaagaaatggaaggagatccggcgtttctccctcatgacgctgcggaattttgggatggggaagaggagcattgaggaccgtgttcaagaggaagcccgctgccttgtggaggagttgagaaaaaccaaggcctcaccctgtgatcccactttcatcctgggctgtgctccctgcaatgtgatctgctccattattttccataaacgttttgattataaagatcagcaatttcttaacttaatggaaaagttgaatgaaaacatcaagattttgagcagcccctggatccagatctgcaataatttttctcctatcattgattacttcccgggaactcacaacaaattacttaaaaacgttgcttttatgaaaagttatattttggaaaaagtaaaagaacaccaagaatcaatggacatgaacaaccctcaggactttattgattgcttcctgatgaaaatggagaaggtaaaatgtaaacaaaagcttagttatgtgactgcttgtgaatttgtgatttgttgactagttctgtgtttactaaggatgtttaactggtcaatcagtaatgcttgagaagcactttaagtttttattgtatgaatgaataacaaaatagaccactagctagactaataaagaagaaaaaagagaagaatcaaatagacacaataaaaatgataaaggggagatcaccactagcccacagaaatataaatacatcagagaatagtataaacacctctatgctaataaactagaaaatctagaagaaatg

SEQ ID NO: 300291 - DNA, 1531 bp, Homo sapiens
cgaattagcatggagtgttataaaaggcttggagtgcaagctcatggttgtcttaacaagaagagaaggcttcaatggattctcttgtggtccttgtgctctgtctctcatgtttgcttctcctttcactctggagacagagctctgggagaggaaaactccctcctggccccactcctctcccagtgattggaaatatcctacagataggtattaaggacatcagcaaatccttaaccaatctctcaaaggtctatggccctgtgttcactctgtattttggcctgaaacccatagtggtgctgcatggatatgaagcagtgaaggaagccctgattgatcttggagaggagttttctggaagaggcattttcccactggctgaaagagctaacagaggatttggaattgttttcagcaatggaaagaaatggaaggagatccggcgtttctccctcatgacgctgcggaattttgggatggggaagaggagcattgaggaccgtgttcaagaggaagcccgctgccttgtggaggagttgagaaaaaccaagggggtgggtgaccctactccatatcactgaccttactggactactatcttctctactgacattcttggaaacatttcaggggtggccatatctttcattatgagtcctggttgttagctcatgtgaagcgggggtttgaagctgagagccaagggaatttgcacatatttgtgctgtgtgtgtacaggcatgattgtgcgtacagtgtgggtataaaaggttcatttaatcccatgttctcctgaactttgcttttttgctttcaaataagaaatgatgaatatagattttgagttcattttttgaaagagttaaagagcagtgtttttcccattacctattccagaacatgtcaccagagaatacttgacaagtcaacatggtgggaatggccctatcatacccatatggagcatgaaccaaatggcatgtgcttttatttaattggactgtgtttgtatggtcagcctcactgacttctctggggtttcttttaggcccgtgcttgccattctggccagtaatgacattctacagtttttattgcttaggcatatcttagtgcagttctcatcaattattatttctctgtaaacacagcattattttaaaaatagtattaattatttcttgttactgtattgatttatatattttcagtaaatacatcctgtagcataattctgtgaaatacccaaatgtcaatttatttccctatgtatgatttggctctgtttcagttttgcttatctctttccaaccatatttatgaaattttggcttagaaatttatgttaattattttttttccatggccaactctactcatctatgaagttttacaatgaatctgtttatcagcttggataccaaattaccttggttttaaattctgttttcccaatgaagttaaagactgaaaatcagatttatctgtgaatgacacacacaaactaacagatttccaactgttcaat

SEQ ID NO: 300292 - DNA, 1652 bp, Homo sapiens
  misc_feature (1637)..(1637): n is a, c, g, or t
gaacatgacggcgccctgggtggccctcgccctcctctggggatcgctgtggcccggctctgggcgtggggaggctgagacacgggagtgcatctactacaacgccaactgggagctggagcgcaccaaccagagcggcctggagcgctgcgaaggcgagcaggacaagcggctgcactgctacgcctcctggcgcaacagctctggcaccatcgagctcgtgaagaagggctgctggctagatgacttcaactgctacgataggcaggagtgtgtggccactgaggagaacccccaggtgtacttctgctgctgtgaaggcaacttctgcaacgagcgcttcactcatttgccagaggctgggggcccggaagtcacgtacgagccacccccgacagcccccaccctgctcacggtgctggcctactcactgctgcccatcgggggcctttccctcatcgtcctgctggccttttggatgtaccggcatcgcaagcccccctacggtcatgtggacatccatgaggaccctgggcctccaccaccatcccctctggtgggcctgaagccactgcagctgctggagatcaaggctcgggggcgctttggctgtgtctggaaggcccagctcatgaatgactttgtagctgtcaagatcttcccactccaggacaagcagtcgtggcagagtgaacgggagatcttcagcacacctggcatgaagcacgagaacctgctacagttcattgctgccgagaagcgaggctccaacctcgaagtagagctgtggctcatcacggccttccatgacaagggctccctcacggattacctcaaggggaacatcatcacatggaacgaactgtgtcatgtagcagagacgatgtcacgaggcctctcatacctgcatgaggatgtgccctggtgccgtggcgagggccacaagccgtctattgcccacagggactttaaaagtaagaatgtattgctgaagagcgacctcacagccgtgctggctgactttggcttggctgttcgatttgagccagggaaacctccaggggacacccacggacaggtaggcacgagacggtacatggctcctgaggtgctcgagggagccatcaacttccagagagatgccttcctgcgcattgacatgtatgccatggggttggtgctgtgggagcttgtgtctcgctgcaaggctgcagacggacccgtggatgagtacatgctgccctttgaggaagagattggccagcacccttcgttggaggagctgcaggaggtggtggtgcacaagaagatgaggcccaccattaaagatcactggttgaaacacccgggcctggcccagctttgtgtgaccatcgaggagtgctgggaccatgatgcagaggctcgcttgtccgcgggctgtgtggaggagcgggtgtccctgattcggaggtcggtcaacggcactacctcggactgtctcgtttccctggtgacctctgtcaccaatgtggacctgccccctaaagagtcaagcatctaagcccaggacatgagtgtctgtccagactcagtggatctgaagaaaaaaaaaaaacctcgtgccgaattttttgggcttcgaggggccaaatttncctatagtgagtcgt

SEQ ID NO: 300293 - DNA, 489 bp, Homo sapiens
  misc_feature (474)..(474): n is a, c, g, or t
catgaaggcaggcatgctgattcctgaagttttccccaggcctctgctggtggacctgctgctgtggttggggctggtgggctctgcctgatccttgggaatatcaagtttactgtcccccaaagcttttcctcactgaagggtcctaacaaaggtgtctttcctgtctgccctatgctgcttagggcctggcccagctttgtgtgaccatcgaggagtgctgggaccatgatgcagaggctcgcttgtccgcgggctgtgtggaggagcgggtgtccctgattcggaggtcggtcaacggcactacctcggactgtctcgtttccctggtgacctctgtcaccaatgtggacctgccccctaaagagtcaagcatctaagcccaggacatgagtgtctgtccagactcagtggatctgaagaaaaaaaaaaaacctcgtgccgaattttttgggcttcgaggggccaaatttncctatagtgagtcgt

SEQ ID NO: 300294 - DNA, 458 bp, Homo sapiens
aaatgtactaaggatccaaacaaagaacctggaaaaagtaactaaaaattaaacttaggaaatcattcctaaaacaatcactgttattattttttaagtgttctccttccctctttgtttttggtcttaatctcagtcagatacatatcatctgtagttccttgtattaatttggtaacaattccattttagattactattatctccaggatatagtatttaaaaattattatccaagtataattgatgctgtgacctcttgtaactgtggtgaatgtggtgaatcgaggttggctatcattgataacctgtctgaattgctctgtcttgcccgccatctggtgcacagaggctgtaactcccatgtcccagctgtgtgtgtatggccagtcactgtaaatcctgccctcctctgtcctcacataggtaggcacgagacggtacatggctcctgaggt

SEQ ID NO: 300295 - DNA, 592 bp, Homo sapiens
atggtttgggcttccaataagattttgtttgaatatcagcgcttcaaggcaagtagtcgtgtctatcctagtaggggccttggtgtctcctttcccctcctgtgtatgtagaggttcaatgaacctttcctagggctgtggagtgaggccagtaagctcagaaagatgactgccatgaaggcaggcatgctgattcctgaagttttccccaggcctctgctggtggacctgctgctgtggttggggctggtgggctctgcctgatccttgggaatatcaagtttactgtcccccaaagcttttcctcactgaagggtcctaacaaaggtgtctttcctgtctgccctatgctgcttagggcctggcccagctttgtgtgaccatcgaggagtgctgggaccatgatgcagaggctcgcttgtccgcgggctgtgtggaggagcgggtgtccctgattcggaggtcggtcaacggcactacctcggactgtctcgtttccctggtgacctctgtcaccaatgtggacctgccccctaaagagtcaagcatctaagcccaggacatgagtgtctgtccagactcagtggatctg

SEQ ID NO: 300296 - DNA, 1988 bp, Homo sapiens
cagttaccttcctggtgtcattgccatcctgggttgacaagctgagagtagaggatacaagtgatgtgaataaaatggaaattgcattgtgcagaagaagaaacaactggaagcagaatcacatgcagcccaactacagattcttatggaattcctcaaggttgcaagaagaaataagagagagcaactggaacagatccagaaggagctaagtgttttggaagaggatattaagagagtggaagaaatgagtggcttatactctcctgtcagtgaggatagcacagtgcctcaatttgaagctccttctccatcacacagtagtattattgattccacagaatacagccaacctccaggtttcagtggcagttctcaggctggagtgcaatggcgctatcttggctcactgcaacctccacctcccaggtacaagcgattctcctgcctcaccctcccaagtagctgggattaccggcgcctgcctccacacctgacaaagaaacagccttggtataatagcacgttagcatcaagacgaaaacgacttactgctcattttgaagacttggagcagtgttacttttctacaaggatgtctcgtatctcagatgacagtcgaactgcaagccagttggatgaatttcaggaatgcttgtccaagtttactcgatataattcagtacgacctttagccacattgtcatatgctagtgatctctataatggttccagtatagtctctagtattgaatttgaccgggattgtgactattttgcgattgctggagttacaaagaagattaaagtctatgaatatgacactgtcatccaggatgcagtggatattcattaccctgagaatgaaatgacctgcaattcgaaaatcagctgtatcagttggagtagttaccataagaacctgttagctagcagtgattatgaaggcactgttattttatgggatggattcacaggacagaggtcaaaggtctatcaggagcatgagaagaggtgttggagtgttgactttaatttgatggatcctaaactcttggcttcaggttctgatgatgcaaaagtgaagctgtggtctaccaatctagacaactcagtggcaagcattgaggcaaaggctaatgtgtgctgtgttaaattcagcccctcttccagataccatttggctttcggctgtgcagatcactgtgtccactactatgatcttcgtaacactaaacagccaatcatggtattcaaaggacaccgtaaagcagtctcttatgcaaagtttgtgagtggtgaggaaattgtctctgcctcaacagacagtcagctaaaactgtggaatgtagggaaaccatactgcctacgttccttcaagggtcatatcaatgaaaaaaactttgtaggcctggcttccaatggagattatatagcttgtggaagtgaaaataactctctctacctgtactataaaggactttctaagactttgctaacttttaagtttgatacagtcaaaagtgttctcgacaaagaccgaaaagaagatgatacaaatgaatttgttagtgctgtgtgctggagggcactaccagatggggagtccaatgtgctgattgctgctaacagtcagggtacaattaaggtgctagaattggtatgaagggttaactcaagtcaaattgtacttgatcctgctgaaatacatctgcagctgacaatgagagaagaaacagaaaatgtcatgtgatgtctctccccaaagtcatcatgggttttggatttgttttgaatatttttttctttttttcttttccctcctttatgacctttgggacattgggaatacccagccaactctccaccatcaatgtaactccatggacattgctgctcttggtggtgttatctaatttttgtgatagggaaacaaattcttttgaataaaaataaataacaaaacaataaaagtttattgagccaca

SEQ ID NO: 300297 - DNA, 430 bp, Homo sapiens
  misc_feature (13)..(13): n is a, c, g, or t
attgaactcctangtcgttcatcatcatttcagccctttgccgccagggccaaaggtggaaagtgatttggaagagaagagcttgtattggtgctagaattggtatgaagggttaactcaagtcaaattgtacttgatcctgctgaaatacatctgcagctgacaatgagagaagaaacagaaaatgtcatgtgatgtctctccccaaagtcatcatgggttttggatttgttttgaatatttttttctttttttcttttccctcctttatgacctttgggacattgggaatacccagccaactctccaccatcaatgtaactccatggacattgctgctcttggtggtgttatctaatttttgtgatagggaaacaaattcttttgaataaaaataaataacaaaacaataaaagtttattgagccaca

SEQ ID NO: 300298 - DNA, 2965 bp, Homo sapiens
ccattcattccagtctcctcaattctttcactgtattaagacggcctgccctctggcacgttttctggaacgaaagcggcttgggacagacagactcccttcgccagggagccccgaccccgagggcgcgccctgagcgtctgagcgcagccccgctgcgtccccagttgtatcccccgccacgcccgcctcttccgccgctcgcgcgcgcgcgcacggccggccacggcgcgccggggttggctgctacagggaccgcggtggcggcggcggcctcgacagcggtagtgccttctactccgcttttttagtttcctccgccccctcccgtgggacgctgttgtgtggctgccttaaaaaaaaacgcaactttattgttcctcagccccacctccggctcggcgggcgtcctcaggatgcactgaggctgaggggaggggaggcggcggagggtcgaggtcgcggtccctctcctccgagcgcccggctggaggggagggagtcacgatgtctggtagccgccaggccgggtcgggctccgctgggacaagccccgggtcctcggcggcctcctcggtgacttccgcctcctcgtctttatcctcttccccgtcgccgccttccgtggcggtttcggcggcagcgctggtgtccggcggggtggcccaggccgccggctcgggcggcctcgggggcccggtgcggcctgtgttggtggcgcccgccgtatcgggtagcggcggcggggcggtgtccacgggcctgtcccggcacagctgcgcggccaggcccagcgccggcgtaggaggcagcagctccagcctaggcagcggcagcaggaagcgacctctcctcgcccccctctgcaacgggctcatcaactcctacgaggacaaaagcaacgacttcgtatgccccatctgctttgatatgattgaagaagcatacatgacaaaatgtggccacagcttttgctacaagtgtattcatcagagtttggaggacaataatagatgtcccaagtgtaactatgttgtggacaatattgaccatctgtatcctaatttcttggtgaatgaactcattcttaaacagaagcaaagatttgaggaaaagaggttcaaattggaccactcagtgagtagcaccaatggccacaggtggcagatatttcaagattggttgggaactgaccaagataaccttgatttggccaatgtcaatcttatgttggagttactagtgcagaagaagaaacaactggaagcagaatcacatgcagcccaactacagattcttatggaattcctcaaggttgcaagaagaaataagagagaggaaatgagtggcttatactctcctgtcagtgaggatagcacagtgcctcaatttgaagctccttctccatcacacagtagtattattgattccacagaatacagccaacctccaggtttcagtggcagttctcagacaaagaaacagccttggtataatagcacgttagcatcaagacgaaaacgacttactgctcattttgaagacttggagcagtgttacttttctacaaggatgtctcgtatctcagatgacagtcgaactgcaagccagttggatgaatttcaggaatgcttgtccaagtttactcgatataattcagtacgacctttagccacattgtcatatgctagtgatctctataatggttccagtatagtctctagtattgaatttgaccgggattgtgactattttgcgattgctggagttacaaagaagattaaagtctatgaatatgacactgtcatccaggatgcagtggatattcattaccctgagaatgaaatgacctgcaattcgaaaatcagctgtatcagttggagtagttaccataagaacctgttagctagcagtgattatgaaggcactgttattttatgggatggattcacaggacagaggtcaaaggtctatcaggagcatgagaagaggtgttggagtgttgactttaatttgatggatcctaaactcttggcttcaggttctgatgatgcaaaagtgaagctgtggtctaccaatctagacaactcagtggcaagcattgaggcaaaggctaatgtgtgctgtgttaaattcagcccctcttccagataccatttggctttcggctgtgcagatcactgtgtccactactatgatcttcgtaacactaaacagccaatcatggtattcaaaggacaccgtaaagcagtctcttatgcaaagtttgtgagtggtgaggaaattgtctctgcctcaacagacagtcagctaaaactgtggaatgtagggaaaccatactgcctacgttccttcaagggtcatatcaatgaaaaaaactttgtaggcctggcttccaatggagattatatagcttgtggaagtgaaaataactctctctacctgtactataaaggactttctaagactttgctaacttttaagtttgatacagtcaaaagtgttctcgacaaagaccgaaaagaagatgatacaaatgaatttgttagtgctgtgtgctggagggcactaccagatggggagtccaatgtgctgattgctgctaacagtcagggtacaattaaggtgctagaattggtatgaagggttaactcaagtcaaattgtacttgatcctgctgaaatacatctgcagctgacaatgagagaagaaacagaaaatgtcatgtgatgtctctccccaaagtcatcatgggttttggatttgttttgaatatttttttctttttttcttttccctcctttatgacctttgggacattgggaatacccagccaactctccaccatcaatgtaactccatggacattgctgctcttggtggtgttatctaatttttgtgatagggaaacaaattcttttgaataaaaataaataacaaaacaataaaagtttattgagccaca

SEQ ID NO: 300299 - DNA, 3142 bp, Homo sapiens
ccattcattccagtctcctcaattctttcactgtattaagacggcctgccctctggcacgttttctggaacgaaagcggcttgggacagacagactcccttcgccagggagccccgaccccgagggcgcgccctgagcgtctgagcgcagccccgctgcgtccccagttgtatcccccgccacgcccgcctcttccgccgctcgcgcgcgcgcgcacggccggccacggcgcgccggggttggctgctacagggaccgcggtggcggcggcggcctcgacagcggtagtgccttctactccgcttttttagtttcctccgccccctcccgtgggacgctgttgtgtggctgccttaaaaaaaaacgcaactttattgttcctcagccccacctccggctcggcgggcgtcctcaggatgcactgaggctgaggggaggggaggcggcggagggtcgaggtcgcggtccctctcctccgagcgcccggctggaggggagggagtcacgatgtctggtagccgccaggccgggtcgggctccgctgggacaagccccgggtcctcggcggcctcctcggtgacttccgcctcctcgtctttatcctcttccccgtcgccgccttccgtggcggtttcggcggcagcgctggtgtccggcggggtggcccaggccgccggctcgggcggcctcgggggcccggtgcggcctgtgttggtggcgcccgccgtatcgggtagcggcggcggggcggtgtccacgggcctgtcccggcacagctgcgcggccaggcccagcgccggcgtaggaggcagcagctccagcctaggcagcggcagcaggaagcgacctctcctcgcccccctctgcaacgggctcatcaactcctacgaggacaaaagcaacgacttcgtatgccccatctgctttgatatgattgaagaagcatacatgacaaaatgtggccacagcttttgctacaagtgtattcatcagagtttggaggacaataatagatgtcccaagtgtaactatgttgtggacaatattgaccatctgtatcctaatttcttggtgaatgaactcattcttaaacagaagcaaagatttgaggaaaagaggttcaaattggaccactcagtgagtagcaccaatggccacaggtggcagatatttcaagattggttgggaactgaccaagataaccttgatttggccaatgtcaatcttatgttggagttactagtgcagaagaagaaacaactggaagcagaatcacatgcagcccaactacagattcttatggaattcctcaaggttgcaagaagaaataagagagagcaactggaacagatccagaaggagctaagtgttttggaagaggatattaagagagtggaagaaatgagtggcttatactctcctgtcagtgaggatagcacagtgcctcaatttgaagctccttctccatcacacagtagtattattgattccacagaatacagccaacctccaggtttcagtggcagttctcaggctggagtgcaatggcgctatcttggctcactgcaacctccacctcccaggtacaagcgattctcctgcctcaccctcccaagtagctgggattaccggcgcctgcctccacacctgacaaagaaacagccttggtataatagcacgttagcatcaagacgaaaacgacttactgctcattttgaagacttggagcagtgttacttttctacaaggatgtctcgtatctcagatgacagtcgaactgcaagccagttggatgaatttcaggaatgcttgtccaagtttactcgatataattcagtacgacctttagccacattgtcatatgctagtgatctctataatggttccagtatagtctctagtattgaatttgaccgggattgtgactattttgcgattgctggagttacaaagaagattaaagtctatgaatatgacactgtcatccaggatgcagtggatattcattaccctgagaatgaaatgacctgcaattcgaaaatcagctgtatcagttggagtagttaccataagaacctgttagctagcagtgattatgaaggcactgttattttatgggatggattcacaggacagaggtcaaaggtctatcaggagcatgagaagaggtgttggagtgttgactttaatttgatggatcctaaactcttggcttcaggttctgatgatgcaaaagtgaagctgtggtctaccaatctagacaactcagtggcaagcattgaggcaaaggctaatgtgtgctgtgttaaattcagcccctcttccagataccatttggctttcggctgtgcagatcactgtgtccactactatgatcttcgtaacactaaacagccaatcatggtattcaaaggacaccgtaaagcagtctcttatgcaaagtttgtgagtggtgaggaaattgtctctgcctcaacagacagtcagctaaaactgtggaatgtagggaaaccatactgcctacgttccttcaagggtcatatcaatgaaaaaaactttgtaggcctggcttccaatggagattatatagcttgtggaagtgaaaataactctctctacctgtactataaaggactttctaagactttgctaacttttaagtttgatacagtcaaaagtgttctcgacaaagaccgaaaagaagatgatacaaatgaatttgttagtgctgtgtgctggagggcactaccagatggggagtccaatgtgctgattgctgctaacagtcagggtacaattaaggtgctagaattggtatgaagggttaactcaagtcaaattgtacttgatcctgctgaaatacatctgcagctgacaatgagagaagaaacagaaaatgtcatgtgatgtctctccccaaagtcatcatgggttttggatttgttttgaatatttttttctttttttcttttccctcctttatgacctttgggacattgggaatacccagccaactctccaccatcaatgtaactccatggacattgctgctcttggtggtgttatctaatttttgtgatagggaaacaaattcttttgaataaaaataaataacaaaacaataaaagtttattgagccaca

SEQ ID NO: 300300 - DNA, 2146 bp, Homo sapiens
tgcagagggaatcgagcgtttgcaggcattcgagctcctggttggtggggtgaaggaatgttggagtagcgaggcagggtggggataataaagagccccatctgctttgatatgattgaagaagcatacatgacaaaatgtggccacagcttttgctacaagtgtattcatcagagtttggaggacaataatagatgtcccaagtgtaactatgttgtggacaatattgaccatctgtatcctaatttcttggtgaatgaactcattcttaaacagaagcaaagatttgaggaaaagaggttcaaattggaccactcagtgagtagcaccaatggccacaggtggcagatatttcaagattggttgggaactgaccaagataaccttgatttggccaatgtcaatcttatgttggagttactagtgcagaagaagaaacaactggaagcagaatcacatgcagcccaactacagattcttatggaattcctcaaggttgcaagaagaaataagagagaggaaatgagtggcttatactctcctgtcagtgaggatagcacagtgcctcaatttgaagctccttctccatcacacagtagtattattgattccacagaatacagccaacctccaggtttcagtggcagttctcagacaaagaaacagccttggtataatagcacgttagcatcaagacgaaaacgacttactgctcattttgaagacttggagcagtgttacttttctacaaggatgtctcgtatctcagatgacagtcgaactgcaagccagttggatgaatttcaggaatgcttgtccaagtttactcgatataattcagtacgacctttagccacattgtcatatgctagtgatctctataatggttccagtatagtctctagtattgaatttgaccgggattgtgactattttgcgattgctggagttacaaagaagattaaagtctatgaatatgacactgtcatccaggatgcagtggatattcattaccctgagaatgaaatgacctgcaattcgaaaatcagctgtatcagttggagtagttaccataagaacctgttagctagcagtgattatgaaggcactgttattttatgggatggattcacaggacagaggtcaaaggtctatcaggagcatgagaagaggtgttggagtgttgactttaatttgatggatcctaaactcttggcttcaggttctgatgatgcaaaagtgaagctgtggtctaccaatctagacaactcagtggcaagcattgaggcaaaggctaatgtgtgctgtgttaaattcagcccctcttccagataccatttggctttcggctgtgcagatcactgtgtccactactatgatcttcgtaacactaaacagccaatcatggtattcaaaggacaccgtaaagcagtctcttatgcaaagtttgtgagtggtgaggaaattgtctctgcctcaacagacagtcagctaaaactgtggaatgtagggaaaccatactgcctacgttccttcaagggtcatatcaatgaaaaaaactttgtaggcctggcttccaatggagattatatagcttgtggaagtgaaaataactctctctacctgtactataaaggactttctaagactttgctaacttttaagtttgatacagtcaaaagtgttctcgacaaagaccgaaaagaagatgatacaaatgaatttgttagtgctgtgtgctggagggcactaccagatggggagtccaatgtgctgattgctgctaacagtcagggtacaattaaggtgctagaattggtatgaagggttaactcaagtcaaattgtacttgatcctgctgaaatacatctgcagctgacaatgagagaagaaacagaaaatgtcatgtgatgtctctccccaaagtcatcatgggttttggatttgttttgaatatttttttctttttttcttttccctcctttatgacctttgggacattgggaatacccagccaactctccaccatcaatgtaactccatggacattgctgctcttggtggtgttatctaatttttgtgatagggaaacaaattcttttgaataaaaataaataacaaaacaataaaagtttattgagccaca

SEQ ID NO: 300301 - DNA, 3025 bp, Homo sapiens
ccattcattccagtctcctcaattctttcactgtattaagacggcctgccctctggcacgttttctggaacgaaagcggcttgggacagacagactcccttcgccagggagccccgaccccgagggcgcgccctgagcgtctgagcgcagccccgctgcgtccccagttgtatcccccgccacgcccgcctcttccgccgctcgcgcgcgcgcgcacggccggccacggcgcgccggggttggctgctacagggaccgcggtggcggcggcggcctcgacagcggtagtgccttctactccgcttttttagtttcctccgccccctcccgtgggacgctgttgtgtggctgccttaaaaaaaaacgcaactttattgttcctcagccccacctccggctcggcgggcgtcctcaggatgcactgaggctgaggggaggggaggcggcggagggtcgaggtcgcggtccctctcctccgagcgcccggctggaggggagggagtcacgatgtctggtagccgccaggccgggtcgggctccgctgggacaagccccgggtcctcggcggcctcctcggtgacttccgcctcctcgtctttatcctcttccccgtcgccgccttccgtggcggtttcggcggcagcgctggtgtccggcggggtggcccaggccgccggctcgggcggcctcgggggcccggtgcggcctgtgttggtggcgcccgccgtatcgggtagcggcggcggggcggtgtccacgggcctgtcccggcacagctgcgcggccaggcccagcgccggcgtaggaggcagcagctccagcctaggcagcggcagcaggaagcgacctctcctcgcccccctctgcaacgggctcatcaactcctacgaggacaaaagcaacgacttcgtatgccccatctgctttgatatgattgaagaagcatacatgacaaaatgtggccacagcttttgctacaagtgtattcatcagagtttggaggacaataatagatgtcccaagtgtaactatgttgtggacaatattgaccatctgtatcctaatttcttggtgaatgaactcattcttaaacagaagcaaagatttgaggaaaagaggttcaaattggaccactcagtgagtagcaccaatggccacaggtggcagatatttcaagattggttgggaactgaccaagataaccttgatttggccaatgtcaatcttatgttggagttactagtgcagaagaagaaacaactggaagcagaatcacatgcagcccaactacagattcttatggaattcctcaaggttgcaagaagaaataagagagagcaactggaacagatccagaaggagctaagtgttttggaagaggatattaagagagtggaagaaatgagtggcttatactctcctgtcagtgaggatagcacagtgcctcaatttgaagctccttctccatcacacagtagtattattgattccacagaatacagccaacctccaggtttcagtggcagttctcagacaaagaaacagccttggtataatagcacgttagcatcaagacgaaaacgacttactgctcattttgaagacttggagcagtgttacttttctacaaggatgtctcgtatctcagatgacagtcgaactgcaagccagttggatgaatttcaggaatgcttgtccaagtttactcgatataattcagtacgacctttagccacattgtcatatgctagtgatctctataatggttccagtatagtctctagtattgaatttgaccgggattgtgactattttgcgattgctggagttacaaagaagattaaagtctatgaatatgacactgtcatccaggatgcagtggatattcattaccctgagaatgaaatgacctgcaattcgaaaatcagctgtatcagttggagtagttaccataagaacctgttagctagcagtgattatgaaggcactgttattttatgggatggattcacaggacagaggtcaaaggtctatcaggagcatgagaagaggtgttggagtgttgactttaatttgatggatcctaaactcttggcttcaggttctgatgatgcaaaagtgaagctgtggtctaccaatctagacaactcagtggcaagcattgaggcaaaggctaatgtgtgctgtgttaaattcagcccctcttccagataccatttggctttcggctgtgcagatcactgtgtccactactatgatcttcgtaacactaaacagccaatcatggtattcaaaggacaccgtaaagcagtctcttatgcaaagtttgtgagtggtgaggaaattgtctctgcctcaacagacagtcagctaaaactgtggaatgtagggaaaccatactgcctacgttccttcaagggtcatatcaatgaaaaaaactttgtaggcctggcttccaatggagattatatagcttgtggaagtgaaaataactctctctacctgtactataaaggactttctaagactttgctaacttttaagtttgatacagtcaaaagtgttctcgacaaagaccgaaaagaagatgatacaaatgaatttgttagtgctgtgtgctggagggcactaccagatggggagtccaatgtgctgattgctgctaacagtcagggtacaattaaggtgctagaattggtatgaagggttaactcaagtcaaattgtacttgatcctgctgaaatacatctgcagctgacaatgagagaagaaacagaaaatgtcatgtgatgtctctccccaaagtcatcatgggttttggatttgttttgaatatttttttctttttttcttttccctcctttatgacctttgggacattgggaatacccagccaactctccaccatcaatgtaactccatggacattgctgctcttggtggtgttatctaatttttgtgatagggaaacaaattcttttgaataaaaataaataacaaaacaataaaagtttattgagccaca

SEQ ID NO: 300302 - DNA, 3104 bp, Homo sapiens
ccattcattccagtctcctcaattctttcactgtattaagacggcctgccctctggcacgttttctggaacgaaagcggcttgggacagacagactcccttcgccagggagccccgaccccgagggcgcgccctgagcgtctgagcgcagccccgctgcgtccccagttgtatcccccgccacgcccgcctcttccgccgctcgcgcgcgcgcgcacggccggccacggcgcgccggggttggctgctacagggaccgcggtggcggcggcggcctcgacagcggtagtgccttctactccgcttttttagtttcctccgccccctcccgtgggacgctgttgtgtggctgccttaaaaaaaaacgcaactttattgttcctcagccccacctccggctcggcgggcgtcctcaggatgcactgaggctgaggggaggggaggcggcggagggtcgaggtcgcggtccctctcctccgagcgcccggctggaggggagggagtcacgatgtctggtagccgccaggccgggtcgggctccgctgggacaagccccgggtcctcggcggcctcctcggtgacttccgcctcctcgtctttatcctcttccccgtcgccgccttccgtggcggtttcggcggcagcgctggtgtccggcggggtggcccaggccgccggctcgggcggcctcgggggcccggtgcggcctgtgttggtggcgcccgccgtatcgggtagcggcggcggggcggtgtccacgggcctgtcccggcacagctgcgcggccaggcccagcgccggcgtaggaggcagcagctccagcctaggcagcggcagcaggaagcgacctctcctcgcccccctctgcaacgggctcatcaactcctacgaggacaaaagcaacgacttcgtatgccccatctgctttgatatgattgaagaagcatacatgacaaaatgtggccacagcttttgctacaagtgtattcatcagagtttggaggacaataatagatgtcccaagtgtaactatgttgtggacaatattgaccatctgtatcctaatttcttggtgaatgaactcattcttaaacagaagcaaagatttgaggaatggccacaggtggcagatatttcaagattggttgggaactgaccaagataaccttgatttggccaatgtcaatcttatgttggagttactagtgcagaagaagaaacaactggaagcagaatcacatgcagcccaactacagattcttatggaattcctcaaggttgcaagaagaaataagagagagcaactggaacagatccagaaggagctaagtgttttggaagaggatattaagagagtggaagaaatgagtggcttatactctcctgtcagtgaggatagcacagtgcctcaatttgaagctccttctccatcacacagtagtattattgattccacagaatacagccaacctccaggtttcagtggcagttctcaggctggagtgcaatggcgctatcttggctcactgcaacctccacctcccaggtacaagcgattctcctgcctcaccctcccaagtagctgggattaccggcgcctgcctccacacctgacaaagaaacagccttggtataatagcacgttagcatcaagacgaaaacgacttactgctcattttgaagacttggagcagtgttacttttctacaaggatgtctcgtatctcagatgacagtcgaactgcaagccagttggatgaatttcaggaatgcttgtccaagtttactcgatataattcagtacgacctttagccacattgtcatatgctagtgatctctataatggttccagtatagtctctagtattgaatttgaccgggattgtgactattttgcgattgctggagttacaaagaagattaaagtctatgaatatgacactgtcatccaggatgcagtggatattcattaccctgagaatgaaatgacctgcaattcgaaaatcagctgtatcagttggagtagttaccataagaacctgttagctagcagtgattatgaaggcactgttattttatgggatggattcacaggacagaggtcaaaggtctatcaggagcatgagaagaggtgttggagtgttgactttaatttgatggatcctaaactcttggcttcaggttctgatgatgcaaaagtgaagctgtggtctaccaatctagacaactcagtggcaagcattgaggcaaaggctaatgtgtgctgtgttaaattcagcccctcttccagataccatttggctttcggctgtgcagatcactgtgtccactactatgatcttcgtaacactaaacagccaatcatggtattcaaaggacaccgtaaagcagtctcttatgcaaagtttgtgagtggtgaggaaattgtctctgcctcaacagacagtcagctaaaactgtggaatgtagggaaaccatactgcctacgttccttcaagggtcatatcaatgaaaaaaactttgtaggcctggcttccaatggagattatatagcttgtggaagtgaaaataactctctctacctgtactataaaggactttctaagactttgctaacttttaagtttgatacagtcaaaagtgttctcgacaaagaccgaaaagaagatgatacaaatgaatttgttagtgctgtgtgctggagggcactaccagatggggagtccaatgtgctgattgctgctaacagtcagggtacaattaaggtgctagaattggtatgaagggttaactcaagtcaaattgtacttgatcctgctgaaatacatctgcagctgacaatgagagaagaaacagaaaatgtcatgtgatgtctctccccaaagtcatcatgggttttggatttgttttgaatatttttttctttttttcttttccctcctttatgacctttgggacattgggaatacccagccaactctccaccatcaatgtaactccatggacattgctgctcttggtggtgttatctaatttttgtgatagggaaacaaattcttttgaataaaaataaataacaaaacaataaaagtttattgagccaca

SEQ ID NO: 300303 - DNA, 3079 bp, Homo sapiens
ccattcattccagtctcctcaattctttcactgtattaagacggcctgccctctggcacgttttctggaacgaaagcggcttgggacagacagactcccttcgccagggagccccgaccccgagggcgcgccctgagcgtctgagcgcagccccgctgcgtccccagttgtatcccccgccacgcccgcctcttccgccgctcgcgcgcgcgcgcacggccggccacggcgcgccggggttggctgctacagggaccgcggtggcggcggcggcctcgacagcggtagtgccttctactccgcttttttagtttcctccgccccctcccgtgggacgctgttgtgtggctgccttaaaaaaaaacgcaactttattgttcctcagccccacctccggctcggcgggcgtcctcaggatgcactgaggctgaggggaggggaggcggcggagggtcgaggtcgcggtccctctcctccgagcgcccggctggaggggagggagtcacgatgtctggtagccgccaggccgggtcgggctccgctgggacaagccccgggtcctcggcggcctcctcggtgacttccgcctcctcgtctttatcctcttccccgtcgccgccttccgtggcggtttcggcggcagcgctggtgtccggcggggtggcccaggccgccggctcgggcggcctcgggggcccggtgcggcctgtgttggtggcgcccgccgtatcgggtagcggcggcggggcggtgtccacgggcctgtcccggcacagctgcgcggccaggcccagcgccggcgtaggaggcagcagctccagcctaggcagcggcagcaggaagcgacctctcctcgcccccctctgcaacgggctcatcaactcctacgaggacaaaagcaacgacttcgtatgccccatctgctttgatatgattgaagaagcatacatgacaaaatgtggccacagcttttgctacaagtgtattcatcagagtttggaggacaataatagatgtcccaagtgtaactatgttgtggacaatattgaccatctgtatcctaatttcttggtgaatgaactcattcttaaacagaagcaaagatttgaggaaaagaggttcaaattggaccactcagtgagtagcaccaatggccacaggtggcagatatttcaagattggttgggaactgaccaagataaccttgatttggccaatgtcaatcttatgttggagttactagtgcagaagaagaaacaactggaagcagaatcacatgcagcccaactacagattcttatggaattcctcaaggttgcaagaagaaataagagagagcaactggaacagatccagaaggagctaagtgttttggaagaggatattaagagagtggaagaaatgagtggcttatactctcctgtcagtgaggatagcacagtgcctcaatttgaagctccttctccatcacacagccttgaattcagttctgatatgcacaggatctttgtcaatggaatacttattattagtattattgattccacagaatacagccaacctccaggtttcagtggcagttctcagacaaagaaacagccttggtataatagcacgttagcatcaagacgaaaacgacttactgctcattttgaagacttggagcagtgttacttttctacaaggatgtctcgtatctcagatgacagtcgaactgcaagccagttggatgaatttcaggaatgcttgtccaagtttactcgatataattcagtacgacctttagccacattgtcatatgctagtgatctctataatggttccagtatagtctctagtattgaatttgaccgggattgtgactattttgcgattgctggagttacaaagaagattaaagtctatgaatatgacactgtcatccaggatgcagtggatattcattaccctgagaatgaaatgacctgcaattcgaaaatcagctgtatcagttggagtagttaccataagaacctgttagctagcagtgattatgaaggcactgttattttatgggatggattcacaggacagaggtcaaaggtctatcaggagcatgagaagaggtgttggagtgttgactttaatttgatggatcctaaactcttggcttcaggttctgatgatgcaaaagtgaagctgtggtctaccaatctagacaactcagtggcaagcattgaggcaaaggctaatgtgtgctgtgttaaattcagcccctcttccagataccatttggctttcggctgtgcagatcactgtgtccactactatgatcttcgtaacactaaacagccaatcatggtattcaaaggacaccgtaaagcagtctcttatgcaaagtttgtgagtggtgaggaaattgtctctgcctcaacagacagtcagctaaaactgtggaatgtagggaaaccatactgcctacgttccttcaagggtcatatcaatgaaaaaaactttgtaggcctggcttccaatggagattatatagcttgtggaagtgaaaataactctctctacctgtactataaaggactttctaagactttgctaacttttaagtttgatacagtcaaaagtgttctcgacaaagaccgaaaagaagatgatacaaatgaatttgttagtgctgtgtgctggagggcactaccagatggggagtccaatgtgctgattgctgctaacagtcagggtacaattaaggtgctagaattggtatgaagggttaactcaagtcaaattgtacttgatcctgctgaaatacatctgcagctgacaatgagagaagaaacagaaaatgtcatgtgatgtctctccccaaagtcatcatgggttttggatttgttttgaatatttttttctttttttcttttccctcctttatgacctttgggacattgggaatacccagccaactctccaccatcaatgtaactccatggacattgctgctcttggtggtgttatctaatttttgtgatagggaaacaaattcttttgaataaaaataaataacaaaacaataaaagtttattgagccaca

SEQ ID NO: 300304 - DNA, 2828 bp, Homo sapiens
ccattcattccagtctcctcaattctttcactgtattaagacggcctgccctctggcacgttttctggaacgaaagcggcttgggacagacagactcccttcgccagggagccccgaccccgagggcgcgccctgagcgtctgagcgcagccccgctgcgtccccagttgtatcccccgccacgcccgcctcttccgccgctcgcgcgcgcgcgcacggccggccacggcgcgccggggttggctgctacagggaccgcggtggcggcggcggcctcgacagcggtagtgccttctactccgcttttttagtttcctccgccccctcccgtgggacgctgttgtgtggctgccttaaaaaaaaacgcaactttattgttcctcagccccacctccggctcggcgggcgtcctcaggatgcactgaggctgaggggaggggaggcggcggagggtcgaggtcgcggtccctctcctccgagcgcccggctggaggggagggagtcacgatgtctggtagccgccaggccgggtcgggctccgctgggacaagccccgggtcctcggcggcctcctcggtgacttccgcctcctcgtctttatcctcttccccgtcgccgccttccgtggcggtttcggcggcagcgctggtgtccggcggggtggcccaggccgccggctcgggcggcctcgggggcccggtgcggcctgtgttggtggcgcccgccgtatcgggtagcggcggcggggcggtgtccacgggcctgtcccggcacagctgcgcggccaggcccagcgccggcgtaggaggcagcagctccagcctaggcagcggcagcaggaagcgacctctcctcgcccccctctgcaacgggctcatcaactcctacgaggacaaaagcaacgacttcgtatgccccatctgctttgatatgattgaagaagcatacatgacaaaatgtggccacagcttttgctacaagtgtattcatcagagtttggaggacaataatagatgtcccaagtgtaactatgttgtggacaatattgaccatctgtatcctaatttcttgggaatcacatgcagcccaactacagattcttatggaattcctcaaggttgcaagaagaaataagagagagcaactggaacagatccagaaggagctaagtgttttggaagaggatattaagagagtggaagaaatgagtggcttatactctcctgtcagtgaggatagcacagtgcctcaatttgaagctccttctccatcacacagtagtattattgattccacagaatacagccaacctccaggtttcagtggcagttctcagacaaagaaacagccttggtataatagcacgttagcatcaagacgaaaacgacttactgctcattttgaagacttggagcagtgttacttttctacaaggatgtctcgtatctcagatgacagtcgaactgcaagccagttggatgaatttcaggaatgcttgtccaagtttactcgatataattcagtacgacctttagccacattgtcatatgctagtgatctctataatggttccagtatagtctctagtattgaatttgaccgggattgtgactattttgcgattgctggagttacaaagaagattaaagtctatgaatatgacactgtcatccaggatgcagtggatattcattaccctgagaatgaaatgacctgcaattcgaaaatcagctgtatcagttggagtagttaccataagaacctgttagctagcagtgattatgaaggcactgttattttatgggatggattcacaggacagaggtcaaaggtctatcaggagcatgagaagaggtgttggagtgttgactttaatttgatggatcctaaactcttggcttcaggttctgatgatgcaaaagtgaagctgtggtctaccaatctagacaactcagtggcaagcattgaggcaaaggctaatgtgtgctgtgttaaattcagcccctcttccagataccatttggctttcggctgtgcagatcactgtgtccactactatgatcttcgtaacactaaacagccaatcatggtattcaaaggacaccgtaaagcagtctcttatgcaaagtttgtgagtggtgaggaaattgtctctgcctcaacagacagtcagctaaaactgtggaatgtagggaaaccatactgcctacgttccttcaagggtcatatcaatgaaaaaaactttgtaggcctggcttccaatggagattatatagcttgtggaagtgaaaataactctctctacctgtactataaaggactttctaagactttgctaacttttaagtttgatacagtcaaaagtgttctcgacaaagaccgaaaagaagatgatacaaatgaatttgttagtgctgtgtgctggagggcactaccagatggggagtccaatgtgctgattgctgctaacagtcagggtacaattaaggtgctagaattggtatgaagggttaactcaagtcaaattgtacttgatcctgctgaaatacatctgcagctgacaatgagagaagaaacagaaaatgtcatgtgatgtctctccccaaagtcatcatgggttttggatttgttttgaatatttttttctttttttcttttccctcctttatgacctttgggacattgggaatacccagccaactctccaccatcaatgtaactccatggacattgctgctcttggtggtgttatctaatttttgtgatagggaaacaaattcttttgaataaaaataaataacaaaacaataaaagtttattgagccaca

SEQ ID NO: 300305 - DNA, 2407 bp, Homo sapiens
tgcagagggaatcgagcgtttgcaggcattcgagctcctggttggtggggtgaaggaatgttggagtagcgaggcagggtggggataataaagagccccatctgctttgatatgattgaagaagcatacatgacaaaatgtggccacagcttttgctacaagtgtattcatcagagtttggaggacaataatagatgtcccaagtgtaactatgttgtggacaatattgaccatctgtatcctaatttcttggtgtgcatactctgtctgctcctctctgcctcccttggttttgaatgctctctttccctctcctgatcctgaaaggctgattcagtgaatgaactcattcttaaacagaagcaaagatttgaggaaaagaggttcaaattggaccactcagtgagtagcaccaatggccacaggtggcagatatttcaagattggttgggaactgaccaagataaccttgatttggccaatgtcaatcttatgttggagttactagtgcagaagaagaaacaactggaagcagaatcacatgcagcccaactacagattcttatggaattcctcaaggttgcaagaagaaataagagagagcaactggaacagatccagaaggagctaagtgttttggaagaggatattaagagagtggaagaaatgagtggcttatactctcctgtcagtgaggatagcacagtgcctcaatttgaagctccttctccatcacacagtagtattattgattccacagaatacagccaacctccaggtttcagtggcagttctcaggctggagtgcaatggcgctatcttggctcactgcaacctccacctcccaggtacaagcgattctcctgcctcaccctcccaagtagctgggattaccggcgcctgcctccacacctgacaaagaaacagccttggtataatagcacgttagcatcaagacgaaaacgacttactgctcattttgaagacttggagcagtgttacttttctacaaggatgtctcgtatctcagatgacagtcgaactgcaagccagttggatgaatttcaggaatgcttgtccaagtttactcgatataattcagtacgacctttagccacattgtcatatgctagtgatctctataatggttccagtatagtctctagtattgaatttgaccgggattgtgactattttgcgattgctggagttacaaagaagattaaagtctatgaatatgacactgtcatccaggatgcagtggatattcattaccctgagaatgaaatgacctgcaattcgaaaatcagctgtatcagttggagtagttaccataagaacctgttagctagcagtgattatgaaggcactgttattttatgggatggattcacaggacagaggtcaaaggtctatcaggagcatgagaagaggtgttggagtgttgactttaatttgatggatcctaaactcttggcttcaggttctgatgatgcaaaagtgaagctgtggtctaccaatctagacaactcagtggcaagcattgaggcaaaggctaatgtgtgctgtgttaaattcagcccctcttccagataccatttggctttcggctgtgcagatcactgtgtccactactatgatcttcgtaacactaaacagccaatcatggtattcaaaggacaccgtaaagcagtctcttatgcaaagtttgtgagtggtgaggaaattgtctctgcctcaacagacagtcagctaaaactgtggaatgtagggaaaccatactgcctacgttccttcaagggtcatatcaatgaaaaaaactttgtaggcctggcttccaatggagattatatagcttgtggaagtgaaaataactctctctacctgtactataaaggactttctaagactttgctaacttttaagtttgatacagtcaaaagtgttctcgacaaagaccgaaaagaagatgatacaaatgaatttgttagtgctgtgtgctggagggcactaccagatggggagtccaatgtgctgattgctgctaacagtcagggtacaattaaggtgctagaattggtatgaagggttaactcaagtcaaattgtacttgatcctgctgaaatacatctgcagctgacaatgagagaagaaacagaaaatgtcatgtgatgtctctccccaaagtcatcatgggttttggatttgttttgaatatttttttctttttttcttttccctcctttatgacctttgggacattgggaatacccagccaactctccaccatcaatgtaactccatggacattgctgctcttggtggtgttatctaatttttgtgatagggaaacaaattcttttgaataaaaataaataacaaaacaataaaagtttattgagccaca

SEQ ID NO: 300306 - DNA, 1713 bp, Homo sapiens
ggctggcgttctagaggatccggaagcaactggaacagatccagaaggagctaagtgttttggaagaggatattaagagagtggaagaaatgagtggcttatactctcctgtcagtgaggatagcacagtgcctcaatttgaagctccttctccatcacacagtagtattattgattccacagaatacagccaacctccaggtttcagtggcagttctcagacaaagaaacagccttggtataatagcacgttagcatcaagacgaaaacgacttactgctcattttgaagacttggagcagtgttacttttctacaaggatgtctcgtatctcagatgacagtcgaactgcaagccagttggatgaatttcaggaatgcttgtccaagtttactcgatataattcagtacgacctttagccacattgtcatatgctagtgatctctataatggttccagtatagtctctagtattgaatttgaccgggattgtgactattttgcgattgctggagttacaaagaagattaaagtctatgaatatgacactgtcatccaggatgcagtggatattcattaccctgagaatgaaatgacctgcaattcgaaaatcagctgtatcagttggagtagttaccataagaacctgttagctagcagtgattatgaaggcactgttattttatgggatggattcacaggacagaggtcaaaggtctatcaggagcatgagaagaggtgttggagtgttgactttaatttgatggatcctaaactcttggcttcaggttctgatgatgcaaaagtgaagctgtggtctaccaatctagacaactcagtggcaagcattgaggcaaaggctaatgtgtgctgtgttaaattcagcccctcttccagataccatttggctttcggctgtgcagatcactgtgtccactactatgatcttcgtaacactaaacagccaatcatggtattcaaaggacaccgtaaagcagtctcttatgcaaagtttgtgagtggtgaggaaattgtctctgcctcaacagacagtcagctaaaactgtggaatgtagggaaaccatactgcctacgttccttcaagggtcatatcaatgaaaaaaactttgtaggcctggcttccaatggagattatatagcttgtggaagtgaaaataactctctctacctgtactataaaggactttctaagactttgctaacttttaagtttgatacagtcaaaagtgttctcgacaaagaccgaaaagaagatgatacaaatgaatttgttagtgctgtgtgctggagggcactaccagatggggagtccaatgtgctgattgctgctaacagtcagggtacaattaaggtgctagaattggtatgaagggttaactcaagtcaaattgtacttgatcctgctgaaatacatctgcagctgacaatgagagaagaaacagaaaatgtcatgtgatgtctctccccaaagtcatcatgggttttggatttgttttgaatatttttttctttttttcttttccctcctttatgacctttgggacattgggaatacccagccaactctccaccatcaatgtaactccatggacattgctgctcttggtggtgttatctaatttttgtgatagggaaacaaattcttttgaataaaaataaataacaaaacaataaaagtttattgagccaca

SEQ ID NO: 300307 - DNA, 1696 bp, Homo sapiens
  misc_feature (44)..(44): n is a, c, g, or t
tctagaggatctccctgtcagtcgctctgggagctaagtgtgtnggaagaggatattaagagagtggaagaaatgagtggcttatactctcctgtcagtgaggatagcacagtgcctcaatttgaagctccttctccatcacacagtagtattattgattccacagaatacagccaacctccaggtttcagtggcagttctcagacaaagaaacagccttggtataatagcacgttagcatcaagacgaaaacgacttactgctcattttgaagacttggagcagtgttacttttctacaaggatgtctcgtatctcagatgacagtcgaactgcaagccagttggatgaatttcaggaatgcttgtccaagtttactcgatataattcagtacgacctttagccacattgtcatatgctagtgatctctataatggttccagtatagtctctagtattgaatttgaccgggattgtgactattttgcgattgctggagttacaaagaagattaaagtctatgaatatgacactgtcatccaggatgcagtggatattcattaccctgagaatgaaatgacctgcaattcgaaaatcagctgtatcagttggagtagttaccataagaacctgttagctagcagtgattatgaaggcactgttattttatgggatggattcacaggacagaggtcaaaggtctatcaggagcatgagaagaggtgttggagtgttgactttaatttgatggatcctaaactcttggcttcaggttctgatgatgcaaaagtgaagctgtggtctaccaatctagacaactcagtggcaagcattgaggcaaaggctaatgtgtgctgtgttaaattcagcccctcttccagataccatttggctttcggctgtgcagatcactgtgtccactactatgatcttcgtaacactaaacagccaatcatggtattcaaaggacaccgtaaagcagtctcttatgcaaagtttgtgagtggtgaggaaattgtctctgcctcaacagacagtcagctaaaactgtggaatgtagggaaaccatactgcctacgttccttcaagggtcatatcaatgaaaaaaactttgtaggcctggcttccaatggagattatatagcttgtggaagtgaaaataactctctctacctgtactataaaggactttctaagactttgctaacttttaagtttgatacagtcaaaagtgttctcgacaaagaccgaaaagaagatgatacaaatgaatttgttagtgctgtgtgctggagggcactaccagatggggagtccaatgtgctgattgctgctaacagtcagggtacaattaaggtgctagaattggtatgaagggttaactcaagtcaaattgtacttgatcctgctgaaatacatctgcagctgacaatgagagaagaaacagaaaatgtcatgtgatgtctctccccaaagtcatcatgggttttggatttgttttgaatatttttttctttttttcttttccctcctttatgacctttgggacattgggaatacccagccaactctccaccatcaatgtaactccatggacattgctgctcttggtggtgttatctaatttttgtgatagggaaacaaattcttttgaataaaaataaataacaaaacaataaaagtttattgagccaca

SEQ ID NO: 300308 - DNA, 1636 bp, Homo sapiens
ataattttctattgtaggaatcacatgcagcccaactacagattcttatggaattcctcaaggttgcaagaagaaataagagagagtagtattattgattccacagaatacagccaacctccaggtttcagtggcagttctcagacaaagaaacagccttggtataatagcacgttagcatcaagacgaaaacgacttactgctcattttgaagacttggagcagtgttacttttctacaaggatgtctcgtatctcagatgacagtcgaactgcaagccagttggatgaatttcaggaatgcttgtccaagtttactcgatataattcagtacgacctttagccacattgtcatatgctagtgatctctataatggttccagtatagtctctagtattgaatttgaccgggattgtgactattttgcgattgctggagttacaaagaagattaaagtctatgaatatgacactgtcatccaggatgcagtggatattcattaccctgagaatgaaatgacctgcaattcgaaaatcagctgtatcagttggagtagttaccataagaacctgttagctagcagtgattatgaaggcactgttattttatgggatggattcacaggacagaggtcaaaggtctatcaggagcatgagaagaggtgttggagtgttgactttaatttgatggatcctaaactcttggcttcaggttctgatgatgcaaaagtgaagctgtggtctaccaatctagacaactcagtggcaagcattgaggcaaaggctaatgtgtgctgtgttaaattcagcccctcttccagataccatttggctttcggctgtgcagatcactgtgtccactactatgatcttcgtaacactaaacagccaatcatggtattcaaaggacaccgtaaagcagtctcttatgcaaagtttgtgagtggtgaggaaattgtctctgcctcaacagacagtcagctaaaactgtggaatgtagggaaaccatactgcctacgttccttcaagggtcatatcaatgaaaaaaactttgtaggcctggcttccaatggagattatatagcttgtggaagtgaaaataactctctctacctgtactataaaggactttctaagactttgctaacttttaagtttgatacagtcaaaagtgttctcgacaaagaccgaaaagaagatgatacaaatgaatttgttagtgctgtgtgctggagggcactaccagatggggagtccaatgtgctgattgctgctaacagtcagggtacaattaaggtgctagaattggtatgaagggttaactcaagtcaaattgtacttgatcctgctgaaatacatctgcagctgacaatgagagaagaaacagaaaatgtcatgtgatgtctctccccaaagtcatcatgggttttggatttgttttgaatatttttttctttttttcttttccctcctttatgacctttgggacattgggaatacccagccaactctccaccatcaatgtaactccatggacattgctgctcttggtggtgttatctaatttttgtgatagggaaacaaattcttttgaataaaaataaataacaaaacaataaaagtttattgagccaca

SEQ ID NO: 300309 - DNA, 3499 bp, Homo sapiens
  misc_feature (3153)..(3155): n is a, c, g, or t
  misc_feature (3157)..(3157): n is a, c, g, or t
  misc_feature (3176)..(3178): n is a, c, g, or t
  misc_feature (3197)..(3197): n is a, c, g, or t
ccattcattccagtctcctcaattctttcactgtattaagacggcctgccctctggcacgttttctggaacgaaagcggcttgggacagacagactcccttcgccagggagccccgaccccgagggcgcgccctgagcgtctgagcgcagccccgctgcgtccccagttgtatcccccgccacgcccgcctcttccgccgctcgcgcgcgcgcgcacggccggccacggcgcgccggggttggctgctacagggaccgcggtggcggcggcggcctcgacagcggtagtgccttctactccgcttttttagtttcctccgccccctcccgtgggacgctgttgtgtggctgccttaaaaaaaaacgcaactttattgttcctcagccccacctccggctcggcgggcgtcctcaggatgcactgaggctgaggggaggggaggcggcggagggtcgaggtcgcggtccctctcctccgagcgcccggctggaggggagggagtcacgatgtctggtagccgccaggccgggtcgggctccgctgggacaagccccgggtcctcggcggcctcctcggtgacttccgcctcctcgtctttatcctcttccccgtcgccgccttccgtggcggtttcggcggcagcgctggtgtccggcggggtggcccaggccgccggctcgggcggcctcgggggcccggtgcggcctgtgttggtggcgcccgccgtatcgggtagcggcggcggggcggtgtccacgggcctgtcccggcacagctgcgcggccaggcccagcgccggcgtaggaggcagcagctccagcctaggcagcggcagcaggaagcgacctctcctcgcccccctctgcaacgggctcatcaactcctacgaggacaaaagcaacgacttcgtatgccccatctgctttgatatgattgaagaagcatacatgacaaaatgtggccacagcttttgctacaagtgtattcatcagagtttggaggacaataatagatgtcccaagtgtaactatgttgtggacaatattgaccatctgtatcctaatttcttggtgaatgaactcattcttaaacagaagcaaagatttgaggaaaagaggttcaaattggaccactcagtgagtagcaccaatggccacaggtggcagatatttcaagattggttgggaactgaccaagataaccttgatttggccaatgtcaatcttatgttggagttactagtgcagaagaagaaacaactggaagcagaatcacatgcagcccaactacagattcttatggaattcctcaaggttgcaagaagaaataagagagagcaactggaacagatccagaaggagctaagtgttttggaagaggatattaagagagtggaagaaatgagtggcttatactctcctgtcagtgaggatagcacagtgcctcaatttgaagctccttctccatcacacagtagtattattgattccacagaatacagccaacctccaggtttcagtggcagttctcaggctggagtgcaatggcgctatcttggctcactgcaacctccacctcccaggtacaagcgattctcctgcctcaccctcccaagtagctgggattaccggcgcctgcctccacacctgacaaagaaacagccttggtataatagcacgttagcatcaagacgaaaacgacttactgctcattttgaagacttggagcagtgttacttttctacaaggatgtctcgtatctcagatgacagtcgaactgcaagccagttggatgaatttcaggaatgcttgtccaagtttactcgatataattcagtacgacctttagccacattgtcatatgctagtgatctctataatggttccagtatagtctctagtattgaatttgaccgggattgtgactattttgcgattgctggagttacaaagaagattaaagtctatgaatatgacactgtcatccaggatgcagtggatattcattaccctgagaatgaaatgacctgcaattcgaaaatcagctgtatcagttggagtagttaccataagaacctgttagctagcagtgattatgaaggcactgttattttatgggatggattcacaggacagaggtcaaaggtctatcaggagcatgagaagaggtgttggagtgttgactttaatttgatggatcctaaactcttggcttcaggttctgatgatgcaaaagtgaagctgtggtctaccaatctagacaactcagtggcaagcattgaggcaaaggctaatgtgtgctgtgttaaattcagcccctcttccagataccatttggctttcggctgtgcagatcactgtgtccactactatgatcttcgtaacactaaacagccaatcatggtattcaaaggacaccgtaaagcagtctcttatgcaaagtttgtgagtggtgaggaaattgtctctgcctcaacagacagtcagctaaaactgtggaatgtagggaaaccatactgcctacgttccttcaagggtcatatcaatgaaaaaaactttgtaggcctggcttccaatggagattatatagcttgtggaagtgaaaataactctctctacctgtactataaaggactttctaagactttgctaacttttaagtttgatacagtcaaaagtgttctcgacaaagaccgaaaagaagatgatacaaatgaatttgttagtgctgtgtgctggagggcactaccagatggggagtccaatgtgctgattgctgctaacagtcagggtacaattaaggtgctagaattggtatgaagggttaactcaagtcaaattgtacttgatcctgctgaaatacatctgcagctgacaatgagagaagaaacagaaaatgtcatgtgatgtctctccccaaagtcatcatgggttttggatttgttttgaatatttttttctttttttcttttccctcctttatgacctttgggacattgggaatacccagccaactctccaccatcaatgtaactccatggacattgctgctcttggtggtgttatctaatttttgtgatagggaaacaaattcttttgaataaaaataaataacaaaacaataaaagtttattgagccacaaaaaaaaaatnnnanaaactcgagtttttttttnnnttttttgtcgcagctgttntaattctcccacgcccctgtccagcaggaaaccccttatagcccaaatccttatcttggagtttctctttagccagggcagcacttgaaagaggttgatgtgatccactactccccagcttgttacaccaacttgaatgaaacgactttctttgggaactattaatgggccgccagaatcacctttgcaagtattgtggtcagcatagggactaattccttcagtccaaaggaacctcagggtgaccccctttggtgcccttgactttgcataacccggggcccttggccatttgtttcccg

SEQ ID NO: 300310 - DNA, 3087 bp, Homo sapiens
ccattcattccagtctcctcaattctttcactgtattaagacggcctgccctctggcacgttttctggaacgaaagcggcttgggacagacagactcccttcgccagggagccccgaccccgagggcgcgccctgagcgtctgagcgcagccccgctgcgtccccagttgtatcccccgccacgcccgcctcttccgccgctcgcgcgcgcgcgcacggccggccacggcgcgccggggttggctgctacagggaccgcggtggcggcggcggcctcgacagcggtagtgccttctactccgcttttttagtttcctccgccccctcccgtgggacgctgttgtgtggctgccttaaaaaaaaacgcaactttattgttcctcagccccacctccggctcggcgggcgtcctcaggatgcactgaggctgaggggaggggaggcggcggagggtcgaggtcgcggtccctctcctccgagcgcccggctggaggggagggagtcacgatgtctggtagccgccaggccgggtcgggctccgctgggacaagccccgggtcctcggcggcctcctcggtgacttccgcctcctcgtctttatcctcttccccgtcgccgccttccgtggcggtttcggcggcagcgctggtgtccggcggggtggcccaggccgccggctcgggcggcctcgggggcccggtgcggcctgtgttggtggcgcccgccgtatcgggtagcggcggcggggcggtgtccacgggcctgtcccggcacagctgcgcggccaggcccagcgccggcgtaggaggcagcagctccagcctaggcagcggcagcaggaagcgacctctcctcgcccccctctgcaacgggctcatcaactcctacgaggacaaaagcaacgacttcgtatgccccatctgctttgatatgattgaagaagcatacatgacaaaatgtggccacagcttttgctacaagtgtattcatcagagtttggaggacaataatagatgtcccaagtgtaactatgttgtggacaatattgaccatctgtatcctaatttcttggtgaatgaactcattcttaaacagaagcaaagatttgaggaaaagaggttcaaattggaccactcagtgagtagcaccaatggccacaggtggcagatatttcaagattggttgggaactgaccaagataaccttgatttggccaatgtcaatcttatgttggagttactagtgcagaagaagaaacaactggaagcagaatcacatgcagcccaactacagattcttatggaattcctcaaggttgcaagaagaaataagagagagcaactggaacagatccagaaggagctaagtgttttggaagaggatattaagagagtggaagaaatgagtggcttatactctcctgtcagtgaggatagcacagtgcctcaatttgaagctccttctccatcacacagtagtattattgattccacagaatacagccaacctccaggtttcagtggcagttctcaggctggagtgcaatggcgctatcttggctcactgcaacctccacctcccaggtacaagcgattctcctgcctcaccctcccaagtagctgggattaccggcgcctgcctccacacctgacaaagaaacagccttggtataatagcacgttagcatcaagacgaaaacgacttactgctcattttgaagacttggagcagtgttacttttctacaaggatgtctcgtatctcagatgacagtcgaactgcaagccagttggatgaatttcaggaatgcttgtccaagtttactcgatataattcagtacgacctttagccacattgtcatatgctagtgatctctataatggttccagtatagtctctagtattgaatttgaccgggattgtgactattttgcgattgctggagttacaaagaagattaaagtctatgaatatgacactgtcatccaggatgcagtggatattcattaccctgagaatgaaatgacctgcaattcgaaaatcagctgtatcagttggagtagttaccataagaacctgttagctagcagtgattatgaaggcactgttattttatgggatggattcacaggacagaggtcaaaggtctatcaggagcatgagaagaggtgttggagtgttgactttaatttgatggatcctaaactcttggcttcaggttctgatgatgcaaaagtgaagctgtggtctaccaatctagacaactcagtggcaagcattgaggcaaaggctaatgtgtgctgtgttaaattcagcccctcttccagataccatttggctttcggctgtgcagatcactgtgtccactactatgatcttcgtaacactaaacagccaatcatggtattcaaaggacaccgtaaagcagtctcttatgcaaagtttgtgagtggtgaggaaattgtctctgcctcaacagacagtcagctaaaactgtggaatgtagggaaaccatactgcctacgttccttcaagggtcatatcaatgaaaaaaactttgtaggcctggcttccaatggagattatatagcttgtggaagtgaaaataactctctctacctgtactataaaggactttctaagactttgctaacttttaagtttgatacagtcaaaagtgttctcgacaaagaccgaaaagaagatgatacaaatgaatttgttagtgctgtgtgctggagggcactaccagatggggagtccaatgtgctgattgctgctaacagtcagggtacaattaaggtgctagaattggtatgaagggttaactcaagtcaaattgtacttgatcctgctgaaatacatctgcagctgacaatgagagaagaaacagaaaatgtcatgtgatgtctctccccaaagtcatcatgggttttggatttgttttgaatatttttttctttttttcttttccctcctttatgacctttgggacattgggaatacccagccaactctccaccatcaatgtaactccatggacattgctgctcttggtggtatagggtgtataggcgatcctctaga

SEQ ID NO: 300311 - DNA, 842 bp, Homo sapiens
  misc_feature (21)..(22): n is a, c, g, or t
  misc_feature (25)..(25): n is a, c, g, or t
cgactctagaggactcccccnntcnagataccatttggctttcggctgtgcagatcactgtgtccactactatgatcttcgtaacactaaacagccaatcatggtattcaaaggacaccgtaaagcagtctcttatgcaaagtttgtgagtggtgaggaaattgtctctgcctcaacagacagtcagctaaaactgtggaatgtagggaaaccatactgcctacgttccttcaagggtcatatcaatgaaaaaaactttgtaggcctggcttccaatggagattatatagcttgtggaagtgaaaataactctctctacctgtactataaaggactttctaagactttgctaacttttaagtttgatacagtcaaaagtgttctcgacaaagaccgaaaagaagatgatacaaatgaatttgttagtgctgtgtgctggagggcactaccagatggggagtccaatgtgctgattgctgctaacagtcagggtacaattaaggtgctagaattggtatgaagggttaactcaagtcaaattgtacttgatcctgctgaaatacatctgcagctgacaatgagagaagaaacagaaaatgtcatgtgatgtctctccccaaagtcatcatgggttttggatttgttttgaatatttttttctttttttcttttccctcctttatgacctttgggacattgggaatacccagccaactctccaccatcaatgtaactccatggacattgctgctcttggtggtgttatctaatttttgtgatagggaaacaaattcttttgaataaaaataaataacaaaacaataaaagtttattgagccaca

SEQ ID NO: 300312 - DNA, 2806 bp, Homo sapiens
  misc_feature (2652)..(2652): n is a, c, g, or t
  misc_feature (2743)..(2743): n is a, c, g, or t
ccattcattccagtctcctcaattctttcactgtattaagacggcctgccctctggcacgttttctggaacgaaagcggcttgggacagacagactcccttcgccagggagccccgaccccgagggcgcgccctgagcgtctgagcgcagccccgctgcgtccccagttgtatcccccgccacgcccgcctcttccgccgctcgcgcgcgcgcgcacggccggccacggcgcgccggggttggctgctacagggaccgcggtggcggcggcggcctcgacagcggtagtgccttctactccgcttttttagtttcctccgccccctcccgtgggacgctgttgtgtggctgccttaaaaaaaaacgcaactttattgttcctcagccccacctccggctcggcgggcgtcctcaggatgcactgaggctgaggggaggggaggcggcggagggtcgaggtcgcggtccctctcctccgagcgcccggctggaggggagggagtcacgatgtctggtagccgccaggccgggtcgggctccgctgggacaagccccgggtcctcggcggcctcctcggtgacttccgcctcctcgtctttatcctcttccccgtcgccgccttccgtggcggtttcggcggcagcgctggtgtccggcggggtggcccaggccgccggctcgggcggcctcgggggcccggtgcggcctgtgttggtggcgcccgccgtatcgggtagcggcggcggggcggtgtccacgggcctgtcccggcacagctgcgcggccaggcccagcgccggcgtaggaggcagcagctccagcctaggcagcggcagcaggaagcgacctctcctcgcccccctctgcaacgggctcatcaactcctacgaggacaaaagcaacgacttcgtatgccccatctgctttgatatgattgaagaagcatacatgacaaaatgtggccacagcttttgctacaagtgtattcatcagagtttggaggacaataatagatgtcccaagtgtaactatgttgtggacaatattgaccatctgtatcctaatttcttggtgaatgaactcattcttaaacagaagcaaagatttgaggaaaagaggttcaaattggaccactcagtgagtagcaccaatggccacaggtggcagatatttcaagattggttgggaactgaccaagataaccttgatttggccaatgtcaatcttatgttggagttactagtgcagaagaagaaacaactggaagcagaatcacatgcagcccaactacagattcttatggaattcctcaaggttgcaagaagaaataagagagagcaactggaacagatccagaaggagctaagtgttttggaagaggatattaagagagtggaagaaatgagtggcttatactctcctgtcagtgaggatagcacagtgcctcaatttgaagctccttctccatcacacagtagtattattgattccacagaatacagccaacctccaggtttcagtggcagttctcagacaaagaaacagccttggtataatagcacgttagcatcaagacgaaaacgacttactgctcattttgaagacttggagcagtgttacttttctacaaggatgtctcgtatctcagatgacagtcgaactgcaagccagttggatgaatttcaggaatgcttgtccaagtttactcgatataattcagtacgacctttagccacattgtcatatgctagtgatctctataatggttccagtatagtctctagtattgaatttgaccgggattgtgactattttgcgattgctggagttacaaagaagattaaagtctatgaatatgacactgtcatccaggatgcagtggatattcattaccctgagaatgaaatgacctgcaattcgaaaatcagctgtatcagttggagtagttaccataagaacctgttagctagcagtgattatgaaggcactgttattttatgggatggattcacaggacagaggtcaaaggtctatcaggagcatgagaagaggtgttggagtgttgactttaatttgatggatcctaaactcttggcttcaggttctgatgatgcaaaagtgaagctgtggtctaccaatctagacaactcagtggcaagcattgaggcaaaggctaatgtgtgctgtgttaaattcagcccctcttccagataccatttggctttcggctgtgcagatcactgtgtccactactatgatcttcgtaacactaaacagccaatcatggtattcaaaggacaccgtaaagcagtctcttatgcaaagtttgtgagtggtgaggaaattgtctctgcctcaacagacagtcagctaaaactgtggaatgtagggaaaccatactgcctacgttccttcaagggtcatatcaatgaaaaaaactttgtaggcctggcttccaatggagattatatagcttgtggaagtgaaaataactctctctacctgtactataaaggactttctaagactttgctaacttttaagtttgatacagtcaaaagtgttctcgacaaagaccgaaaagaagatgatacaaatgaatttgttagtgctgtgtgctggagggcactaccagatggggagtccaatgtnctgattgctgctaacattcagagtgtgtgccctccgttgtcttgataaagggaggggagcacctcctgccgtctggccggtgccccttctngtggcagagcacccttgggtcagcgagcgcttttctgctcctgcaaagttcccgccagcctct

SEQ ID NO: 300313 - DNA, 2703 bp, Homo sapiens
ccattcattccagtctcctcaattctttcactgtattaagacggcctgccctctggcacgttttctggaacgaaagcggcttgggacagacagactcccttcgccagggagccccgaccccgagggcgcgccctgagcgtctgagcgcagccccgctgcgtccccagttgtatcccccgccacgcccgcctcttccgccgctcgcgcgcgcgcgcacggccggccacggcgcgccggggttggctgctacagggaccgcggtggcggcggcggcctcgacagcggtagtgccttctactccgcttttttagtttcctccgccccctcccgtgggacgctgttgtgtggctgccttaaaaaaaaacgcaactttattgttcctcagccccacctccggctcggcgggcgtcctcaggatgcactgaggctgaggggaggggaggcggcggagggtcgaggtcgcggtccctctcctccgagcgcccggctggaggggagggagtcacgatgtctggtagccgccaggccgggtcgggctccgctgggacaagccccgggtcctcggcggcctcctcggtgacttccgcctcctcgtctttatcctcttccccgtcgccgccttccgtggcggtttcggcggcagcgctggtgtccggcggggtggcccaggccgccggctcgggcggcctcgggggcccggtgcggcctgtgttggtggcgcccgccgtatcgggtagcggcggcggggcggtgtccacgggcctgtcccggcacagctgcgcggccaggcccagcgccggcgtaggaggcagcagctccagcctaggcagcggcagcaggaagcgacctctcctcgcccccctctgcaacgggctcatcaactcctacgaggacaaaagcaacgacttcgtatgccccatctgctttgatatgattgaagaagcatacatgacaaaatgtggccacagcttttgctacaagtgtattcatcagagtttggaggacaataatagatgtcccaagtgtaactatgttgtggacaatattgaccatctgtatcctaatttcttggtgaatgaactcattcttaaacagaagcaaagatttgaggaaaagaggttcaaattggaccactcagtgagtagcaccaatggccacaggtggcagatatttcaagattggttgggaactgaccaagataaccttgatttggccaatgtcaatcttatgttggagttactagtgcagaagaagaaacaactggaagcagaatcacatgcagcccaactacagattcttatggaattcctcaaggttgcaagaagaaataagagagagcaactggaacagatccagaaggagctaagtgttttggaagaggatattaagagagtggaagaaatgagtggcttatactctcctgtcagtgaggatagcacagtgcctcaatttgaagctccttctccatcacacagtagtattattgattccacagaatacagccaacctccaggtttcagtggcagttctcagacaaagaaacagccttggtataatagcacgttagcatcaagacgaaaacgacttactgctcattttgaagacttggagcagtgttacttttctacaaggatgtctcgtatctcagatgacagtcgaactgcaagccagttggatgaatttcaggaatgcttgtccaagtttactcgatataattcagtacgacctttagccacattgtcatatgctagtgatctctataatggttccagtatagtctctagtattgaatttgaccgggattgtgactattttgcgattgctggagttacaaagaagattaaagtctatgaatatgacactgtcatccaggatgcagtggatattcattaccctgagaatgaaatgacctgcaattcgaaaatcagctgtatcagttggagtagttaccataagaacctgttagctagcagtgattatgaaggcactgttattttatgggatggattcacaggacagaggtcaaaggtctatcaggagcatgagaagaggtgttggagtgttgactttaatttgatggatcctaaactcttggcttcaggttctgatgatgcaaaagtgaagctgtggtctaccaatctagacaactcagtggcaagcattgaggcaaaggctaatgtgtgctgtgttaaattcagcccctcttccagataccatttggctttcggctgtgcagatcactgtgtccactactatgatcttcgtaacactaaacagccaatcatggtattcaaaggacaccgtaaagcagtctcttatgcaaagtttgtgagtggtgaggaaattgtctctgcctcaacagacagtcagctaaaactgtggaatgtagggaaaccatactgcctacgttccttcaagggtcatatcaatgaaaaaaactttgtaggcctggcttccaatggagattatatagcttgtggttgagtgaaaccatcgtttccaggaactttttaacaggtgtttgttattgaaattgaactcagtggaaatagaataaatactaagtcaagaaatggtctgtgcactcagaagatagtataatagacatgatgccccagcactactgattttccttgtgttgtactagaagagcattagtccttcccttttttattgtgtagaaaccctgaacacctcaaatac

SEQ ID NO: 300314 - DNA, 306 bp, Homo sapiens
cattgggaatacccagccaactctccaccatcaatgtaactccatggacattgctgctcttggtggtgttatctaatttttgtgatagggaaacaaattcttttgaataaaaataaataacaaaacaataaaagtttattgagccacacagttgagcttggaaagtttttgtcaaatgcagcaagagataactctttttaagaagtagcatatgtgaactataatgtaacagtgaataatttgtaaagttcgtatttcccaacctctttgggaattacacatatcaatgtaaacaaaatataaagt

SEQ ID NO: 300315 - DNA, 518 bp, Homo sapiens
taataaattacccagtttcaggtatctttttattagcagtgcgagaacagacaaatacattcagctttaacacttttagtcctagtaaaccaaatgttttagagtggcacaaaaagatttctggagcaataagccaactttcccaagttacagaagcatttactaatgtattacttgtttctctttttgtttttattgtcctttgcccttagtgaagctgtggtctaccaatctagacaactcagtggcaagcattgaggcaaaggctaatgtgtgctgtgttaaattcagcccctcttccagataccatttggctttcggctgtgcaggtaagaaatgaaagcagatttgtcttcctttgatgttggttaaatatcatggtaaggataggagagcattttaaaacaaataactcttttgtaggtttaaatgttgtttttattattaggctctaaattagaagtatacagtatgccatcattactcatttagtgctgtaccttaattgcactattctg

SEQ ID NO: 300316 - DNA, 644 bp, Homo sapiens
aaaaaacatgccagggagcgggggtgacaaaagcctgatatgtcttttgaatgcttgaatccagggagaaaacatggagatatgaatgactgtgtggagcagaacccaccttctcccagctcagctttggactgtgaggtgacagaaataaacatttgttgtgctaagccactgagattttgagtcataacagctgttagcatcaatgattctgactaatacagtagcccaccatatgattgttcactagtatgtctaaaattccagggctgtgatcaaccactctccccgtccccactctgacagttaattgacctgtgaatttgccttttatgtaaattctctttctatccttactgcattattgtatttcagcctttggtttcctgacagatgtaattgtcctgtgtgtcctttctccaggcagagtgatgttcctggaatgttcatctaatcatatcatgcatctgtttgtaactttctttcttcaaccttatctcctgctagtccctgctatacctctctatgcttggaacatatttttctttagcccttgttttccaaggactgaatctgtctcatcttttgggggctctgtgtaaatattcctttatccagtaagcctgccaaagaacatttagtct

SEQ ID NO: 300317 - DNA, 410 bp, Homo sapiens
gctgtgaagttcaagatcaagatgccggaactcagtgtctcataagggctttcttgctgtgtcctcatgtaaccatccaataggtttttcttgccggcagaggcgcggggaaacctggcgtactggctgtggcttctctagcgggactcggcatgaggctggcgcggctgcttcgcggagccgccttggccggcccgggcccggggctgcgcgccgccggcttcagccgcagcttcagctcggactcgggctccagcccggcgtccgagcgcggcgttccgggccaggtggacttctacgcgcgcttctcgccgtccccgctctccatgaagcagttcctggacttcggtgagtgcggcccgggaccttgggcctttttgcgcggtcccgggcggggagctgcggccgct

SEQ ID NO: 300318 - DNA, 4518 bp, Homo sapiens
gatccccgcccctgctgcccgccacgtccctcacgtaccactcggcagaggcgcggggaaacctggcgtactggctgtggcttctctagcgggactcggcatgaggctggcgcggctgcttcgcggagccgccttggccggcccgggcccggggctgcgcgccgccggcttcagccgcagcttcagctcggactcgggctccagcccggcgtccgagcgcggcgttccgggccaggtggacttctacgcgcgcttctcgccgtccccgctctccatgaagcagttcctggacttcggatcagtgaatgcttgtgaaaagacctcatttatgtttctgcggcaagagttgcctgtcagactggcaaatataatgaaagaaataagtctccttccagataatcttctcaggacaccatccgttcaattggtacaaagctggtatatccagagtcttcaggagcttcttgattttaaggacaaaagtgctgaggatgctaaagctatttatgactttacagatactgtgatacggatcagaaaccgacacaatgatgtcattcccacaatggcccagggtgtgattgaatacaaggagagctttggggtggatcctgtcaccagccagaatgttcagtactttttggatcgattctacatgagtcgcatttcaattagaatgttactcaatcagcactctttattgtttggtggaaaaggcaaaggaagtccatctcatcgaaaacacattggaagcataaatccaaactgcaatgtacttgaagttattaaagatggctatgaaaatgctaggcgtctgtgtgatttgtattatattaactctcccgaactagaacttgaagaactaaatgcaaaatcaccaggacagccaatacaagtggtttatgtaccatcccatctctatcacatggtgtttgaacttttcaagaatccattttcttaccttagatgagtgaccgaggaggtggcgttcctttgaggaaaattgacagacttttcaactacatgtattcaactgcaccaagacctcgtgttgagacctcccgcgcagtgcctctggctggttttggttatggattgcccatatcacgtctttacgcacaatacttccaaggagacctgaagctgtattccctagagggttacgggacagatgcagttatctacattaaggctctgtcaacagactcaatagaaagactcccagtgtataacaaagctgcctggaagcattacaacaccaaccacgaggctgatgactggtgcgtccccagcagagaacccaaagacatgacgacgttccgcagtgcctagacacacttgggacatcggaaaatccaaatgtggcttttgtattaaatttggaaggtatggtgttcagaactatattataccaagtactttatttatcgttttcacaaaactatttgagtagaataaatggaaactgaattccatttgtgcccgttaaacctcctaaaggatgaaattgcacctattttacacttatattttcacagttaattgaacatatttttaaacaactgtagttttgggcaacttttcactttgtggtagacttcagaagtgtggaaatcttcgggtttctataggaaactagtttttttttttttaagaaatactttcatttatgtttgctagaaacattttctaaatgatagtgattagctggttagccatcttcctgttatttggaggagttctgccatcttttattcggtagtgacagctgtaatatggtcttcatgtttatcagtgacttgactacaagtaaagcagaaaacagttggcctgtaatcacagaaccagccacccttcggcgtctacatgcattgtcttagctctgaggttaatttaccatttttaaattttattgtaaagaagtgtaatgactagctctctgtggatctatgccaaaatcatgggccatcttttctaagtgtacttctgattaatgcaaggggaaatttttatactgaaaacaaacaaacaaactagcagctactaaaatagagaagaaattgagggcaaagtaatatgtctccaaaactgaactgattgcttgttgagattacctagaaagcttttggaaaaaaatagagcttttctgcatcctactccagatacactgaatcggaatccctagggctagagcctagaaatctcactttttaaaatgcttccaaggtaagtctgatgcctaccctaggttgggaaccactctttcaaagtaaacagtgatgacacagcatttgctaaagtaacatctgtaggttttggtttccacctatttaaagtcagatttatagactcgaggagacagaaactgaatcccacacctggtgcaattagaagcataattagaagcagaagaacaaaatgccacgtaaccaaagcatcagagccatcattgcacgtgtctttttttcttttttcttttttttttttcaagacagggtctcgctcttttgcccaggatggagtacagtggcatggtcaaggctcactgcagcttcaatcttctgggctcaagtaatccttccacctcagcctcccatatagctggaactacagttgtgcactaccacacccagctaattttttgatttcttgtggagatgaggtctcagtatgttcccaggctagtgttgaactcctgagctcaagaaatcctcctgcctgagtctctgaaagtgctgggattacaggcgtgaccccacacatggcctattgcacaagtcttgacaaacaacatatattttctaaaactatccagatttcattatcagggaaaagtttgcttaggtttattacagcagtcctttgcatttgtatggtaatttgtactttacaaatactttgatatattataactctattggtctttgaaacaaagcgatacagtgtaggtggtatcattctctttctcactcagtgtggcccagagttgctcagaattggagcagagcctgagacgtatctgcagatcctgtcatcagctggcaagtccaggagactgtgtcatttagagactgtgttgttagttatccctcaacatcttctaaggtggcaggaaataatattggaaataacattttaaagtaaaaattttaaagtttaaagaagagttttgccacttaaacaggggagctttgtctggaaaatacactgagttgaaacacttcatccttggaaggattatataagatgaacagttgtgataaatgtgtagattagagggatgtgaatgggcagttagtccagtgccctcatttaagaggccaagatcctgattcagaggaggcatcctttgcccagagctgcttagctaatctgaccaaatgttgggaaaaatgtctcacctaacccactattccttaattatggattttgtgaaaaacaatagaacatgttaatgagtaatttatattagttcgatgtattacaattttttagctttaaattacagttttcttataatgttgaaatgttttagaatcctttgaatctaagtatttgtttcctaaatgaaacatttgtacaacatttgatgtttttacttatgaaatattctcctcccccaagaaaatttaaactttttctctctatttaaaagctaagaaatgttttaaaggaaaaatgaaattatcttcctttagcttatttttaaggtaaaacagctttttactctgttattgtggtaatggacagaatattacatacaaaaatattctgggagagctttttcctagttggttttaaatcattgtgccacctgaaaggtttttagattttataggagctaatttgtccaccagcattaatgtaacacagtgtagttatgaaaatatattgaaggacaggaagtggacacgaagtgatttttgtaacctgagcagttaatgaatgtgccaacattttctaggaagggacagcaagaatattctgctctgtagttaaaatactggctggcttttgatgtcttcatgcttaattgtgatcactttcttgcactgtgatgtttttacgtgaatatgttgaagtagaagtctaccatattattttataaaatgttttctgtatggcaataaactgaaaacatggatcaacccttcttttgaaaataaactgagtcaatttagccttttaaaaatatagtcatctcttttaaatagaatcctcttccaccatcaaggctcaacattttgtaagcatccaaaaaattggtaattagggggcttgcactaaatttcactatcttcagtagagaggaactgtttggaacttagatttccaatgtgtatattctaatggagaaagcaagaggtagagtttgtatgtttgacttaccttagatttttattttccatacatactgcaaatgattgacttgttgcataaatgaagatcttctgttgtgtgcttttcaaacactgtaaataaatttgaaatttgaataactttccacagtataactgt

SEQ ID NO: 300319 - DNA, 4176 bp, Homo sapiens
  misc_feature (8)..(8): n is a, c, g, or t
acccgcangctatccggttcaattggtacaaagctggtatatccagagtcttcaggagcttcttgattttaaggacaaaagtgctgaggatgctaaagctatttatgaaaggcctagaagaacatggttgcaggtctctagtttatgctgtatggcctgcaagatgatctttacagatactgtgatacggatcagaaaccgacacaatgatgtcattcccacaatggcccagggtgtgattgaatacaaggagagctttggggtggatcctgtcaccagccagaatgttcagtactttttggatcgattctacatgagtcgcatttcaattagaatgttactcaatcagcactctttattgtttggtggaaaaggcaaaggaagtccatctcatcgaaaacacattggaagcataaatccaaactgcaatgtacttgaagttattaaagatggctatgaaaatgctaggcgtctgtgtgatttgtattatattaactctcccgaactagaacttgaagaactaaatgcaaaatcaccaggacagccaatacaagtggtttatgtaccatcccatctctatcacatggtgtttgaacttttcaagaatccattttcttaccttagatgagtgaccgaggaggtggcgttcctttgaggaaaattgacagacttttcaactacatgtattcaactgcaccaagacctcgtgttgagacctcccgcgcagtgcctctggctggttttggttatggattgcccatatcacgtctttacgcacaatacttccaaggagacctgaagctgtattccctagagggttacgggacagatgcagttatctacattaaggctctgtcaacagactcaatagaaagactcccagtgtataacaaagctgcctggaagcattacaacaccaaccacgaggctgatgactggtgcgtccccagcagagaacccaaagacatgacgacgttccgcagtgcctagacacacttgggacatcggaaaatccaaatgtggcttttgtattaaatttggaaggtatggtgttcagaactatattataccaagtactttatttatcgttttcacaaaactatttgagtagaataaatggaaactgaattccatttgtgcccgttaaacctcctaaaggatgaaattgcacctattttacacttatattttcacagttaattgaacatatttttaaacaactgtagttttgggcaacttttcactttgtggtagacttcagaagtgtggaaatcttcgggtttctataggaaactagtttttttttttttaagaaatactttcatttatgtttgctagaaacattttctaaatgatagtgattagctggttagccatcttcctgttatttggaggagttctgccatcttttattcggtagtgacagctgtaatatggtcttcatgtttatcagtgacttgactacaagtaaagcagaaaacagttggcctgtaatcacagaaccagccacccttcggcgtctacatgcattgtcttagctctgaggttaatttaccatttttaaattttattgtaaagaagtgtaatgactagctctctgtggatctatgccaaaatcatgggccatcttttctaagtgtacttctgattaatgcaaggggaaatttttatactgaaaacaaacaaacaaactagcagctactaaaatagagaagaaattgagggcaaagtaatatgtctccaaaactgaactgattgcttgttgagattacctagaaagcttttggaaaaaaatagagcttttctgcatcctactccagatacactgaatcggaatccctagggctagagcctagaaatctcactttttaaaatgcttccaaggtaagtctgatgcctaccctaggttgggaaccactctttcaaagtaaacagtgatgacacagcatttgctaaagtaacatctgtaggttttggtttccacctatttaaagtcagatttatagactcgaggagacagaaactgaatcccacacctggtgcaattagaagcataattagaagcagaagaacaaaatgccacgtaaccaaagcatcagagccatcattgcacgtgtctttttttcttttttcttttttttttttcaagacagggtctcgctcttttgcccaggatggagtacagtggcatggtcaaggctcactgcagcttcaatcttctgggctcaagtaatccttccacctcagcctcccatatagctggaactacagttgtgcactaccacacccagctaattttttgatttcttgtggagatgaggtctcagtatgttcccaggctagtgttgaactcctgagctcaagaaatcctcctgcctgagtctctgaaagtgctgggattacaggcgtgaccccacacatggcctattgcacaagtcttgacaaacaacatatattttctaaaactatccagatttcattatcagggaaaagtttgcttaggtttattacagcagtcctttgcatttgtatggtaatttgtactttacaaatactttgatatattataactctattggtctttgaaacaaagcgatacagtgtaggtggtatcattctctttctcactcagtgtggcccagagttgctcagaattggagcagagcctgagacgtatctgcagatcctgtcatcagctggcaagtccaggagactgtgtcatttagagactgtgttgttagttatccctcaacatcttctaaggtggcaggaaataatattggaaataacattttaaagtaaaaattttaaagtttaaagaagagttttgccacttaaacaggggagctttgtctggaaaatacactgagttgaaacacttcatccttggaaggattatataagatgaacagttgtgataaatgtgtagattagagggatgtgaatgggcagttagtccagtgccctcatttaagaggccaagatcctgattcagaggaggcatcctttgcccagagctgcttagctaatctgaccaaatgttgggaaaaatgtctcacctaacccactattccttaattatggattttgtgaaaaacaatagaacatgttaatgagtaatttatattagttcgatgtattacaattttttagctttaaattacagttttcttataatgttgaaatgttttagaatcctttgaatctaagtatttgtttcctaaatgaaacatttgtacaacatttgatgtttttacttatgaaatattctcctcccccaagaaaatttaaactttttctctctatttaaaagctaagaaatgttttaaaggaaaaatgaaattatcttcctttagcttatttttaaggtaaaacagctttttactctgttattgtggtaatggacagaatattacatacaaaaatattctgggagagctttttcctagttggttttaaatcattgtgccacctgaaaggtttttagattttataggagctaatttgtccaccagcattaatgtaacacagtgtagttatgaaaatatattgaaggacaggaagtggacacgaagtgatttttgtaacctgagcagttaatgaatgtgccaacattttctaggaagggacagcaagaatattctgctctgtagttaaaatactggctggcttttgatgtcttcatgcttaattgtgatcactttcttgcactgtgatgtttttacgtgaatatgttgaagtagaagtctaccatattattttataaaatgttttctgtatggcaataaactgaaaacatggatcaacccttcttttgaaaataaactgagtcaatttagccttttaaaaatatagtcatctcttttaaatagaatcctcttccaccatcaaggctcaacattttgtaagcatccaaaaaattggtaattagggggcttgcactaaatttcactatcttcagtagagaggaactgtttggaacttagatttccaatgtgtatattctaatggagaaagcaagaggtagagtttgtatgtttgacttaccttagatttttattttccatacatactgcaaatgattgacttgttgcataaatgaagatcttctgttgtgtgcttttcaaacactgtaaataaatttgaaatttgaataactttccacagtataactgt

SEQ ID NO: 300320 - DNA, 4003 bp, Homo sapiens
tgtggaatttaaagattttaacacttctctatttggaaagtaaaattcctacccgaaagttaagcgatcttaaaaaagactttaccatcctagagaaaaatgggcgcatgggttggttcgattgtgatgcaagattgtgagaagtgaccacaggactcttgtcatcatcagttgtaaatatttgtgggtatgggttcaaacactaatacattgaagaaatggtgtggcagttctcccccaggtaatactgtcctccgtagttaatgttttcttttcatcactacacagtttattcttaaaaatgctttaagcacatctctctgtactttcatatttttctcttctgctctgtagcaaaatcaccaggacagccaatacaagtggtttatgtaccatcccatctctatcacatggtgtttgaacttttcaagaatccattttcttaccttagatgagtgaccgaggaggtggcgttcctttgaggaaaattgacagacttttcaactacatgtattcaactgcaccaagacctcgtgttgagacctcccgcgcagtgcctctggctggttttggttatggattgcccatatcacgtctttacgcacaatacttccaaggagacctgaagctgtattccctagagggttacgggacagatgcagttatctacattaaggctctgtcaacagactcaatagaaagactcccagtgtataacaaagctgcctggaagcattacaacaccaaccacgaggctgatgactggtgcgtccccagcagagaacccaaagacatgacgacgttccgcagtgcctagacacacttgggacatcggaaaatccaaatgtggcttttgtattaaatttggaaggtatggtgttcagaactatattataccaagtactttatttatcgttttcacaaaactatttgagtagaataaatggaaactgaattccatttgtgcccgttaaacctcctaaaggatgaaattgcacctattttacacttatattttcacagttaattgaacatatttttaaacaactgtagttttgggcaacttttcactttgtggtagacttcagaagtgtggaaatcttcgggtttctataggaaactagtttttttttttttaagaaatactttcatttatgtttgctagaaacattttctaaatgatagtgattagctggttagccatcttcctgttatttggaggagttctgccatcttttattcggtagtgacagctgtaatatggtcttcatgtttatcagtgacttgactacaagtaaagcagaaaacagttggcctgtaatcacagaaccagccacccttcggcgtctacatgcattgtcttagctctgaggttaatttaccatttttaaattttattgtaaagaagtgtaatgactagctctctgtggatctatgccaaaatcatgggccatcttttctaagtgtacttctgattaatgcaaggggaaatttttatactgaaaacaaacaaacaaactagcagctactaaaatagagaagaaattgagggcaaagtaatatgtctccaaaactgaactgattgcttgttgagattacctagaaagcttttggaaaaaaatagagcttttctgcatcctactccagatacactgaatcggaatccctagggctagagcctagaaatctcactttttaaaatgcttccaaggtaagtctgatgcctaccctaggttgggaaccactctttcaaagtaaacagtgatgacacagcatttgctaaagtaacatctgtaggttttggtttccacctatttaaagtcagatttatagactcgaggagacagaaactgaatcccacacctggtgcaattagaagcataattagaagcagaagaacaaaatgccacgtaaccaaagcatcagagccatcattgcacgtgtctttttttcttttttcttttttttttttcaagacagggtctcgctcttttgcccaggatggagtacagtggcatggtcaaggctcactgcagcttcaatcttctgggctcaagtaatccttccacctcagcctcccatatagctggaactacagttgtgcactaccacacccagctaattttttgatttcttgtggagatgaggtctcagtatgttcccaggctagtgttgaactcctgagctcaagaaatcctcctgcctgagtctctgaaagtgctgggattacaggcgtgaccccacacatggcctattgcacaagtcttgacaaacaacatatattttctaaaactatccagatttcattatcagggaaaagtttgcttaggtttattacagcagtcctttgcatttgtatggtaatttgtactttacaaatactttgatatattataactctattggtctttgaaacaaagcgatacagtgtaggtggtatcattctctttctcactcagtgtggcccagagttgctcagaattggagcagagcctgagacgtatctgcagatcctgtcatcagctggcaagtccaggagactgtgtcatttagagactgtgttgttagttatccctcaacatcttctaaggtggcaggaaataatattggaaataacattttaaagtaaaaattttaaagtttaaagaagagttttgccacttaaacaggggagctttgtctggaaaatacactgagttgaaacacttcatccttggaaggattatataagatgaacagttgtgataaatgtgtagattagagggatgtgaatgggcagttagtccagtgccctcatttaagaggccaagatcctgattcagaggaggcatcctttgcccagagctgcttagctaatctgaccaaatgttgggaaaaatgtctcacctaacccactattccttaattatggattttgtgaaaaacaatagaacatgttaatgagtaatttatattagttcgatgtattacaattttttagctttaaattacagttttcttataatgttgaaatgttttagaatcctttgaatctaagtatttgtttcctaaatgaaacatttgtacaacatttgatgtttttacttatgaaatattctcctcccccaagaaaatttaaactttttctctctatttaaaagctaagaaatgttttaaaggaaaaatgaaattatcttcctttagcttatttttaaggtaaaacagctttttactctgttattgtggtaatggacagaatattacatacaaaaatattctgggagagctttttcctagttggttttaaatcattgtgccacctgaaaggtttttagattttataggagctaatttgtccaccagcattaatgtaacacagtgtagttatgaaaatatattgaaggacaggaagtggacacgaagtgatttttgtaacctgagcagttaatgaatgtgccaacattttctaggaagggacagcaagaatattctgctctgtagttaaaatactggctggcttttgatgtcttcatgcttaattgtgatcactttcttgcactgtgatgtttttacgtgaatatgttgaagtagaagtctaccatattattttataaaatgttttctgtatggcaataaactgaaaacatggatcaacccttcttttgaaaataaactgagtcaatttagccttttaaaaatatagtcatctcttttaaatagaatcctcttccaccatcaaggctcaacattttgtaagcatccaaaaaattggtaattagggggcttgcactaaatttcactatcttcagtagagaggaactgtttggaacttagatttccaatgtgtatattctaatggagaaagcaagaggtagagtttgtatgtttgacttaccttagatttttattttccatacatactgcaaatgattgacttgttgcataaatgaagatcttctgttgtgtgcttttcaaacactgtaaataaatttgaaatttgaataactttccacagtataactgt

SEQ ID NO: 300321 - DNA, 3393 bp, Homo sapiens
  misc_feature (8)..(8): n is a, c, g, or t
acccgcangctatccggttcaattggtacaaagctggtatatccagagtcttcaggagcttcttgattttaaggacaaaagtgctgaggatgctaaagctatttatgaaaggcctagaagaacatggttgcaggtctctagtttatgctgtatggcctgcaagatgatctttacagatactgtgatacggatcagaaaccgacacaatgatgtcattcccacaatggcccagggtgtgattgaatacaaggagagctttggggtggatcctgtcaccagccagaatgttcatactttatttatcgttttcacaaaactatttgagtagaataaatggaaactgaattccatttgtgcccgttaaacctcctaaaggatgaaattgcacctattttacacttatattttcacagttaattgaacatatttttaaacaactgtagttttgggcaacttttcactttgtggtagacttcagaagtgtggaaatcttcgggtttctataggaaactagtttttttttttttaagaaatactttcatttatgtttgctagaaacattttctaaatgatagtgattagctggttagccatcttcctgttatttggaggagttctgccatcttttattcggtagtgacagctgtaatatggtcttcatgtttatcagtgacttgactacaagtaaagcagaaaacagttggcctgtaatcacagaaccagccacccttcggcgtctacatgcattgtcttagctctgaggttaatttaccatttttaaattttattgtaaagaagtgtaatgactagctctctgtggatctatgccaaaatcatgggccatcttttctaagtgtacttctgattaatgcaaggggaaatttttatactgaaaacaaacaaacaaactagcagctactaaaatagagaagaaattgagggcaaagtaatatgtctccaaaactgaactgattgcttgttgagattacctagaaagcttttggaaaaaaatagagcttttctgcatcctactccagatacactgaatcggaatccctagggctagagcctagaaatctcactttttaaaatgcttccaaggtaagtctgatgcctaccctaggttgggaaccactctttcaaagtaaacagtgatgacacagcatttgctaaagtaacatctgtaggttttggtttccacctatttaaagtcagatttatagactcgaggagacagaaactgaatcccacacctggtgcaattagaagcataattagaagcagaagaacaaaatgccacgtaaccaaagcatcagagccatcattgcacgtgtctttttttcttttttcttttttttttttcaagacagggtctcgctcttttgcccaggatggagtacagtggcatggtcaaggctcactgcagcttcaatcttctgggctcaagtaatccttccacctcagcctcccatatagctggaactacagttgtgcactaccacacccagctaattttttgatttcttgtggagatgaggtctcagtatgttcccaggctagtgttgaactcctgagctcaagaaatcctcctgcctgagtctctgaaagtgctgggattacaggcgtgaccccacacatggcctattgcacaagtcttgacaaacaacatatattttctaaaactatccagatttcattatcagggaaaagtttgcttaggtttattacagcagtcctttgcatttgtatggtaatttgtactttacaaatactttgatatattataactctattggtctttgaaacaaagcgatacagtgtaggtggtatcattctctttctcactcagtgtggcccagagttgctcagaattggagcagagcctgagacgtatctgcagatcctgtcatcagctggcaagtccaggagactgtgtcatttagagactgtgttgttagttatccctcaacatcttctaaggtggcaggaaataatattggaaataacattttaaagtaaaaattttaaagtttaaagaagagttttgccacttaaacaggggagctttgtctggaaaatacactgagttgaaacacttcatccttggaaggattatataagatgaacagttgtgataaatgtgtagattagagggatgtgaatgggcagttagtccagtgccctcatttaagaggccaagatcctgattcagaggaggcatcctttgcccagagctgcttagctaatctgaccaaatgttgggaaaaatgtctcacctaacccactattccttaattatggattttgtgaaaaacaatagaacatgttaatgagtaatttatattagttcgatgtattacaattttttagctttaaattacagttttcttataatgttgaaatgttttagaatcctttgaatctaagtatttgtttcctaaatgaaacatttgtacaacatttgatgtttttacttatgaaatattctcctcccccaagaaaatttaaactttttctctctatttaaaagctaagaaatgttttaaaggaaaaatgaaattatcttcctttagcttatttttaaggtaaaacagctttttactctgttattgtggtaatggacagaatattacatacaaaaatattctgggagagctttttcctagttggttttaaatcattgtgccacctgaaaggtttttagattttataggagctaatttgtccaccagcattaatgtaacacagtgtagttatgaaaatatattgaaggacaggaagtggacacgaagtgatttttgtaacctgagcagttaatgaatgtgccaacattttctaggaagggacagcaagaatattctgctctgtagttaaaatactggctggcttttgatgtcttcatgcttaattgtgatcactttcttgcactgtgatgtttttacgtgaatatgttgaagtagaagtctaccatattattttataaaatgttttctgtatggcaataaactgaaaacatggatcaacccttcttttgaaaataaactgagtcaatttagccttttaaaaatatagtcatctcttttaaatagaatcctcttccaccatcaaggctcaacattttgtaagcatccaaaaaattggtaattagggggcttgcactaaatttcactatcttcagtagagaggaactgtttggaacttagatttccaatgtgtatattctaatggagaaagcaagaggtagagtttgtatgtttgacttaccttagatttttattttccatacatactgcaaatgattgacttgttgcataaatgaagatcttctgttgtgtgcttttcaaacactgtaaataaatttgaaatttgaataactttccacagtataactgt

SEQ ID NO: 300322 - DNA, 2162 bp, Homo sapiens
gatccccgcccctgctgcccgccacgtccctcacgtaccactcggcagaggcgcggggaaacctggcgtactggctgtggcttctctagcgggactcggcatgaggctggcgcggctgcttcgcggagccgccttggccggcccgggcccggggctgcgcgccgccggcttcagccgcagcttcagctcggactcgggctccagcccggcgtccgagcgcggcgttccgggccaggtggacttctacgcgcgcttctcgccgtccccgctctccatgaagcagttcctggacttcggatcagtgaatgcttgtgaaaagacctcatttatgtttctgcggcaagagttgcctgtcagactggcaaatataatgaaagaaataagtctccttccagataatcttctcaggacaccatccgttcaattggtacaaagctggtatatccagagtcttcaggagcttcttgattttaaggacaaaagtgctgaggatgctaaagctatttatgactttacagatactgtgatacggatcagaaaccgacacaatgatgtcattcccacaatggcccagggtgtgattgaatacaaggagagctttggggtggatcctgtcaccagccagaatgttcagtactttttggatcgattctacatgagtcgcatttcaattagaatgttactcaatcagcactctttattgtttggtggaaaaggcaaaggaagtccatctcatcgaaaacacattggaagcataaatccaaactgcaatgtacttgaagttattaaagatggctatgaaaatgctaggcgtctgtgtgatttgtattatattaactctcccgaactagaacttgaagaactaaatgcaaaatcaccaggacagccaatacaagtggtttatgtaccatcccatctctatcacatggtgtttgaacttttcaagaatccattttcttaccttagatgagtgaccgaggaggtggcgttcctttgaggaaaattgacagacttttcaactacatgtattcaactgcaccaagacctcgtgttgagacctcccgcgcagtgcctctggctggttttggttatggattgcccatatcacgtctttacgcacaatacttccaaggagacctgaagctgtattccctagagggttacgggacagatgcagttatctacattaaggctctgtcaacagactcaatagaaagactcccagtgtataacaaagctgcctggaagcattacaacaccaaccacgaggctgatgactggtgcgtccccagcagagaacccaaagacatgacgacgttccgcagtgcctagacacacttgggacatcggaaaatccaaatgtggcttttgtattaaatttggaagattcttcagttttgggacttggactggctttccttgcccctcagcttgcagatggcctgttgtgggaccttgtgatcatgaactcctcctcccacatctgatggagctaccaatcatcagatctcctctgcctctggggtgcgtctcaggctggccaatcacgttcttcatccacgtggactatgactggccctagggagaaaacatggagatatgaatgactgtgtggagcagaacccaccttctcccagctcagctttggactgtgaggtgacagaaataaacatttgttgtgctaagccactgagattttgagtcataacagctgttagcatcaatgattctgactaatacagtagcccaccatatgattgttcactagtatgtctaaaattccagggctgtgatcaaccactctccccgtccccactctgacagttaattgacctgtgaatttgccttttatgtaaattctctttctatccttactgcattattgtatttcagcctttggtttcctgacagatgtaattgtcctgtgtgtcctttctccaggcagagtgatgttcctggaatgttcatctaatcatatcatgcatctgtttgtaactttctttcttcaaccttatctcctgctagtccctgctatacctctctatgcttggaacatatttttctttagcccttgttttccaaggactgaatctgtctcatcttttgggggctctgtgtaaatattcctttatccagtaagcctgccaaagaacatttagtct

SEQ ID NO: 300323 - DNA, 1679 bp, Homo sapiens
gatccccgcccctgctgcccgccacgtccctcacgtaccactcggcagaggcgcggggaaacctggcgtactggctgtggcttctctagcgggactcggcatgaggctggcgcggctgcttcgcggagccgccttggccggcccgggcccggggctgcgcgccgccggcttcagccgcagcttcagctcggactcgggctccagcccggcgtccgagcgcggcgttccgggccaggtggacttctacgcgcgcttctcgccgtccccgctctccatgaagcagttcctggacttcggatcagtgaatgcttgtgaaaagacctcatttatgtttctgcggcaagagttgcctgtcagactggcaaatataatgaaagaaataagtctccttccagataatcttctcaggacaccatccgttcaattggtacaaagctggtatatccagagtcttcaggagcttcttgattttaaggacaaaagtgctgaggatgctaaagctatttatgactttacagatactgtgatacggatcagaaaccgacacaatgatgtcattcccacaatggcccagggtgtgattgaatacaaggagagctttggggtggatcctgtcaccagccagaatgttcagtactttttggatcgattctacatgagtcgcatttcaattagaatgttactcaatcagcactctttattgtttggtggaaaaggcaaaggaagtccatctcatcgaaaacacattggaagcataaatccaaactgcaatgtacttgaagttattaaagatggctatgaaaatgctaggcgtctgtgtgatttgtattatattaactctcccgaactagaacttgaagaactaaatgcaaaatcaccaggacagccaatacaagtggtttatgtaccatcccatctctatcacatggtgtttgaacttttcaagaatgcaatgagagccactatggaacaccatgccaacagaggtgtttacccccctattcaagttcatgtcacgctgggtaatgaggatttgactgtgaagatgagtgaccgaggaggtggcgttcctttgaggaaaattgacagacttttcaactacatgtattcaactgcaccaagacctcgtgttgagacctcccgcgcagtgcctctggctggttttggttatggattgcccatatcacgtctttacgcacaatacttccaaggagacctgaagctgtattccctagagggttacgggacagatgcagttatctacattaaggctctgtcaacagactcaatagaaagactcccagtgtataacaaagctgcctggaagcattacaacaccaaccacgaggctgatgactggtgcgtccccagcagagaacccaaagacatgacgacgttccgcagtgcctagacacacttgggacatcggaaaatccaaatgtggcttttgtattaaatttggaagaaaccgaaccctcaccaaacagatctgcttgcacatccacttgcacgtagacctcagataagtgagatctgggacctgaactctgaccaccatcttttgttctaaatttcttcccgcggggcgtggagaaagtcacacccatgagctggacctaacattcttttctgctgaccccaaattattaaaccttctcaaaccaattgcaaatcagaaa

SEQ ID NO: 300324 - DNA, 1371 bp, Homo sapiens
gatccccgcccctgctgcccgccacgtccctcacgtaccactcggcagaggcgcggggaaacctggcgtactggctgtggcttctctagcgggactcggcatgaggctggcgcggctgcttcgcggagccgccttggccggcccgggcccggggctgcgcgccgccggcttcagccgcagcttcagctcggactcgggctccagcccggcgtccgagcgcggcgttccgggccaggtggacttctacgcgcgcttctcgccgtccccgctctccatgaagcagttcctggacttcggatcagtgaatgcttgtgaaaagacctcatttatgtttctgcggcaagagttgcctgtcagactggcaaatataatgaaagaaataagtctccttccagataatcttctcaggacaccatccgttcaattggtacaaagctggtatatccagagtcttcaggagcttcttgattttaaggacaaaagtgctgaggatgctaaagctatttatgactttacagatactgtgatacggatcagaaaccgacacaatgatgtcattcccacaatggcccagggtgtgattgaatacaaggagagctttggggtggatcctgtcaccagccagaatgttcagtactttttggatcgattctacatgagtcgcatttcaattagaatgttactcaatcagcactctttattgtttggtggaaaaggcaaaggaagtccatctcatcgaaaacacattggaagcataaatccaaactgcaatgtacttgaagttattaaagatggctatgaaaatgctaggcgtctgtgtgatttgtattatattaactctcccgaactagaacttgaagaactaaatgcaaaatcaccaggacagccaatacaagtggtttatgtaccatcccatctctatcacatggtgtttgaacttttcaagaatgcaatgagagccactatggaacaccatgccaacagaggtgtttacccccctattcaagttcatgtcacgctgggtaatgaggatttgactgtgaagatgagtgaccgaggaggtggcgttcctttgaggaaaattgacagacttttcaactacatgtattcaactgcaccaagacctcgtgttgagacctcccgcgcagtgcctctggctggttttggttatggattgcccatatcacgtctttacgcacaatacttccaaggagacctgaagctgtattccctagagggttacgggacagatgcagttatctacattaaggctctgtcaacagactcaatagaaagactcccagtgtataacaaagctgcctggaagcattacaacaccaaccacgaggctgatgactggtgcgtccccag

SEQ ID NO: 300325 - DNA, 153 bp, Homo sapiens
aatccttttttgttttgttttgattcacactagatggctatgaaaatgctaggcgtctgtgtgatttgtattatattaactctcccgaactagaacttgaagaactaaatggtaagcctgatgttgtctttttctcaataattagtgctttga

SEQ ID NO: 300326 - DNA, 473 bp, Homo sapiens
agctcactcaaaggcacagagccagtacatggcagtacatctcttctcccggggccgccgtcgcggtgatactatttagggccacacgtcccagtgttcagctttcgtatttacgtactactgtttggcaagcggggactcctgaagctctctgacccggcagaggcgcggggaaacctggcgtactggctgtggcttctctagcgggactcggcatgaggctggcgcggctgcttcgcggagccgccttggccggcccgggcccggggctgcgcgccgccggcttcagccgcagcttcagctcggactcgggctccagcccggcgtccgagcgcggcgttccgggccaggtggacttctacgcgcgcttctcgccgtccccgctctccatgaagcagttcctggacttcggtgagtgcggcccgggaccttgggcctttttgcgcggtcccgggcggggagctgcggccgct

SEQ ID NO: 300327 - DNA, 4630 bp, Homo sapiens
ctctagaggatcccctttattccccactttacctggctaattgaagtgtaacaaaagcttcatccaggaacattgcggcagaggcgcggggaaacctggcgtactggctgtggcttctctagcgggactcggcatgaggctggcgcggctgcttcgcggagccgccttggccggcccgggcccggggctgcgcgccgccggcttcagccgcagcttcagctcggactcgggctccagcccggcgtccgagcgcggcgttccgggccaggtggacttctacgcgcgcttctcgccgtccccgctctccatgaagcagttcctggacttcggatcagtgaatgcttgtgaaaagacctcatttatgtttctgcggcaagagttgcctgtcagactggcaaatataatgaaagaaataagtctccttccagataatcttctcaggacaccatccgttcaattggtacaaagctggtatatccagagtcttcaggagcttcttgattttaaggacaaaagtgctgaggatgctaaagctatttatgactttacagatactgtgatacggatcagaaaccgacacaatgatgtcattcccacaatggcccagggtgtgattgaatacaaggagagctttggggtggatcctgtcaccagccagaatgttcagtactttttggatcgattctacatgagtcgcatttcaattagaatgttactcaatcagcactctttattgtttggtggaaaaggcaaaggaagtccatctcatcgaaaacacattggaagcataaatccaaactgcaatgtacttgaagttattaaagatggctatgaaaatgctaggcgtctgtgtgatttgtattatattaactctcccgaactagaacttgaagaactaaatgcaaaatcaccaggacagccaatacaagtggtttatgtaccatcccatctctatcacatggtgtttgaacttttcaagaatgcaatgagagccactatggaacaccatgccaacagaggtgtttacccccctattcaagttcatgtcacgctgggtaatgaggatttgactgtgaagatgagtgaccgaggaggtggcgttcctttgaggaaaattgacagacttttcaactacatgtattcaactgcaccaagacctcgtgttgagacctcccgcgcagtgcctctggctggttttggttatggattgcccatatcacgtctttacgcacaatacttccaaggagacctgaagctgtattccctagagggttacgggacagatgcagttatctacattaaggctctgtcaacagactcaatagaaagactcccagtgtataacaaagctgcctggaagcattacaacaccaaccacgaggctgatgactggtgcgtccccagcagagaacccaaagacatgacgacgttccgcagtgcctagacacacttgggacatcggaaaatccaaatgtggcttttgtattaaatttggaaggtatggtgttcagaactatattataccaagtactttatttatcgttttcacaaaactatttgagtagaataaatggaaactgaattccatttgtgcccgttaaacctcctaaaggatgaaattgcacctattttacacttatattttcacagttaattgaacatatttttaaacaactgtagttttgggcaacttttcactttgtggtagacttcagaagtgtggaaatcttcgggtttctataggaaactagtttttttttttttaagaaatactttcatttatgtttgctagaaacattttctaaatgatagtgattagctggttagccatcttcctgttatttggaggagttctgccatcttttattcggtagtgacagctgtaatatggtcttcatgtttatcagtgacttgactacaagtaaagcagaaaacagttggcctgtaatcacagaaccagccacccttcggcgtctacatgcattgtcttagctctgaggttaatttaccatttttaaattttattgtaaagaagtgtaatgactagctctctgtggatctatgccaaaatcatgggccatcttttctaagtgtacttctgattaatgcaaggggaaatttttatactgaaaacaaacaaacaaactagcagctactaaaatagagaagaaattgagggcaaagtaatatgtctccaaaactgaactgattgcttgttgagattacctagaaagcttttggaaaaaaatagagcttttctgcatcctactccagatacactgaatcggaatccctagggctagagcctagaaatctcactttttaaaatgcttccaaggtaagtctgatgcctaccctaggttgggaaccactctttcaaagtaaacagtgatgacacagcatttgctaaagtaacatctgtaggttttggtttccacctatttaaagtcagatttatagactcgaggagacagaaactgaatcccacacctggtgcaattagaagcataattagaagcagaagaacaaaatgccacgtaaccaaagcatcagagccatcattgcacgtgtctttttttcttttttcttttttttttttcaagacagggtctcgctcttttgcccaggatggagtacagtggcatggtcaaggctcactgcagcttcaatcttctgggctcaagtaatccttccacctcagcctcccatatagctggaactacagttgtgcactaccacacccagctaattttttgatttcttgtggagatgaggtctcagtatgttcccaggctagtgttgaactcctgagctcaagaaatcctcctgcctgagtctctgaaagtgctgggattacaggcgtgaccccacacatggcctattgcacaagtcttgacaaacaacatatattttctaaaactatccagatttcattatcagggaaaagtttgcttaggtttattacagcagtcctttgcatttgtatggtaatttgtactttacaaatactttgatatattataactctattggtctttgaaacaaagcgatacagtgtaggtggtatcattctctttctcactcagtgtggcccagagttgctcagaattggagcagagcctgagacgtatctgcagatcctgtcatcagctggcaagtccaggagactgtgtcatttagagactgtgttgttagttatccctcaacatcttctaaggtggcaggaaataatattggaaataacattttaaagtaaaaattttaaagtttaaagaagagttttgccacttaaacaggggagctttgtctggaaaatacactgagttgaaacacttcatccttggaaggattatataagatgaacagttgtgataaatgtgtagattagagggatgtgaatgggcagttagtccagtgccctcatttaagaggccaagatcctgattcagaggaggcatcctttgcccagagctgcttagctaatctgaccaaatgttgggaaaaatgtctcacctaacccactattccttaattatggattttgtgaaaaacaatagaacatgttaatgagtaatttatattagttcgatgtattacaattttttagctttaaattacagttttcttataatgttgaaatgttttagaatcctttgaatctaagtatttgtttcctaaatgaaacatttgtacaacatttgatgtttttacttatgaaatattctcctcccccaagaaaatttaaactttttctctctatttaaaagctaagaaatgttttaaaggaaaaatgaaattatcttcctttagcttatttttaaggtaaaacagctttttactctgttattgtggtaatggacagaatattacatacaaaaatattctgggagagctttttcctagttggttttaaatcattgtgccacctgaaaggtttttagattttataggagctaatttgtccaccagcattaatgtaacacagtgtagttatgaaaatatattgaaggacaggaagtggacacgaagtgatttttgtaacctgagcagttaatgaatgtgccaacattttctaggaagggacagcaagaatattctgctctgtagttaaaatactggctggcttttgatgtcttcatgcttaattgtgatcactttcttgcactgtgatgtttttacgtgaatatgttgaagtagaagtctaccatattattttataaaatgttttctgtatggcaataaactgaaaacatggatcaacccttcttttgaaaataaactgagtcaatttagccttttaaaaatatagtcatctcttttaaatagaatcctcttccaccatcaaggctcaacattttgtaagcatccaaaaaattggtaattagggggcttgcactaaatttcactatcttcagtagagaggaactgtttggaacttagatttccaatgtgtatattctaatggagaaagcaagaggtagagtttgtatgtttgacttaccttagatttttattttccatacatactgcaaatgattgacttgttgcataaatgaagatcttctgttgtgtgcttttcaaacactgtaaataaatttgaaatttgaataactttccacagtataactgt

SEQ ID NO: 300328 - DNA, 4611 bp, Homo sapiens
ctctagaggatcccctttattccccactttacctggctaattgaagtgtaacaaaagcttcatccaggaacattgcggcagaggcgcggggaaacctggcgtactggctgtggcttctctagcgggactcggcatgaggctggcgcggctgcttcgcggagccgccttggccggcccgggcccggggctgcgcgccgccggcttcagccgcagcttcagctcggactcgggctccagcccggcgtccgagcgcggcgttccgggccaggtggacttctacgcgcgcttctcgccgtccccgctctccatgaagcagttcctggacttcggatcagtgaatgcttgtgaaaagacctcatttatgtttctgcggcaagagttgcctgtcagactggcaaatataatgaaagaaataagtctccttccagataatcttctcaggacaccatccgttcaattggtacaaagctggtatatccagagtcttcaggagcttcttgattttaaggacaaaagtgctgaggatgctaaagctatttatgaaaggcctagaagaacatggttgcaggtctctagtttatgctgtatggcctgcaagatgatctttacagatactgtgatacggatcagaaaccgacacaatgatgtcattcccacaatggcccagggtgtgattgaatacaaggagagctttggggtggatcctgtcaccagccagaatgttcagtactttttggatcgattctacatgagtcgcatttcaattagaatgttactcaatcagcactctttattgtttggtggaaaaggcaaaggaagtccatctcatcgaaaacacattggaagcataaatccaaactgcaatgtacttgaagttattaaagatggctatgaaaatgctaggcgtctgtgtgatttgtattatattaactctcccgaactagaacttgaagaactaaatgcaaaatcaccaggacagccaatacaagtggtttatgtaccatcccatctctatcacatggtgtttgaacttttcaagaatccattttcttaccttagatgagtgaccgaggaggtggcgttcctttgaggaaaattgacagacttttcaactacatgtattcaactgcaccaagacctcgtgttgagacctcccgcgcagtgcctctggctggttttggttatggattgcccatatcacgtctttacgcacaatacttccaaggagacctgaagctgtattccctagagggttacgggacagatgcagttatctacattaaggctctgtcaacagactcaatagaaagactcccagtgtataacaaagctgcctggaagcattacaacaccaaccacgaggctgatgactggtgcgtccccagcagagaacccaaagacatgacgacgttccgcagtgcctagacacacttgggacatcggaaaatccaaatgtggcttttgtattaaatttggaaggtatggtgttcagaactatattataccaagtactttatttatcgttttcacaaaactatttgagtagaataaatggaaactgaattccatttgtgcccgttaaacctcctaaaggatgaaattgcacctattttacacttatattttcacagttaattgaacatatttttaaacaactgtagttttgggcaacttttcactttgtggtagacttcagaagtgtggaaatcttcgggtttctataggaaactagtttttttttttttaagaaatactttcatttatgtttgctagaaacattttctaaatgatagtgattagctggttagccatcttcctgttatttggaggagttctgccatcttttattcggtagtgacagctgtaatatggtcttcatgtttatcagtgacttgactacaagtaaagcagaaaacagttggcctgtaatcacagaaccagccacccttcggcgtctacatgcattgtcttagctctgaggttaatttaccatttttaaattttattgtaaagaagtgtaatgactagctctctgtggatctatgccaaaatcatgggccatcttttctaagtgtacttctgattaatgcaaggggaaatttttatactgaaaacaaacaaacaaactagcagctactaaaatagagaagaaattgagggcaaagtaatatgtctccaaaactgaactgattgcttgttgagattacctagaaagcttttggaaaaaaatagagcttttctgcatcctactccagatacactgaatcggaatccctagggctagagcctagaaatctcactttttaaaatgcttccaaggtaagtctgatgcctaccctaggttgggaaccactctttcaaagtaaacagtgatgacacagcatttgctaaagtaacatctgtaggttttggtttccacctatttaaagtcagatttatagactcgaggagacagaaactgaatcccacacctggtgcaattagaagcataattagaagcagaagaacaaaatgccacgtaaccaaagcatcagagccatcattgcacgtgtctttttttcttttttcttttttttttttcaagacagggtctcgctcttttgcccaggatggagtacagtggcatggtcaaggctcactgcagcttcaatcttctgggctcaagtaatccttccacctcagcctcccatatagctggaactacagttgtgcactaccacacccagctaattttttgatttcttgtggagatgaggtctcagtatgttcccaggctagtgttgaactcctgagctcaagaaatcctcctgcctgagtctctgaaagtgctgggattacaggcgtgaccccacacatggcctattgcacaagtcttgacaaacaacatatattttctaaaactatccagatttcattatcagggaaaagtttgcttaggtttattacagcagtcctttgcatttgtatggtaatttgtactttacaaatactttgatatattataactctattggtctttgaaacaaagcgatacagtgtaggtggtatcattctctttctcactcagtgtggcccagagttgctcagaattggagcagagcctgagacgtatctgcagatcctgtcatcagctggcaagtccaggagactgtgtcatttagagactgtgttgttagttatccctcaacatcttctaaggtggcaggaaataatattggaaataacattttaaagtaaaaattttaaagtttaaagaagagttttgccacttaaacaggggagctttgtctggaaaatacactgagttgaaacacttcatccttggaaggattatataagatgaacagttgtgataaatgtgtagattagagggatgtgaatgggcagttagtccagtgccctcatttaagaggccaagatcctgattcagaggaggcatcctttgcccagagctgcttagctaatctgaccaaatgttgggaaaaatgtctcacctaacccactattccttaattatggattttgtgaaaaacaatagaacatgttaatgagtaatttatattagttcgatgtattacaattttttagctttaaattacagttttcttataatgttgaaatgttttagaatcctttgaatctaagtatttgtttcctaaatgaaacatttgtacaacatttgatgtttttacttatgaaatattctcctcccccaagaaaatttaaactttttctctctatttaaaagctaagaaatgttttaaaggaaaaatgaaattatcttcctttagcttatttttaaggtaaaacagctttttactctgttattgtggtaatggacagaatattacatacaaaaatattctgggagagctttttcctagttggttttaaatcattgtgccacctgaaaggtttttagattttataggagctaatttgtccaccagcattaatgtaacacagtgtagttatgaaaatatattgaaggacaggaagtggacacgaagtgatttttgtaacctgagcagttaatgaatgtgccaacattttctaggaagggacagcaagaatattctgctctgtagttaaaatactggctggcttttgatgtcttcatgcttaattgtgatcactttcttgcactgtgatgtttttacgtgaatatgttgaagtagaagtctaccatattattttataaaatgttttctgtatggcaataaactgaaaacatggatcaacccttcttttgaaaataaactgagtcaatttagccttttaaaaatatagtcatctcttttaaatagaatcctcttccaccatcaaggctcaacattttgtaagcatccaaaaaattggtaattagggggcttgcactaaatttcactatcttcagtagagaggaactgtttggaacttagatttccaatgtgtatattctaatggagaaagcaagaggtagagtttgtatgtttgacttaccttagatttttattttccatacatactgcaaatgattgacttgttgcataaatgaagatcttctgttgtgtgcttttcaaacactgtaaataaatttgaaatttgaataactttccacagtataactgt

SEQ ID NO: 300329 - DNA, 2930 bp, Homo sapiens
gatccccgcccctgctgcccgccacgtccctcacgtaccactcggcagaggcgcggggaaacctggcgtactggctgtggcttctctagcgggactcggcatgaggctggcgcggctgcttcgcggagccgccttggccggcccgggcccggggctgcgcgccgccggcttcagccgcagcttcagctcggactcgggctccagcccggcgtccgagcgcggcgttccgggccaggtggacttctacgcgcgcttctcgccgtccccgctctccatgaagcagttcctggacttcggatcagtgaatgcttgtgaaaagacctcatttatgtttctgcggcaagagttgcctgtcagactggcaaatataatgaaagaaataagtctccttccagataatcttctcaggacaccatccgttcaattggtacaaagctggtatatccagagtcttcaggagcttcttgattttaaggacaaaagtgctgaggatgctaaagctatttatgactttacagatactgtgatacggatcagaaaccgacacaatgatgtcattcccacaatggcccagggtgtgattgaatacaaggagagctttggggtggatcctgtcaccagccagaatgttcagtactttttggatcgattctacatgagtcgcatttcaattagaatgttactcaatcagcactctttattgtttggtggaaaaggcaaaggaagtccatctcatcgaaaacacattggaagcataaatccaaactgcaatgtacttgaagttattaaagatggctatgaaaatgctaggcgtctgtgtgatttgtattatattaactctcccgaactagaacttgaagaactaaatgcaaaatcaccaggacagccaatacaagtggtttatgtaccatcccatctctatcacatggtgtttgaacttttcaagaatccattttcttaccttagatgagtgaccgaggaggtggcgttcctttgaggaaaattgacagacttttcaactacatgtattcaactgcaccaagacctcgtgttgagacctcccgcgcagtgcctctggctggttttggttatggattgcccatatcacgtctttacgcacaatacttccaaggagacctgaagctgtattccctagagggttacgggacagatgcagttatctacattaaggctctgtcaacagactcaatagaaagactcccagtgtataacaaagctgcctggaagcattacaacaccaaccacgaggctgatgactggtgcgtccccagcagagaacccaaagacatgacgacgttccgcagtgcctagacacacttgggacatcggaaaatccaaatgtggcttttgtattaaatttggaagtgtggcccagagttgctcagaattggagcagagcctgagacgtatctgcagatcctgtcatcagctggcaagtccaggagactgtgtcatttagagactgtgttgttagttatccctcaacatcttctaaggtggcaggaaataatattggaaataacattttaaagtaaaaattttaaagtttaaagaagagttttgccacttaaacaggggagctttgtctggaaaatacactgagttgaaacacttcatccttggaaggattatataagatgaacagttgtgataaatgtgtagattagagggatgtgaatgggcagttagtccagtgccctcatttaagaggccaagatcctgattcagaggaggcatcctttgcccagagctgcttagctaatctgaccaaatgttgggaaaaatgtctcacctaacccactattccttaattatggattttgtgaaaaacaatagaacatgttaatgagtaatttatattagttcgatgtattacaattttttagctttaaattacagttttcttataatgttgaaatgttttagaatcctttgaatctaagtatttgtttcctaaatgaaacatttgtacaacatttgatgtttttacttatgaaatattctcctcccccaagaaaatttaaactttttctctctatttaaaagctaagaaatgttttaaaggaaaaatgaaattatcttcctttagcttatttttaaggtaaaacagctttttactctgttattgtggtaatggacagaatattacatacaaaaatattctgggagagctttttcctagttggttttaaatcattgtgccacctgaaaggtttttagattttataggagctaatttgtccaccagcattaatgtaacacagtgtagttatgaaaatatattgaaggacaggaagtggacacgaagtgatttttgtaacctgagcagttaatgaatgtgccaacattttctaggaagggacagcaagaatattctgctctgtagttaaaatactggctggcttttgatgtcttcatgcttaattgtgatcactttcttgcactgtgatgtttttacgtgaatatgttgaagtagaagtctaccatattattttataaaatgttttctgtatggcaataaactgaaaacatggatcaacccttcttttgaaaataaactgagtcaatttagccttttaaaaatatagtcatctcttttaaatagaatcctcttccaccatcaaggctcaacattttgtaagcatccaaaaaattggtaattagggggcttgcactaaatttcactatcttcagtagagaggaactgtttggaacttagatttccaatgtgtatattctaatggagaaagcaagaggtagagtttgtatgtttgacttaccttagatttttattttccatacatactgcaaatgattgacttgttgcataaatgaagatcttctgttgtgtgcttttcaaacactgtaaataaatttgaaatttgaataactttccacagtataactgt

SEQ ID NO: 300330 - DNA, 3582 bp, Homo sapiens
  misc_feature (3538)..(3539): n is a, c, g, or t
  misc_feature (3557)..(3560): n is a, c, g, or t
  misc_feature (3563)..(3569): n is a, c, g, or t
  misc_feature (3573)..(3574): n is a, c, g, or t
  misc_feature (3576)..(3580): n is a, c, g, or t
ctctagaggatcccctttattccccactttacctggctaattgaagtgtaacaaaagcttcatccaggaacattgcggcagaggcgcggggaaacctggcgtactggctgtggcttctctagcgggactcggcatgaggctggcgcggctgcttcgcggagccgccttggccggcccgggcccggggctgcgcgccgccggcttcagccgcagcttcagctcggactcgggctccagcccggcgtccgagcgcggcgttccgggccaggtggacttctacgcgcgcttctcgccgtccccgctctccatgaagcagttcctggacttcggatcagtgaatgcttgtgaaaagacctcatttatgtttctgcggcaagagttgcctgtcagactggcaaatataatgaaagaaataagtctccttccagataatcttctcaggacaccatccgttcaattggtacaaagctggtatatccagagtcttcaggagcttcttgattttaaggacaaaagtgctgaggatgctaaagctatttatgactttacagatactgtgatacggatcagaaaccgacacaatgatgtcattcccacaatggcccagggtgtgattgaatacaaggagagctttggggtggatcctgtcaccagccagaatgttcagtactttttggatcgattctacatgagtcgcatttcaattagaatgttactcaatcagcactctttattgtttggtggaaaaggcaaaggaagtccatctcatcgaaaacacattggaagcataaatccaaactgcaatgtacttgaagttattaaagatggctatgaaaatgctaggcgtctgtgtgatttgtattatattaactctcccgaactagaacttgaagaactaaatgcaaaatcaccaggacagccaatacaagtggtttatgtaccatcccatctctatcacatggtgtttgaacttttcaagaatgcaatgagagccactatggaacaccatgccaacagaggtgtttacccccctattcaagttcatgtcacgctgggtaatgaggatttgactgtgaagatgagtgaccgaggaggtggcgttcctttgaggaaaattgacagacttttcaactacatgtattcaactgcaccaagacctcgtgttgagacctcccgcgcagtgcctctggctggttttggttatggattgcccatatcacgtctttacgcacaatacttccaaggagacctgaagctgtattccctagagggttacgggacagatgcagttatctacattaaggctctgtcaacagactcaatagaaagactcccagtgtataacaaagctgcctggaagcattacaacaccaaccacgaggctgatgactggtgcgtccccagcagagaacccaaagacatgacgacgttccgcagtgcctagacacacttgggacatcggaaaatccaaatgtggcttttgtattaaatttggaaggtatggtgttcagaactatattataccaagtactttatttatcgttttcacaaaactatttgagtagaataaatggaaactgaattccatttgtgcccgttaaacctcctaaaggatgaaattgcacctattttacacttatattttcacagttaattgaacatatttttaaacaactgtagttttgggcaacttttcactttgtggtagacttcagaagtgtggaaatcttcgggtttctataggaaactagtttttttttttttaagaaatactttcatttatgtttgctagaaacattttctaaatgatagtgattagctggttagccatcttcctgttatttggaggagttctgccatcttttattcggtagtgacagctgtaatatggtcttcatgtttatcagtgacttgactacaagtaaagcagaaaacagttggcctgtaatcacagaaccagccacccttcggcgtctacatgcattgtcttagctctgaggttaatttaccatttttaaattttattgtaaagaagtgtaatgactagctctctgtggatctatgccaaaatcatgggccatcttttctaagtgtacttctgattaatgcaaggggaaatttttatactgaaaacaaacaaacaaactagcagctactaaaatagagaagaaattgagggcaaagtaatatgtctccaaaactgaactgattgcttgttgagattacctagaaagcttttggaaaaaaatagagcttttctgcatcctactccagatacactgaatcggaatccctagggctagagcctagaaatctcactttttaaaatgcttccaaggtaagtctgatgcctaccctaggttgggaaccactctttcaaagtaaacagtgatgacacagcatttgctaaagtaacatctgtaggttttggtttccacctatttaaagtcagatttatagactcgaggagacagaaactgaatcccacacctggtgcaattagaagcataattagaagcagaagaacaaaatgccacgtaaccaaagcatcagagccatcattgcacgtgtctttttttcttttttcttttttttttttcaagacagggtctcgctcttttgcccaggatggagtacagtggcatggtcaaggctcactgcagcttcaatcttctgggctcaagtaatccttccacctcagcctcccatatagctggaactacagttgtgcactaccacacccagctaattttttgatttcttgtggagatgaggtctcagtatgttcccaggctagtgttgaactcctgagctcaagaaatcctcctgcctgagtctctgaaagtgctgggattacaggcgtgaccccacacatggcctattgcacaagtcttgacaaacaacatatattttctaaaactatccagatttcattatcagggaaaagtttgcttaggtttattacagcagtcctttgcatttgtatggtaatttgtactttacaaatactttgatatattataactctattggtctttgaaacaaagcgatacagtgtaggtggtatcattctctttctcactcagtgtggcccagagttgctcagaattggagcagagcctgagacgtatctgcagatcctgtcatcagctggcaagtccaggagactgtgtcatttagagactgtgttgttagttatccctcaacatcttctaaggtggcaggaaataatattggaaataacattttaaagtaaaaattttaaagtttaaagaagagttttgccacttaaacaggggagctttgtctggaaaatacactgagttgaaacacttcatccttggaaggattatataagatgaacagttgtgataaatgtgtagattagagggatgtgaatgggcagttagtccagtgccctcatttaagaggccaagatcctgattcagaggaggcatcctttgcccagagctgcttagctaatctgaccaaatgttgggaaaaatgtctcacctaacccatacggattcagtttggnntaccagtgccaaaaaaannnnggnnnnnnncccnncnnnnnct

SEQ ID NO: 300331 - DNA, 1562 bp, Homo sapiens
gatccccgcccctgctgcccgccacgtccctcacgtaccactcggcagaggcgcggggaaacctggcgtactggctgtggcttctctagcgggactcggcatgaggctggcgcggctgcttcgcggagccgccttggccggcccgggcccggggctgcgcgccgccggcttcagccgcagcttcagctcggactcgggctccagcccggcgtccgagcgcggcgttccgggccaggtggacttctacgcgcgcttctcgccgtccccgctctccatgaagcagttcctggacttcggatcagtgaatgcttgtgaaaagacctcatttatgtttctgcggcaagagttgcctgtcagactggcaaatataatgaaagaaataagtctccttccagataatcttctcaggacaccatccgttcaattggtacaaagctggtatatccagagtcttcaggagcttcttgattttaaggacaaaagtgctgaggatgctaaagctatttatgactttacagatactgtgatacggatcagaaaccgacacaatgatgtcattcccacaatggcccagggtgtgattgaatacaaggagagctttggggtggatcctgtcaccagccagaatgttcagtactttttggatcgattctacatgagtcgcatttcaattagaatgttactcaatcagcactctttattgtttggtggaaaaggcaaaggaagtccatctcatcgaaaacacattggaagcataaatccaaactgcaatgtacttgaagttattaaagatggctatgaaaatgctaggcgtctgtgtgatttgtattatattaactctcccgaactagaacttgaagaactaaatgcaaaatcaccaggacagccaatacaagtggtttatgtaccatcccatctctatcacatggtgtttgaacttttcaagaatgcaatgagagccactatggaacaccatgccaacagaggtgtttacccccctattcaagttcatgtcacgctgggtaatgaggatttgactgtgaagatgagtgaccgaggaggtggcgttcctttgaggaaaattgacagacttttcaactacatgtattcaactgcaccaagacctcgtgttgagacctcccgcgcagtgcctctggctggttttggttatggattgcccatatcacgtctttacgcacaatacttccaaggagacctgaagctgtattccctagagggttacgggacagatgcagttatctacattaaggctctgtcaacagactcaatagaaagactcccagtgtataacaaagctgcctggaagcattacaacaccaaccacgaggctgatgactggtgcgtccccagcagagaacccaaagacatgacgacgttccgcagtgcctagacacacttgggacatcggaaaatccaaatgtggcttttgtattaaatttggaagacagggtctcgctcttttgcccaggatggagtacagtgagccaagatcgcgccactgcactccagtctgggcaacagagcaagactccgtctcaaaa

SEQ ID NO: 300332 - DNA, 929 bp, Homo sapiens
ggaagggggggggacaaagcttacggctaaggtagcgaggctgggtggtgctgagcagaaagggtgaagaagagccatgggacacagagttgacccagccagggggaaagcccagctctctttaaaccagctaagccattccagtctcctgtgaagccaaaaagggaccaggaaccgtgcaaaggaaactggaaacttttccccgctgggtagagcatgttgctgatactcttctgttttcaagggaaacaatcacattgtttgattccaaatggtaaatgaacactcactattcttcaggcttcagtaaatctttttttcttccttcatatatatatacacaacacacacacacatatgtatatctatacacacatgtgtgttgtgtgtgttgtgtatatgcatgtgtgtgtgtgcgtgtgtgtatagttttagctccaagccaagcaagtttgtgtttggatagaggggaacttaactattaactacaagttgtatgtctgtggtatcttgattttcccatttctaaagatgaatttcacaaagccataaagcgtgaaattagagctggacttaagactcattggccgaccatcctgtgtcctggcctggccctgcagtaagaagcgtgtctgggtctggagaagggtgcttccgagagtgtgcaggtggcccttccccttggaggcgagaagagagaatgtgctgtctatcttcctggttttcagtccacagagtcggtagaccaggggttacgtgactggggaaaatctcacatctccttgtctgaaaacatttcccctgctgttctctttctaacatgttgtggtaaatctgttcagatactgctcatctgactgttttgtacatgtgacaattgccttaaaacctagcacagtcctcagaaatgaataccgtgtttccactgg

SEQ ID NO: 300333 - DNA, 851 bp, Homo sapiens
ttcccgtgattgcccaggctggtctcgaactcctgggctcaagtgatcctcccacctcggccttccgaatagctgtgattacaggcatgcacagccacaccaagcctcacatgatttcttaaaatgaccagccccaaagcttttctgtattcccctggggtgggtttctgtttcatttactattctactgaagttacctcattctcttctccctcttgctccttagaggtcagcagatcattagttagcccagctgcgggtccctcaccctaattaggaagacctttccctgagtaaaagaaggcagcccacctaactcaaaaatgcattgcagggaagtttctagaatggttcctgcccaattctccctttctggatatgtgaattagaaaacgagtctgaggcaccgtggtgagggatggatgcttagccctctaggagtccacaatagtgtgggattgtctcatttggcacaagagatgcatcctgtcattcactggaaaaccttaaaaaaaaaaaaaaacactgggttttccaaatatgttaaaactttcaaaggacggcagcacgtcgtttcattcacacatttagttttgcctctactgctcacttcctcccaatctggatggctatttatataacacagaggtgggagtaaaaaaaaaaaaaaaattagggaaggaagttcctctggcctagacaaaaacctgtttctcagctgcaccaactaacctctgcagagcccgcagagccagctagagggagcaggtactgttcttatggttatctacttagttattcttccaagctcacagagccatttctgggttttggcctaaaagaaaaaaaaa

SEQ ID NO: 300334 - DNA, 126 bp, Homo sapiens
ccaaccatcagaaggtaacagcaggggaaatgttttcagatactgctcatctgactgttttgtacatgtgacaattgccttaaaacctagcacagtcctcagaaatgaataccgtgtttccactgg

SEQ ID NO: 300335 - DNA, 4984 bp, Homo sapiens
ttctaagttctcccgggccctctggccccgaggactcagatcccggccgcgggagagggcccggcaggtgccaaggagcccgggcggtccttcagcccgcacttccccgcggtcgcccggagccggcctccgttagccgggcgggtaggcggctattggcgccaggattggccggcgccgcccgcgcccccgcggcctcgggtggagcctcccgcccggccgccccctgcggcacccgcgacacgggtggggaccagaggctcccggcggcggctcccggcggcggctcccgggctgtgattggccagcgccacagggggcgggacggcgggcgtgaagtgagcgggctggggccgctggcgcgccctcctacttccccgtctgcgtccgcgttcgcggctcccgtttgcatcatctccagccggcggctgctccagggaggctgggcgcgatcctctccgcccgcggctccaacccgcactctgcgcctctcctcgcctttctcgcacctgctcctgcgccaggcccggagacccccggggcggcttcccagaacctgcggagcacaactggccgaccgacccattcattgggaaccccgtcttttgccagagcccacgtcccctgccacctctagctcggagcggcgtgtagcgccatggagaagagcaacgagaccaacggctaccttgacagcgctcaggcggggcctgcggccgggcccggagctccggggaccgcggcgggacgcgcacggcgttgcgcgggcttcctgcggcgccaagcgctggtgctgctcaccgtgtccggggtgctggcgggcgcgggcctgggcgcggcgttgcgcgggctcagcctgagccgcacgcaggtcacctacctggccttccccggcgagatgctgctccgcatgctgcgcatgatcatcctgccgctggtggtctgcagcctggtgtcgggcgccgcctcgctcgatgccagctgcctcgggcgtctgggcggcatcgctgtcgcctactttggcctcaccacactgagtgcctcggcgctcgccgtggccttggcgttcatcatcaagccaggatccggtgcgcagacccttcagtccagcgacctggggctggaggactcggggcctcctcctgtccccaaagagacggtggactctttcctcgacctggccagaaacctgtttccctccaatcttgtggttgcagctttccgtacgtatgcaaccgattataaagtcgtgacccagaacagcagctctggaaatgtaacccatgaaaagatccccataggcactgagatagaagggatgaacattttaggattggtcctgtttgctctggtgttaggagtggccttaaagaaactaggctccgaaggagaagacctcatccgtttcttcaattccctcaacgaggcgacgatggtgctggtgtcctggattatgtggtacgtacctgtgggcatcatgttccttgttggaagcaagatcgtggaaatgaaagacatcatcgtgctggtgaccagcctggggaaatacatcttcgcatctatattgggccatgttattcatggaggaattgttctgccacttatttattttgttttcacacgaaaaaacccattcagattcctcctgggcctcctcgccccatttgcgacagcatttgctacctgctccagctcagcgacccttccctctatgatgaagtgcattgaagagaacaatggtgtggacaagaggatcagcaggtttattctccccatcggggccaccgtgaacatggacggagcagccatcttccagtgtgtggccgcggtgttcattgcgcaactcaacaacgtagagctcaacgcaggacagattttcaccattctagtgactgccacagcgtccagtgttggagcagcaggcgtgccagctggaggggtcctcaccattgccattatcctggaggccattgggctgcctactcatgacctgcctctgatcctggctgtggactggattgtggaccggaccaccacggtggtgaatgtggaaggggatgccctgggtgcaggcattctccaccacctgaatcagaaggcaacaaagaaaggcgagcaggaacttgctgaggtgaaagtggaagccatccccaactgcaagtctgaggaggagacatcgcccctggtgacacaccagaaccccgctggccccgtggccagtgccccagaactggaatccaaggagtcggttctgtgatggggctgggctttgggcttgcctgccagcagtgatgtcccaccctgttcacccagccgccagtcatggacacagggcactgcccttgccaacttttaccctcccaagcaatgctttggcccagtcgctggcctgaggcttacctctcggcactggcattgggctccccagccggaactggttaccaaggacaaggacactctgacattcggcttgatccatgtccaggtgcaactgtgtgtacaccagggatctgtttggaaacaaccccttgagctgccaggctcaagaaatcatggactcacagggtcctgtgtggttacatcttggaaaaaatgcagatgtatttcactctccccggtcagctctgcatcaggtgttttctgagcaaaccaagggggtttatagtcatctgtcgcattgcctcgagttgcagtaattgaaaaaatgctcaaattcttagccatggctggcctttgctgagctgggactcaggtgtttaaagagtttgtgctatagctaggtgtggatagcttctgatccctgggttctgggagactgcaggtgccgcacattgtcaagttagaaatactccaggtgggtgttagcactgtggtggtctctggtccacagccttaggtaaacaacttagattctgaggtcaaagaaaaaaggagagggaatgcagccttgtgggggagaagcggggcagagggttctctaatctaatcaggacaggacaggtttcacatacaattgtcccagttcgcatcccagccctggggcacttttctgcttccttccagaggcctgggcctctgataacactttggctttttctccattcacgctgatttggcaaaaggccagagatgggcctccttccctggggaggtgtgatgtagttatcacattcaggacccttgttgatttatcatctattatttgaattcaactggacactctgtaaaatgctgcactgcagcaaaaacaaaaccaccaccaccccagagaaaaccatgtactaattggagtggggtacccccattcacaggttcccaggtcccctggctttggctgatttcaaaatatagagccctttcttgccagtacatccaagtttaaaattatcagcgaaatggtccatgtttttccaattacctgctgacacggttctaagctaagtgaaggggaagatctgagagcgtgctgtttgtggctgttgatgcatattcgtgatgtaacaggtcctggggcctcactttaccccatttgtaaaatggggctaatgtcacctgcctcttacctacctcagagggatttggtgaagcaaactgttaatcttcgaaaacgaccatttcacttcttggatatcaagtgctaacccagtatgttcttcttttttatgtaagggacagctttctccacagagtcctttctgctggtgaggacagcatttctgagcagggctttgttctctatgtgcattaggacttttatcatgcccttgttctgtgtgtagttacttgacagcatcaaatgccgcctcttcctaatgtccttcaagttttcatgaactagcaaccccaccttccaccatggttctgggcgcctgattttgctgtgactcccagacccagccactgtttctgccaccctgtaacaggccattaaagctccccagtgttcagcctccttcactcccttgttttccctgttgctatgtgtcacctgggccctacagacaggggcacacgcttatggatgtgtgtaccattgagatgagaatgggtagatggaacggagaccatcaagccacacccccttcttaaaactggggacatgagcctgagcagaaagggtgaagaagagccatgggacacagagttgacccagccagggggaaagcccagctctctttaaaccagctaagccattccagtctcctgtgaagccaaaaagggaccaggaaccgtgcaaaggaaactggaaacttttccccgctgggtagagcatgttgctgatactcttctgttttcaagggaaacaatcacattgtttgattccaaatggtaaatgaacactcactattcttcaggcttcagtaaatctttttttcttccttcatatatatatacacaacacacacacacatatgtatatctatacacacatgtgtgttgtgtgtgttgtgtatatgcatgtgtgtgtgtgcgtgtgtgtatagttttagctccaagccaagcaagtttgtgtttggatagaggggaacttaactattaactacaagttgtatgtctgtggtatcttgattttcccatttctaaagatgaatttcacaaagccataaagcgtgaaattagagctggacttaagactcattggccgaccatcctgtgtcctggcctggccctgcagtaagaagcgtgtctgggtctggagaagggtgcttccgagagtgtgcaggtggcccttccccttggaggcgagaagagagaatgtgctgtctatcttcctggttttcagtccacagagtcggtagaccaggggttacgtgactggggaaaatctcacatctccttgtctgaaaacatttcccctgctgttctctttctaacatgttgtggtaaatctgttcagatactgctcatctgactgttttgtacatgtgacaattgccttaaaacctagcacagtcctcagaaatgaataccgtgtttccactgg

SEQ ID NO: 300336 - DNA, 4060 bp, Homo sapiens
ttcccgtgattgcccaggctggtctcgaactcctgggctcaagtgatcctcccacctcggccttccgaatagctgtgattacaggcatgcacagccacaccaagcctcacatgatttcttaaaatgaccagccccaaagcttttctgtattcccctggggtgggtttctgtttcatttactattctactgaagttacctcattctcttctccctcttgctccttagaggtcagcagatcattagttagcccagctgcgggtccctcaccctaattaggaagacctttccctgagtaaaagaaggcagcccacctaactcaaaaatgcattgcagggaagtttctagaatggttcctgcccaattctccctttctggatatgtgaattagaaaacgagtctgaggcaccgtggtgagggatggatgcttagccctctaggagtccacaatagtgtgggattgtctcatttggcacaagagatgcatcctgtcattcactggaaaaccttaaaaaaaaaaaaaaacactgggttttccaaatatgttaaaactttcaaaggacggcagcacgtcgtttcattcacacatttagttttgcctctactgctcacttcctcccaatctggatggctatttatataacacagaggtgggagtaaaaaaaaaaaaaaaattagggaaggaagttcctctggcctagacaaaaacctgtttctcagctgcaccaactaacctctgcagagcccgcagagccagctagagggagcagctcagcgacccttccctctatgatgaagtgcattgaagagaacaatggtgtggacaagaggatcagcaggtttattctccccatcggggccaccgtgaacatggacggagcagccatcttccagtgtgtggccgcggtgttcattgcgcaactcaacaacgtagagctcaacgcaggacagattttcaccattctagtgactgccacagcgtccagtgttggagcagcaggcgtgccagctggaggggtcctcaccattgccattatcctggaggccattgggctgcctactcatgacctgcctctgatcctggctgtggactggattgtggaccggaccaccacggtggtgaatgtggaaggggatgccctgggtgcaggcattctccaccacctgaatcagaaggcaacaaagaaaggcgagcaggaacttgctgaggtgaaagtggaagccatccccaactgcaagtctgaggaggagacatcgcccctggtgacacaccagaaccccgctggccccgtggccagtgccccagaactggaatccaaggagtcggttctgtgatggggctgggctttgggcttgcctgccagcagtgatgtcccaccctgttcacccagccgccagtcatggacacagggcactgcccttgccaacttttaccctcccaagcaatgctttggcccagtcgctggcctgaggcttacctctcggcactggcattgggctccccagccggaactggttaccaaggacaaggacactctgacattcggcttgatccatgtccaggtgcaactgtgtgtacaccagggatctgtttggaaacaaccccttgagctgccaggctcaagaaatcatggactcacagggtcctgtgtggttacatcttggaaaaaatgcagatgtatttcactctccccggtcagctctgcatcaggtgttttctgagcaaaccaagggggtttatagtcatctgtcgcattgcctcgagttgcagtaattgaaaaaatgctcaaattcttagccatggctggcctttgctgagctgggactcaggtgtttaaagagtttgtgctatagctaggtgtggatagcttctgatccctgggttctgggagactgcaggtgccgcacattgtcaagttagaaatactccaggtgggtgttagcactgtggtggtctctggtccacagccttaggtaaacaacttagattctgaggtcaaagaaaaaaggagagggaatgcagccttgtgggggagaagcggggcagagggttctctaatctaatcaggacaggacaggtttcacatacaattgtcccagttcgcatcccagccctggggcacttttctgcttccttccagaggcctgggcctctgataacactttggctttttctccattcacgctgatttggcaaaaggccagagatgggcctccttccctggggaggtgtgatgtagttatcacattcaggacccttgttgatttatcatctattatttgaattcaactggacactctgtaaaatgctgcactgcagcaaaaacaaaaccaccaccaccccagagaaaaccatgtactaattggagtggggtacccccattcacaggttcccaggtcccctggctttggctgatttcaaaatatagagccctttcttgccagtacatccaagtttaaaattatcagcgaaatggtccatgtttttccaattacctgctgacacggttctaagctaagtgaaggggaagatctgagagcgtgctgtttgtggctgttgatgcatattcgtgatgtaacaggtcctggggcctcactttaccccatttgtaaaatggggctaatgtcacctgcctcttacctacctcagagggatttggtgaagcaaactgttaatcttcgaaaacgaccatttcacttcttggatatcaagtgctaacccagtatgttcttcttttttatgtaagggacagctttctccacagagtcctttctgctggtgaggacagcatttctgagcagggctttgttctctatgtgcattaggacttttatcatgcccttgttctgtgtgtagttacttgacagcatcaaatgccgcctcttcctaatgtccttcaagttttcatgaactagcaaccccaccttccaccatggttctgggcgcctgattttgctgtgactcccagacccagccactgtttctgccaccctgtaacaggccattaaagctccccagtgttcagcctccttcactcccttgttttccctgttgctatgtgtcacctgggccctacagacaggggcacacgcttatggatgtgtgtaccattgagatgagaatgggtagatggaacggagaccatcaagccacacccccttcttaaaactggggacatgagcctgagcagaaagggtgaagaagagccatgggacacagagttgacccagccagggggaaagcccagctctctttaaaccagctaagccattccagtctcctgtgaagccaaaaagggaccaggaaccgtgcaaaggaaactggaaacttttccccgctgggtagagcatgttgctgatactcttctgttttcaagggaaacaatcacattgtttgattccaaatggtaaatgaacactcactattcttcaggcttcagtaaatctttttttcttccttcatatatatatacacaacacacacacacatatgtatatctatacacacatgtgtgttgtgtgtgttgtgtatatgcatgtgtgtgtgtgcgtgtgtgtatagttttagctccaagccaagcaagtttgtgtttggatagaggggaacttaactattaactacaagttgtatgtctgtggtatcttgattttcccatttctaaagatgaatttcacaaagccataaagcgtgaaattagagctggacttaagactcattggccgaccatcctgtgtcctggcctggccctgcagtaagaagcgtgtctgggtctggagaagggtgcttccgagagtgtgcaggtggcccttccccttggaggcgagaagagagaatgtgctgtctatcttcctggttttcagtccacagagtcggtagaccaggggttacgtgactggggaaaatctcacatctccttgtctgaaaacatttcccctgctgttctctttctaacatgttgtggtaaatctgttcagatactgctcatctgactgttttgtacatgtgacaattgccttaaaacctagcacagtcctcagaaatgaataccgtgtttccactgg

SEQ ID NO: 300337 - DNA, 3950 bp, Homo sapiens
ttctaagttctcccgggccctctggccccgaggactcagatcccggccgcgggagagggcccggcaggtgccaaggagcccgggcggtccttcagcccgcacttccccgcggtcgcccggagccggcctccgttagccgggcgggtaggcggctattggcgccaggattggccggcgccgcccgcgcccccgcggcctcgggtggagcctcccgcccggccgccccctgcggcacccgcgacacgggtggggaccagaggctcccggcggcggctcccggcggcggctcccgggctgtgattggccagcgccacagggggcgggacggcgggcgtgaagtgagcgggctggggccgctggcgcgccctcctacttccccgtctgcgtccgcgttcgcggctcccgtttgcatcatctccagccggcggctgctccagggaggctgggcgcgatcctctccgcccgcggctccaacccgcactctgcgcctctcctcgcctttctcgcacctgctcctgcgccaggcccggagacccccggggcggcttcccagaacctgcggagcacaactggccgaccgacccattcattgggaaccccgtcttttgccagagcccacgtcccctgccacctctagctcggagcggcgtgtagcgccatggagaagagcaacgagaccaacggctaccttgacagcgctcaggcggggcctgcggccgggcccggagctccggggaccgcggcgggacgcgcacggcgttgcgcgggcttcctgcggcgccaagcgctggtgctgctcaccgtgtccggggtgctggcgggcgcgggcctgggcgcggcgttgcgcgggctcagcctgagccgcacgcaggtcacctacctggccttccccggcgagatgctgctccgcatgctgcgcatgatcatcctgccgctggtggtctgcagcctggtgtcgggcgccgcctcgctcgatgccagctgcctcgggcgtctgggcggcatcgctgtcgcctactttggcctcaccacactgagtgcctcggcgctcgccgtggccttggcgttcatcatcaagccaggatccggtgcgcagacccttcagtccagcgacctggggctggaggactcggggcctcctcctgtccccaaagagacggtggactctttcctcgacctggccagaaacctgtttccctccaatcttgtggttgcagctttccgtacgtatgcaaccgattataaagtcgtgacccagaacagcagctctggaaatgtaacccatgaaaagatccccataggcactgagatagaagggatgaacattttaggattggtcctgtttgctctggtgttaggagtggccttaaagaaactaggctccgaaggagaagacctcatccgtttcttcaattccctcaacgaggcgacgatggtgctggtgtcctggattatgtggtacgtacctgtgggcatcatgttccttgttggaagcaagatcgtggaaatgaaagacatcatcgtgctggtgaccagcctggggaaatacatcttcgcatctatattgggccatgttattcatggaggaattgttctgccacttatttattttgttttcacacgaaaaaacccattcagattcctcctgggcctcctcgccccatttgcgacagcatttgctacctgctccagctcagcgacccttccctctatgatgaagtgcattgaagagaacaatggtgtggacaagaggatcagcaggtttattctccccatcggggccaccgtgaacatggacggagcagccatcttccagtgtgtggccgcggtgttcattgcgcaactcaacaacgtagagctcaacgcaggacagattttcaccattctagtgactgccacagcgtccagtgttggagcagcaggcgtgccagctggaggggtcctcaccattgccattatcctggaggccattgggctgcctactcatgacctgcctctgatcctggctgtggactggattgtggaccggaccaccacggtggtgaatgtggaaggggatgccctgggtgcaggcattctccaccacctgaatcagaaggcaacaaagaaaggcgagcaggaacttgctgaggtgaaagtggaagccatccccaactgcaagtctgaggaggagacatcgcccctggtgacacaccagaaccccgctggccccgtggccagtgccccagaactggaatccaaggagtcggttctgtgatggggctgggctttgggcttgcctgccagcagtgatgtcccaccctgttcacccagccgccagtcatggacacagggcactgcccttgccaacttttaccctcccaagcaatgctttggcccagtcgctggcctgaggcttacctctcggcactggcattgggctccccagccggaactggttaccaaggacaaggacactctgacattcggcttgatccatgtccaggtgcaactgtgtgtacaccagggatctgtttggaaacaaccccttgagctgccaggctcaagaaatcatggactcacagggtcctgtgtggttacatcttggaaaaaatgcagatgtatttcactctccccggtcagctctgcatcaggtgttttctgagcaaaccaagggggtttatagtcatctgtcgcattgcctcgagttgcagtaattgaaaaaatgctcaaattcttagccatggctggcctttgctgagctgggactcaggtgtttaaagagtttgtgctatagctaggtgtggatagcttctgatccctgggttctgggagactgcaggtgccgcacattgtcaagttagaaatactccaggtgggtgttagcactgtggtggtctctggtccacagccttaggtaaacaacttagattctgaggtcaaagaaaaaaggagagggaatgcagccttgtgggggagaagcggggcagagggttctctaatctaatcaggacaggacaggtttcacatacaattgtcccagttcgcatcccagccctggggcacttttctgcttccttccagaggcctgggcctctgataacactttggctttttctccattcacgctgatttggcaaaaggccagagatgggcctccttccctggggaggtgtgatgtagttatcacattcaggacccttgttgatttatcatctattatttgaattcaactggacactctgtaaaatgctgcactgcagcaaaaacaaaaccaccaccaccccagagaaaaccatgtactaattggagtggggtacccccattcacaggttcccaggtcccctggctttggctgatttcaaaatatagagccctttcttgccagtacatccaagtttaaaattatcagcgaaatggtccatgtttttccaattacctgctgacacggttctaagctaagtgaaggggaagatctgagagcgtgctgtttgtggctgttgatgcatattcgtgatgtaacaggtcctggggcctcactttaccccatttgtaaaatggggctaatgtcacctgcctcttacctacctcagagggatttggtgaagcaaactgttaatcttcgaaaacgaccatttcacttcttggatatcaagtgctaacccagtatgttcttcttttttatgtaagggacagctttctccacagagtcctttctgctggtgaggacagcatttctgagcagggctttgttctctatgtgcattaggacttttatcatgcccttgttctgtgtgtagttacttgacagcatcaaatgccgcctcttcctaatgtccttcaagttttcatgaactagcaaccccaccttccaccatggttctgggcgcctgattttgctgtgactcccagacccagccactgtttctgccaccctgtaacaggccattaaagctccccagtgttcagcc

SEQ ID NO: 300338 - DNA, 4343 bp, Homo sapiens
  misc_feature (4343)..(4343): n is a, c, g, or t
ttctaagttctcccgggccctctggccccgaggactcagatcccggccgcgggagagggcccggcaggtgccaaggagcccgggcggtccttcagcccgcacttccccgcggtcgcccggagccggcctccgttagccgggcgggtaggcggctattggcgccaggattggccggcgccgcccgcgcccccgcggcctcgggtggagcctcccgcccggccgccccctgcggcacccgcgacacgggtggggaccagaggctcccggcggcggctcccggcggcggctcccgggctgtgattggccagcgccacagggggcgggacggcgggcgtgaagtgagcgggctggggccgctggcgcgccctcctacttccccgtctgcgtccgcgttcgcggctcccgtttgcatcatctccagccggcggctgctccagggaggctgggcgcgatcctctccgcccgcggctccaacccgcactctgcgcctctcctcgcctttctcgcacctgctcctgcgccaggcccggagacccccggggcggcttcccagaacctgcggagcacaactggccgaccgacccattcattgggaaccccgtcttttgccagagcccacgtcccctgccacctctagctcggagcggcgtgtagcgccatggagaagagcaacgagaccaacggctaccttgacagcgctcaggcggggcctgcggccgggcccggagctccggggaccgcggcgggacgcgcacggcgttgcgcgggcttcctgcggcgccaagcgctggtgctgctcaccgtgtccggggtgctggcgggcgcgggcctgggcgcggcgttgcgcgggctcagcctgagccgcacgcaggtcacctacctggccttccccggcgagatgctgctccgcatgctgcgcatgatcatcctgccgctggtggtctgcagcctggtgtcgggcgccgcctcgctcgatgccagctgcctcgggcgtctgggcggcatcgctgtcgcctactttggcctcaccacactgagtgcctcggcgctcgccgtggccttggcgttcatcatcaagccaggatccggtgcgcagacccttcagtccagcgacctggggctggaggactcggggcctcctcctgtccccaaagagacggtggactctttcctcgacctggccagaaacctgtttccctccaatcttgtggttgcagctttccgtacgtatgcaaccgattataaagtcgtgacccagaacagcagctctggaaatgtaacccatgaaaagatccccataggcactgagatagaagggatgaacattttaggattggtcctgtttgctctggtgttaggagtggccttaaagaaactaggctccgaaggagaagacctcatccgtttcttcaattccctcaacgaggcgacgatggtgctggtgtcctggattatgtggtacgtacctgtgggcatcatgttccttgttggaagcaagatcgtggaaatgaaagacatcatcgtgctggtgaccagcctggggaaatacatcttcgcatctatattgggccatgttattcatggaggaattgttctgccacttatttattttgttttcacacgaaaaaacccattcagattcctcctgggcctcctcgccccatttgcgacagcatttgctacctgctccagctcagcgacccttccctctatgatgaagtgcattgaagagaacaatggtgtggacaagaggatcagcaggtttattctccccatcggggccaccgtgaacatggacggagcagccatcttccagtgtgtggccgcggtgttcattgcgcaactcaacaacgtagagctcaacgcaggacagattttcaccattctagtgactgccacagcgtccagtgttggagcagcaggcgtgccagctggaggggtcctcaccattgccattatcctggaggccattgggctgcctactcatgacctgcctctgatcctggctgtggactggattgtggaccggaccaccacggtggtgaatgtggaaggggatgccctgggtgcaggcattctccaccacctgaatcagaaggcaacaaagaaaggcgagcaggaacttgctgaggtgaaagtggaagccatccccaactgcaagtctgaggaggagacatcgcccctggtgacacaccagaaccccgctggccccgtggccagtgccccagaactggaatccaaggagtcggttctgtgatggggctgggctttgggcttgcctgccagcagtgatgtcccaccctgttcacccagccgccagtcatggacacagggcactgcccttgccaacttttaccctcccaagcaatgctttggcccagtcgctggcctgaggcttacctctcggcactggcattgggctccccagccggaactggttaccaaggacaaggacactctgacattcggcttgatccatgtccaggtgcaactgtgtgtacaccagggatctgtttggaaacaaccccttgagctgccaggctcaagaaatcatggactcacagggtcctgtgtggttacatcttggaaaaaatgcagatgtatttcactctccccggtcagctctgcatcaggtgttttctgagcaaaccaagggggtttatagtcatctgtcgcattgcctcgagttgcagtaattgaaaaaatgctcaaattcttagccatggctggcctttgctgagctgggactcaggtgtttaaagagtttgtgctatagctaggtgtggatagcttctgatccctgggttctgggagactgcaggtgccgcacattgtcaagttagaaatactccaggtgggtgttagcactgtggtggtctctggtccacagccttaggtaaacaacttagattctgaggtcaaagaaaaaaggagagggaatgcagccttgtgggggagaagcggggcagagggttctctaatctaatcaggacaggacaggtttcacatacaattgtcccagttcgcatcccagccctggggcacttttctgcttccttccagaggcctgggcctctgataacactttggctttttctccattcacgctgatttggcaaaaggccagagatgggcctccttccctggggaggtgtgatgtagttatcacattcaggacccttgttgatttatcatctattatttgaattcaactggacactctgtaaaatgctgcactgcagcaaaaacaaaaccaccaccaccccagagaaaaccatgtactaattggagtggggtacccccattcacaggttcccaggtcccctggctttggctgatttcaaaatatagagccctttcttgccagtacatccaagtttaaaattatcagcgaaatggtccatgtttttccaattacctgctgacacggttctaagctaagtgaaggggaagatctgagagcgtgctgtttgtggctgttgatgcatattcgtgatgtaacaggtcctggggcctcactttaccccatttgtaaaatggggctaatgtcacctgcctcttacctacctcagagggatttggtgaagcaaactgttaatcttcgaaaacgaccatttcacttcttggatatcaagtgctaacccagtatgttcttcttttttatgtaagggacagctttctccacagagtcctttctgctggtgaggacagcatttctgagcagggctttgttctctatgtgcattaggacttttatcatgcccttgttctgtgtgtagttacttgacagcatcaaatgccgcctcttcctaatgtccttcaagttttcatgaactagcaaccccaccttccaccatggttctgggcgcctgattttgctgtgactcccagacccagccactgtttctgccaccctgtaacaggccattaaagctccccagtgttcagccaaaaaaaaaaaaaaaaaaaaaaaaaaaaaaaaaaaaaaaaaaaaaacaaaagagcaaacaccaacaaaaaaaaaaaaaaacaagagggggggggggggcgccgcgggcccccagaaagacctcccaacaaccacgggggggggcgcgggcccccacggagagaacgacacagcggcgcacgcgcggccacaagagaacccgcgggacccaacacacgcgggggggccacacacacaataaaaacaacgcgccggggcgggccccccagacctgtctggggacaccactccaggaggggcgcaacagaggagaaccaaagcgggcgcatacaccaagagagggcaacaagagcgagcgcagcaaaaaaatccccgcacagagggggggggtgan

SEQ ID NO: 300339 - DNA, 3882 bp, Homo sapiens
ttctaagttctcccgggccctctggccccgaggactcagatcccggccgcgggagagggcccggcaggtgccaaggagcccgggcggtccttcagcccgcacttccccgcggtcgcccggagccggcctccgttagccgggcgggtaggcggctattggcgccaggattggccggcgccgcccgcgcccccgcggcctcgggtggagcctcccgcccggccgccccctgcggcacccgcgacacgggtggggaccagaggctcccggcggcggctcccggcggcggctcccgggctgtgattggccagcgccacagggggcgggacggcgggcgtgaagtgagcgggctggggccgctggcgcgccctcctacttccccgtctgcgtccgcgttcgcggctcccgtttgcatcatctccagccggcggctgctccagggaggctgggcgcgatcctctccgcccgcggctccaacccgcactctgcgcctctcctcgcctttctcgcacctgctcctgcgccaggcccggagacccccggggcggcttcccagaacctgcggagcacaactggccgaccgacccattcattgggaaccccgtcttttgccagagcccacgtcccctgccacctctagctcggagcggcgtgtagcgccatggagaagagcaacgagaccaacggctaccttgacagcgctcaggcggggcctgcggccgggcccggagctccggggaccgcggcgggacgcgcacggcgttgcgcgggcttcctgcggcgccaagcgctggtgctgctcaccgtgtccggggtgctggcgggcgcgggcctgggcgcggcgttgcgcgggctcagcctgagccgcacgcaggtcacctacctggccttccccggcgagatgctgctccgcatgctgcgcatgatcatcctgccgctggtggtctgcagcctggtgtcgggcgccgcctcgctcgatgccagctgcctcgggcgtctgggcggcatcgctgtcgcctactttggcctcaccacactgagtgcctcggcgctcgccgtggccttggcgttcatcatcaagccaggatccggtgcgcagacccttcagtccagcgacctggggctggaggactcggggcctcctcctgtccccaaagagacggtggactctttcctcgacctggccagaaacctgtttccctccaatcttgtggttgcagctttccgtacgtatgcaaccgattataaagtcgtgacccagaacagcagctctggaaatgtaacccatgaaaagatccccataggcactgagatagaagggatgaacattttaggattggtcctgtttgctctggtgttaggagtggccttaaagaaactaggctccgaaggagaagacctcatccgtttcttcaattccctcaacgaggcgacgatggtgctggtgtcctggattatgtggtacgtacctgtgggcatcatgttccttgttggaagcaagatcgtggaaatgaaagacatcatcgtgctggtgaccagcctggggaaatacatcttcgcatctatattgggccatgttattcatggaggaattgttctgccacttatttattttgttttcacacgaaaaaacccattcagattcctcctgggcctcctcgccccatttgcgacagcatttgctacctgctccagctcagcgacccttccctctatgatgaagtgcattgaagagaacaatggtgtggacaagaggatcagcaggtttattctccccatcggggccaccgtgaacatggacggagcagccatcttccagtgtgtggccgcggtgttcattgcgcaactcaacaacgtagagctcaacgcaggacagattttcaccattctagtgactgccacagcgtccagtgttggagcagcaggcgtgccagctggaggggtcctcaccattgccattatcctggaggccattgggctgcctactcatgacctgcctctgatcctggctgtggactggattgtggaccggaccaccacggtggtgaatgtggaaggggatgccctgggtgcaggcattctccaccacctgaatcagaaggcaacaaagaaaggcgagcaggaacttgctgaggtgaaagtggaagccatccccaactgcaagtctgaggaggagacatcgcccctggtgacacaccagaaccccgctggccccgtggccagtgccccagaactggaatccaaggagtcggttctgtgatggggctgggctttgggcttgcctgccagcagtgatgtcccaccctgttcacccagccgccagtcatggacacagggcactgcccttgccaacttttaccctcccaagcaatgctttggcccagtcgctggcctgaggcttacctctcggcactggcattgggctccccagccggaactggttaccaaggacaaggacactctgacattcggcttgatccatgtccaggtgcaactgtgtgtacaccagggatctgtttggaaacaaccccttgagctgccaggctcaagaaatcatggactcacagggtcctgtgtggttacatcttggaaaaaatgcagatgtatttcactctccccggtcagctctgcatcaggtgttttctgagcaaaccaagggggtttatagtcatctgtcgcattgcctcgagttgcagtaattgaaaaaatgctcaaattcttagccatggctggcctttgctgagctgggactcaggtgtttaaagagtttgtgctatagctaggtgtggatagcttctgatccctgggttctgggagactgcaggtgccgcacattgtcaagttagaaatactccaggtgggtgttagcactgtggtggtctctggtccacagccttaggtaaacaacttagattctgaggtcaaagaaaaaaggagagggaatgcagccttgtgggggagaagcggggcagagggttctctaatctaatcaggacaggacaggtttcacatacaattgtcccagttcgcatcccagccctggggcacttttctgcttccttccagaggcctgggcctctgataacactttggctttttctccattcacgctgatttggcaaaaggccagagatgggcctccttccctggggaggtgtgatgtagttatcacattcaggacccttgttgatttatcatctattatttgaattcaactggacactctgtaaaatgctgcactgcagcaaaaacaaaaccaccaccaccccagagaaaaccatgtactaattggagtggggtacccccattcacaggttcccaggtcccctggctttggctgatttcaaaatatagagccctttcttgccagtacatccaagtttaaaattatcagcgaaatggtccatgtttttccaattacctgctgacacggttctaagctaagtgaaggggaagatctgagagcgtgctgtttgtggctgttgatgcatattcgtgatgtaacaggtcctggggcctcactttaccccatttgtaaaatggggctaatgtcacctgcctcttacctacctcagagggatttggtgaagcaaactgttaatcttcgaaaacgaccatttcacttcttggatatcaagtgctaacccagtatgttcttcttttttatgtaagggacagctttctccacagaagtcggtagaccaggggttacgtgactggggaaaatctcacatctccttgtctgaaaacatttcccctgctgttctctttctaacatgttgtggtaaatctgttcagatactgctcatctgactgttttgtacatgtgacaattgccttaaaacctagcacagtcctcagaaatgaataccgtgtttccactgg

SEQ ID NO: 300340 - DNA, 3771 bp, Homo sapiens
ttctaagttctcccgggccctctggccccgaggactcagatcccggccgcgggagagggcccggcaggtgccaaggagcccgggcggtccttcagcccgcacttccccgcggtcgcccggagccggcctccgttagccgggcgggtaggcggctattggcgccaggattggccggcgccgcccgcgcccccgcggcctcgggtggagcctcccgcccggccgccccctgcggcacccgcgacacgggtggggaccagaggctcccggcggcggctcccggcggcggctcccgggctgtgattggccagcgccacagggggcgggacggcgggcgtgaagtgagcgggctggggccgctggcgcgccctcctacttccccgtctgcgtccgcgttcgcggctcccgtttgcatcatctccagccggcggctgctccagggaggctgggcgcgatcctctccgcccgcggctccaacccgcactctgcgcctctcctcgcctttctcgcacctgctcctgcgccaggcccggagacccccggggcggcttcccagaacctgcggagcacaactggccgaccgacccattcattgggaaccccgtcttttgccagagcccacgtcccctgccacctctagctcggagcggcgtgtagcgccatggagaagagcaacgagaccaacggctaccttgacagcgctcaggcggggcctgcggccgggcccggagctccggggaccgcggcgggacgcgcacggcgttgcgcgggcttcctgcggcgccaagcgctggtgctgctcaccgtgtccggggtgctggcgggcgcgggcctgggcgcggcgttgcgcgggctcagcctgagccgcacgcaggtcacctacctggccttccccggcgagatgctgctccgcatgctgcgcatgatcatcctgccgctggtggtctgcagcctggtgtcgggcgccgcctcgctcgatgccagctgcctcgggcgtctgggcggcatcgctgtcgcctactttggcctcaccacactgagtgcctcggcgctcgccgtggccttggcgttcatcatcaagccaggatccggtgcgcagacccttcagtccagcgacctggggctggaggactcggggcctcctcctgtccccaaagagacggtggactctttcctcgacctggccagaaacctgtttccctccaatcttgtggttgcagctttccgtacgtatgcaaccgattataaagtcgtgacccagaacagcagctctggaaatgtaacccatgaaaagatccccataggcactgagatagaagggatgaacattttaggattggtcctgtttgctctggtgttaggagtggccttaaagaaactaggctccgaaggagaagacctcatccgtttcttcaattccctcaacgaggcgacgatggtgctggtgtcctggattatgtggtacgtacctgtgggcatcatgttccttgttggaagcaagatcgtggaaatgaaagacatcatcgtgctggtgaccagcctggggaaatacatcttcgcatctatattgggccatgttattcatggaggaattgttctgccacttatttattttgttttcacacgaaaaaacccattcagattcctcctgggcctcctcgccccatttgcgacagcatttgctacctgctccagctcagcgacccttccctctatgatgaagtgcattgaagagaacaatggtgtggacaagaggatcagcaggtttattctccccatcggggccaccgtgaacatggacggagcagccatcttccagtgtgtggccgcggtgttcattgcgcaactcaacaacgtagagctcaacgcaggacagattttcaccattctagtgactgccacagcgtccagtgttggagcagcaggcgtgccagctggaggggtcctcaccattgccattatcctggaggccattgggctgcctactcatgacctgcctctgatcctggctgtggactggattgtggaccggaccaccacggtggtgaatgtggaaggggatgccctgggtgcaggcattctccaccacctgaatcagaaggcaacaaagaaaggcgagcaggaacttgctgaggtgaaagtggaagccatccccaactgcaagtctgaggaggagacatcgcccctggtgacacaccagaaccccgctggccccgtggccagtgccccagaactggaatccaaggagtcggttctgtgatggggctgggctttgggcttgcctgccagcagtgatgtcccaccctgttcacccagccgccagtcatggacacagggcactgcccttgccaacttttaccctcccaagcaatgctttggcccagtcgctggcctgaggcttacctctcggcactggcattgggctccccagccggaactggttaccaaggacaaggacactctgacattcggcttgatccatgtccaggtgcaactgtgtgtacaccagggatctgtttggaaacaaccccttgagctgccaggctcaagaaatcatggactcacagggtcctgtgtggttacatcttggaaaaaatgcagatgtatttcactctccccggtcagctctgcatcaggtgttttctgagcaaaccaagggggtttatagtcatctgtcgcattgcctcgagttgcagtaattgaaaaaatgctcaaattcttagccatggctggcctttgctgagctgggactcaggtgtttaaagagtttgtgctatagctaggtgtggatagcttctgatccctgggttctgggagactgcaggtgccgcacattgtcaagttagaaatactccaggtgggtgttagcactgtggtggtctctggtccacagccttaggtaaacaacttagattctgaggtcaaagaaaaaaggagagggaatgcagccttgtgggggagaagcggggcagagggttctctaatctaatcaggacaggacaggtttcacatacaattgtcccagttcgcatcccagccctggggcacttttctgcttccttccagaggcctgggcctctgataacactttggctttttctccattcacgctgatttggcaaaaggccagagatgggcctccttccctggggaggtgtgatgtagttatcacattcaggacccttgttgatttatcatctattatttgaattcaactggacactctgtaaaatgctgcactgcagcaaaaacaaaaccaccaccaccccagagaaaaccatgtactaattggagtggggtacccccattcacaggttcccaggtcccctggctttggctgatttcaaaatatagagccctttcttgccagtacatccaagtttaaaattatcagcgaaatggtccatgtttttccaattacctgctgacacggttctaagctaagtgaaggggaagatctgagagcgtgctgtttgtggctgttgatgcatattcgtgactcactgcagcctccgcctcctgggttcaagcggtgcttgtgcctcagccacctgagtagctgggactacaggtgcagaacaccgtgcctgggtaatttttgtatttttggtggagacggggtttcaccatgttggccaggctggtctcggactcctggcctcaagtgatctgcgcacctcagcctcctaaggtgttgggattacaggggtgagccactgcacctgggcccatacataaggtttgagttgagatagaaaaactctggcagggctg

SEQ ID NO: 300341 - DNA, 367 bp, Homo sapiens
agcaaaaggtgcagtgtcagctaggggtggagagagaacactgtgttagggttttagaagtggacatctcaaagcagatactttgcacactgaattttaagaatactgatgaagacaggtaccatggctcacgcctgtagtcccaacactttgggaggctgaggcaggaggatcacttgagcccaaaagttcaaggctgcagtgagctgcaatcacaccactgcactccagcctgggcaacagggacctcatctctaaaaaattgttttaaaagaatactgacagaatgctttcttttccaacagaaacctgtttccctccaatcttgtggttgcagctttccgtacggtaaggcttgatactttgc

SEQ ID NO: 300342 - DNA, 467 bp, Homo sapiens
ctcatctctaaaaaattgttttaaaagaatactgacagaatgctttcttttccaacagaaacctgtttccctccaatcttgtggttgcagctttccgtacggtaaggcttgatactttgctaaaaatatgaaactttgatggaagaaatgtaccaattactgctatagagttaggtaaggtagaacagggagagatggtggtgttaacaaaacttggtaagattggcctaaacttttatcaatgggtacctagagttaaaaaacaacaacaataaaataaataaataaagactgaacaaacaaaactttccaaaatgtcccactggttccaaaatttgtttacattacctaagaaataccctcaaatcacattttggggatgtcttaaatattgtacacttttttaaaaaaatacacttttatctttttttctgactataaagataatatgtgctcactgcaaaaaa

SEQ ID NO: 300343 - DNA, 723 bp, Homo sapiens
ttttgatcttctttctttttacaggaacaattggcttctttgcatgcttttggtttgttaccaaaatatacagtgtggtgaaggttgactgaagaagtccagtgtgtccagttaaaacagaaataaattaaactcttcatcaacaaagacctgtttttgtgactgccttgagttttatcagaattattggcctagtaatccttcagaaacaccgtaattctaaataaacctcttcccatacacctttcccccataagatgtgtcttcaacactataaagcatttgtattgtgatttgattaagtatatatttggttgttctcaatgaagagcaaatttaaatattatgtgcatttgtaaatacagtagctataaaattttccatacttctaatggcagaatagaggaggccatattaaataatactgatgaaaggcaggacactgcattgtaaataggattttctaggctcggtaggcagaaagaattatttttctttgaaggaaataactttttatcatggtaattttgaaggatgattcctatgatgtgttcaccaggggaatgtggcttttaaagaaaatcttctattggttgtaactgttcatatcttcttacttttctgtgttgacttcattattcccatggtattggccttttaaactatgtgcctctgagtctttcaatttataaatttgttatcttaataaatattataaaaatg

SEQ ID NO: 300344 - DNA, 998 bp, Homo sapiens
ctatgcaaaaggtatatttgtatgtcctccaaaacacacattgtgctttgcatatagtagggcctcaatacatgtacaatgtaaggatggatataatgatgtttgtaatttcccacggtaatgtcccatgtatagtctcttgatttagaaaatctcctttaatattttctcagagtactgcatttaaaacaatggtgaaaaccattgggactttaaatgtaaaatttatacaaggattatttatagtcccttatgtgtgcatgtgcaaggagtactatgcttgaagtcagaaaaaacgcatttgatttctggccacaagtaccatccatgtgaccatgagacagtcacttaacccctttgaacctcatttttgtctcattgaaagagtgtccccatctagcattcaaattctttggaatctagactgatacctgaaaatcaagccatacattgttttcatgaattatctcatttactctacataatagtctatggaggcaatgaggacagataaatttctccctagttaatatgataaatgggcttggagatgtcagtggacttgcccaaggatgacacacacagtttgtgacagagctgctctgttctctgctaccatgctgtccctcattttcagctaggatgcatttttgttactatctaatcatgtcacttttaacattttgtaaaaacttactgagttattttattataattctttgaagactgataacttccaataactgtacttagaaaatatccccatttaatcattatttgaacctgttttaatgtattcatctcataccttaaaaaattctagtagcgttttccattttgttgtaaaatattcttaaataggaaaggacagttgacatccttcagtcttttctatgtagtaaggaaaataatgtgtattgtagaaagcttaggtaatcttatagtagaacagacgtgctcatagatctgtagtatattcccggtgggtaatagtttat

SEQ ID NO: 300345 - DNA, 892 bp, Homo sapiens
gtttccgattgggagattgtcttagaaaattgaagggagtatttttattagcgaagtttcttaaaatgcaagtttatcattaaaatgcaagaatcttaggcagtgttccaactctattttttaaaacttttggcaatccaatatagttgtgatgtttaatatccccgtataatgtttcattttgcaaacctggtgcagtaaatagtatatatttctagatattaagagctcagtgtgcctggaatgactggtctagagtaatagctgcccccggcataaagaaaagaataattattccattccattccattattttcttaaaaaaaaaaaaaaacctacatataggtctaaatgttgacatctaaacatctagttataatttaaagcaatacttttagtaggtattactaggaattcttttttttttttttttgggttgcataatcttactctgatttcccctagactttagtaaatctgaaactctccaaatctcaggactaaccaaagttagataatttagaaattgcagttgttgactcaatggaaggacaagctttgaatgggatttttttttgttcttaatgtgctgtcagcagatgtttacttaaagagattttttaatctcctctaggaagatgataagatcagatgggcgtctagatgggactatattctggagtctatgcctcatacccacattcagtggtttagcattatgaattccctggtcattgttctcttcttatctggaatggtagctatgattatgttacggacactgcacaaagatattgctagatataatcagatggactctacggtaagtggaaacattttagtctttagtctgccaaggacactgtttattgttattttgcaaaaaggtaaa

SEQ ID NO: 300346 - DNA, 2831 bp, Homo sapiens
atgtgcagacggcggtgcgcatgctctgttgcggtccgcttcggtttctgttgcgggacccggggtgtctcctagcgcaaccggaactagccttctgggggccggcttcctttatctctggcggccttgtagtcgtctccgagactccccacccctccttccctcttgaccccctaggtttgattgccctttccccgaaacaactatcatgagcgcgaggctgccggtgttgtctccacctcggtggccgcggctgttgctgctgtcgctgctcctgctgggggcggttcctggcccgcgccggagcggcgctttctacctgcccggcctggcgcccgtcaacttctgcgacgaagaaaaaaagagcgacgagtgcaaggccgaaatagaactatttgtgaacagacttgattcagtggaatcagttcttccttatgaatacacagcgtttgatttttgccaagcatcagaaggaaagcgcccatctgaaaatcttggtcaggtactattcggggaaagaattgaaccttcaccatataagtttacgtttaataagaaggagacctgtaagcttgtttgtacaaaaacataccatacagagaaagctgaagacaaacaaaagttagaattcttgaaaaaaagcatgttattgaattatcaacatcactggattgtggataatatgcctgtaacgtggtgttacgatgttgaagatggtcagaggttctgtaatcctggatttcctattggctgttacattacagataaaggccatgcaaaagatgcctgtgttattagttcagatttccatgaaagagatacattttacatcttcaaccatgttgacatcaaaatatactatcatgttgttgaaactgggtccatgggagcaagattagtggctgctaaacttgaaccgaaaagcttcaaacatacccatatagataaaccagactgctcagggccccccatggacataagtaacaaggcttctggggagataaaaattgcctatacttactctgttagcttcgaggaagatgataagatcagatgggcgtctagatgggactatattctggagtctatgcctcatacccacattcagtggtttagcattatgaattccctggtcattgttctcttcttatctggaatggtagctatgattatgttacggacactgcacaaagatattgctagatataatcagatggactctacggaagatgcccaggaagaatttggctggaaacttgttcatggtgatatattccgtcctccaagaaaagggatgctgctatcagtctttctaggatccgggacacagattttaattatgacctttgtgactctatttttcgcttgcctgggatttttgtcacctgccaaccgaggagcgctgatgacgtgtgctgtggtcctgtgggtgctgctgggcacccctgcaggctatgttgctgccagattctataagtcctttggaggtgagaagtggaaaacaaatgttttattaacatcatttctttgtcctgggattgtatttgctgacttctttataatgaatctgatcctctggggagaaggatcttcagcagctattccttttgggacactggttgccatattggccctttggttctgcatatctgtgcctctgacgtttattggtgcatactttggttttaagaagaatgccattgaacacccagttcgaaccaatcagattccacgtcagattcctgaacagtcgttctacacgaagcccttgcctggtattatcatgggagggattttgccctttggctgcatctttatacaacttttcttcattctgaatagtatttggtcacaccagatgtattacatgtttggcttcctatttctggtgtttatcattttggttattacctgttctgaagcaactatacttctttgctatttccacctatgtgcagaggattatcattggcaatggcgttcattccttacgagtggctttactgcagtttatttcttaatctatgcagtacactacttcttttcaaaactgcagatcacgggaacagcaagcacaattctgtactttggttataccatgataatggttttgatcttctttctttttacaggaacaattggcttctttgcatgcttttggtttgttaccaaaatatacagtgtggtgaaggttgactgaagaagtccagtgtgtccagttaaaacagaaataaattaaactcttcatcaacaaagacctgtttttgtgactgccttgagttttatcagaattattggcctagtaatccttcagaaacaccgtaattctaaataaacctcttcccatacacctttcccccataagatgtgtcttcaacactataaagcatttgtattgtgatttgattaagtatatatttggttgttctcaatgaagagcaaatttaaatattatgtgcatttgtaaatacagtagctataaaattttccatacttctaatggcagaatagaggaggccatattaaataatactgatgaaaggcaggacactgcattgtaaataggattttctaggctcggtaggcagaaagaattatttttctttgaaggaaataactttttatcatggtaattttgaaggatgattcctatgatgtgttcaccaggggaatgtggcttttaaagaaaatcttctattggttgtaactgttcatatcttcttacttttctgtgttgacttcattattcccatggtattggccttttaaactatgtgcctctgagtctttcaatttataaatttgttatcttaataaatattataaaaatg

SEQ ID NO: 300347 - DNA, 3442 bp, Homo sapiens
atgtgcagacggcggtgcgcatgctctgttgcggtccgcttcggtttctgttgcgggacccggggtgtctcctagcgcaaccggaactagccttctgggggccggcttcctttatctctggcggccttgtagtcgtctccgagactccccacccctccttccctcttgaccccctaggtttgattgccctttccccgaaacaactatcatgagcgcgaggctgccggtgttgtctccacctcggtggccgcggctgttgctgctgtcgctgctcctgctgggggcggttcctggcccgcgccggagcggcgctttctacctgcccggcctggcgcccgtcaacttctgcgacgaagaaaaaaagagcgacgagtgcaaggccgaaatagaactatttgtgaacagacttgattcagtggaatcagttcttccttatgaatacacagcgtttgatttttgccaagcatcagaaggaaagcgcccatctgaaaatcttggtcaggtactattcggggaaagaattgaaccttcaccatataagtttacgtttaataagaaggagacctgtaagcttgtttgtacaaaaacataccatacagagaaagctgaagacaaacaaaagttagaattcttgaaaaaaagcatgttattgaattatcaacatcactggattgtggataatatgcctgtaacgtggtgttacgatgttgaagatggtcagaggttctgtaatcctggatttcctattggctgttacattacagataaaggccatgcaaaagatgcctgtgttattagttcagatttccatgaaagagatacattttacatcttcaaccatgttgacatcaaaatatactatcatgttgttgaaactgggtccatgggagcaagattagtggctgctaaacttgaaccgaaaagcttcaaacatacccatatagataaaccagactgctcagggccccccatggacataagtaacaaggcttctggggagataaaaattgcctatacttactctgttagcttcgaggaagatgataagatcagatgggcgtctagatgggactatattctggagtctatgcctcatacccacattcagtggtttagcattatgaattccctggtcattgttctcttcttatctggaatggtagctatgattatgttacggacactgcacaaagatattgctagatataatcagatggactctacggaagatgcccaggaagaatttggctggaaacttgttcatggtgatatattccgtcctccaagaaaagggatgctgctatcagtctttctaggatccgggacacagattttaattatgacctttgtgactctatttttcgcttgcctgggatttttgtcacctgccaaccgaggagcgctgatgacgtgtgctgtggtcctgtgggtgctgctgggcacccctgcaggctatgttgctgccagattctataagtcctttggaggtgagaagtggaaaacaaatgttttattaacatcatttctttgtcctgggattgtatttgctgacttctttataatgaatctgatcctctggggagaaggatcttcagcagctattccttttgggacactggttgccatattggccctttggttctgcatatctgtgcctctgacgtttattggtgcatactttggttttaagaagaatgccattgaacacccagttcgaaccaatcagattccacgtcagattcctgaacagtcgttctacacgaagcccttgcctggtattatcatgggagggattttgccctttggctgcatctttatacaacttttcttcattctgaatagtatttggtcacaccagatgtattacatgtttggcttcctatttctggtgtttatcattttggttattacctgttctgaagcaactatacttctttgctatttccacctatgtgcagaggattatcattggcaatggcgttcattccttacgagtggctttactgcagtttatttcttaatctatgcagtacactacttcttttcaaaactgcagatcacgggaacagcaagcacaattctgtactttggttataccatgataatggttttgatcttctttctttttacaggaacaattggcttctttgcatgcttttggtttgttaccaaaatatacagtgtggtgaaggttgactgaagaagtccagtgtgtccagttaaaacagaaataaattaaactcttcatcaacaaagacctgtttttgtgactgccttgagttttatcagaattattggcctagtaatccttcagaaacaccgtaattctaaataaacctcttcccatacacctttcccccataagatgtgtcttcaacactataaagcatttgtattgtgatttgattaagtatatatttggttgttctcaatgaagagcaaatttaaatattatgtgcatttgtaaatacagtagctataaaattttccatacttctaatggcagaatagaggaggccatattaaataatactgatgaaaggcaggacactgcattgtaaataggattttctaggctcggtaggcagaaagaattatttttctttgaaggaaataactttttatcatggtaattttgaaggatgattcctatgatgtgttcaccaggggaatgtggcttttaaagaaaatcttctattggttgtaactgttcatatcttcttacttttctgtgttgacttcattattcccatggtattggccttttaaactatgtgcctctgagtctttcaatttataaatttgttatcttaataaatattataaaaatgtcttcattgcatcattacctattatatattcaaggaggttctgtaaatacagatctatttaccaaggtgttttgaaatgatttatactattttatcagattttactggattttgttaatgtaacactttctgagttttgatctgaatggaatttcactgtgtaaggcattgtctaaaatgttcactgtgaggcagtagaggaggttgaagtcatgcatatctagacagatgaattatctgcaagtacttaaggtggagccttactacattgtcattaaggagtttctatttttgacttgtttttcaaaatacagtgttttaagtcaggttttattacctggacattagcaatcactagcaagtcttcatctttatgatttcattgttttaatttagatttcacaaacagttttacttctaagagttaagaaatgcactgtctttcacattcatctgactaattgaaatccatttatgtagaatataggaatggggggtgattctgaagtatcggtctgcttgtatctgtgagcatattcatttgtattttagggtctctctgcttgctgcttaggagagcaaatcagatactgtcattaaacttacaacta

SEQ ID NO: 300348 - DNA, 3290 bp, Homo sapiens
  misc_feature (2873)..(2873): n is a, c, g, or t
atgtgcagacggcggtgcgcatgctctgttgcggtccgcttcggtttctgttgcgggacccggggtgtctcctagcgcaaccggaactagccttctgggggccggcttcctttatctctggcggccttgtagtcgtctccgagactccccacccctccttccctcttgaccccctaggtttgattgccctttccccgaaacaactatcatgagcgcgaggctgccggtgttgtctccacctcggtggccgcggctgttgctgctgtcgctgctcctgctgggggcggttcctggcccgcgccggagcggcgctttctacctgcccggcctggcgcccgtcaacttctgcgacgaagaaaaaaagagcgacgagtgcaaggccgaaatagaactatttgtgaacagacttgattcagtggaatcagttcttccttatgaatacacagcgtttgatttttgccaagcatcagaaggaaagcgcccatctgaaaatcttggtcaggtactattcggggaaagaattgaaccttcaccatataagtttacgtttaataagaaggagacctgtaagcttgtttgtacaaaaacataccatacagagaaagctgaagacaaacaaaagttagaattcttgaaaaaaagcatgttattgaattatcaacatcactggattgtggataatatgcctgtaacgtggtgttacgatgttgaagatggtcagaggttctgtaatcctggatttcctattggctgttacattacagataaaggccatgcaaaagatgcctgtgttattagttcagatttccatgaaagagatacattttacatcttcaaccatgttgacatcaaaatatactatcatgttgttgaaactgggtccatgggagcaagattagtggctgctaaacttgaaccgaaaagcttcaaacatacccatatagataaaccagactgctcagggccccccatggacataagtaacaaggcttctggggagataaaaattgcctatacttactctgttagcttcgaggaagatgataagatcagatgggcgtctagatgggactatattctggagtctatgcctcatacccacattcagtggtttagcattatgaattccctggtcattgttctcttcttatctggaatggtagctatgattatgttacggacactgcacaaagatattgctagatataatcagatggactctacggaagatgcccaggaagaatttggctggaaacttgttcatggtgatatattccgtcctccaagaaaagggatgctgctatcagtctttctaggatccgggacacagattttaattatgacctttgtgactctatttttcgcttgcctgggatttttgtcacctgccaaccgaggagcgctgatgacgtgtgctgtggtcctgtgggtgctgctgggcacccctgcaggctatgttgctgccagattctataagtcctttggaggtgagaagtggaaaacaaatgttttattaacatcatttctttgtcctgggattgtatttgctgacttctttataatgaatctgatcctctggggagaaggatcttcagcagctattccttttgggacactggttgccatattggccctttggttctgcatatctgtgcctctgacgtttattggtgcatactttggttttaagaagaatgccattgaacacccagttcgaaccaatcagattccacgtcagattcctgaacagtcgttctacacgaagcccttgcctggtattatcatgggagggattttgccctttggctgcatctttatacaacttttcttcattctgaatagtatttggtcacaccagatgtattacatgtttggcttcctatttctggtgtttatcattttggttattacctgttctgaagcaactatacttctttgctatttccacctatgtgcagaggattatcattggcaatggcgttcattccttacgagtggctttactgcagtttatttcttaatctatgcagtacactacttcttttcaaaactgcagatcacgggaacagcaagcacaattctgtactttggttataccatgataatggttttgatcttctttctttttacaggaacaattggcttctttgcatgcttttggtttgttaccaaaatatacagtgtggtgaaggttgactgaagaagtccagtgtgtccagttaaaacagaaataaattaaactcttcatcaacaaagacctgtttttgtgactgccttgagttttatcagaattattggcctagtaatccttcagaaacaccgtaattctaaataaacctcttcccatacacctttcccccataagatgtgtcttcaacactataaagcatttgtattgtgatttgattaagtatatatttggttgttctcaatgaagagcaaatttaaatattatgtgcatttgtaaatacagtagctataaaattttccatacttctaatggcagaatagaggaggccatattaaataatactgatgaaaggcaggacactgcattgtaaataggattttctaggctcggtaggcagaaagaattatttttctttgaaggaaataactttttatcatggtaattttgaaggatgattcctatgatgtgttcaccaggggaatgtggcttttaaagaaaatcttctattggttgtaactgttcatatcttcttacttttctgtgttgacttcattattcccatggtattggccttttaaactatgtgcctctgagtctttcaatttataaatttgttatcttaataaatattataaaaatgaaaaaaaaaaaaaaaaaaaaaaaaaaaaagaaaaaagaaaanaaaaaaaaaaaaaaaaaaaaaaaaaaaaaaccttgtggcccgcttggcccaagtggattttaaattgggccaggtttatgaatgcgcccgaatttggggctaattggcccaattcgccttatggggggcggtttaacaatcaatggcccgcggtttaacaccgtcggaattggaaaaccctgggggttcccaacttaaatcgcttggaagaaaatccccttttggccagttggggaaaaaccaaaaagccccgaccggatggcctttccaaaaagttgcccaccctgatgggcaatggaaaattgaagcgcgtaatatttggtaaaaatcccggtaaatttttggtccacttaatttttaacccaataggccgaaatcgcgtttggaccaagagtcccttatggccgggcctccggt

SEQ ID NO: 300349 - DNA, 3596 bp, Homo sapiens
atgtgcagacggcggtgcgcatgctctgttgcggtccgcttcggtttctgttgcgggacccggggtgtctcctagcgcaaccggaactagccttctgggggccggcttcctttatctctggcggccttgtagtcgtctccgagactccccacccctccttccctcttgaccccctaggtttgattgccctttccccgaaacaactatcatgagcgcgaggctgccggtgttgtctccacctcggtggccgcggctgttgctgctgtcgctgctcctgctgggggcggttcctggcccgcgccggagcggcgctttctacctgcccggcctggcgcccgtcaacttctgcgacgaagaaaaaaagagcgacgagtgcaaggccgaaatagaactatttgtgaacagacttgattcagtggaatcagttcttccttatgaatacacagcgtttgatttttgccaagcatcagaaggaaagcgcccatctgaaaatcttggtcaggtactattcggggaaagaattgaaccttcaccatataagtttacgtttaataagaaggagacctgtaagcttgtttgtacaaaaacataccatacagagaaagctgaagacaaacaaaagttagaattcttgaaaaaaagcatgttattgaattatcaacatcactggattgtggataatatgcctgtaacgtggtgttacgatgttgaagatggtcagaggttctgtaatcctggatttcctattggctgttacattacagataaaggccatgcaaaagatgcctgtgttattagttcagatttccatgaaagagatacattttacatcttcaaccatgttgacatcaaaatatactatcatgttgttgaaactgggtccatgggagcaagattagtggctgctaaacttgaaccgaaaagcttcaaacatacccatatagataaaccagactgctcagggccccccatggacataagtaacaaggcttctggggagataaaaattgcctatacttactctgttagcttcgaggaagatgataagatcagatgggcgtctagatgggactatattctggagtctatgcctcatacccacattcagtggtttaggtaagagtacagagttagcctgcttttgctttctacttttctaccctctgtccctttgaacatctcatttactctcaaatcctctctactttattcaaaagtctggccttgggttcaaatcctggctttcagccactgattgtgagtcacagcaggtcccttaatttctcagcgtctgtttctttatctagaaatacccaccttatgggattgttgtgaggattaaaggacatcatgggacagaatatttgaggacattgtctggcacataagagtgttcagaaacagaagccgctgttgttgctatgactttattattatccccttcaaacatgattcaaaacttttatctagagttgttcatgttgccataactctccttttcctattgctgtctgatctttttgacactcactaatttactgagtaaagttgttcttcagtaaatttcttgagggcacaagccagtcctttgttgtggcagtgatttgggcacagtagttatttcataatattgaccatgtaccaaaaaattctagttctaaacagactatgaaactgtattatgataagtatataatgttatttatctactggagggaaacatgaaagaacacagttcattgaatttgttggatttcagatagctttcattttgattttgatcaagactgttttaatgttactcaataaacagtttttaaaagagttttactgttcctaggattaagctacagattactcatgatgtgcttatttctacagcattatgaattccctggtcattgttctcttcttatctggaatggtagctatgattatgttacggacactgcacaaagatattgctagatataatcagatggactctacggaagatgcccaggaagaatttggctggaaacttgttcatggtgatatattccgtcctccaagaaaagggatgctgctatcagtctttctaggatccgggacacagattttaattatgacctttgtgactctatttttcgcttgcctgggatttttgtcacctgccaaccgaggagcgctgatgacgtgtgctgtggtcctgtgggtgctgctgggcacccctgcaggctatgttgctgccagattctataagtcctttggaggtgagaagtggaaaacaaatgttttattaacatcatttctttgtcctgggattgtatttgctgacttctttataatgaatctgatcctctggggagaaggatcttcagcagctattccttttgggacactggttgccatattggccctttggttctgcatatctgtgcctctgacgtttattggtgcatactttggttttaagaagaatgccattgaacacccagttcgaaccaatcagattccacgtcagattcctgaacagtcgttctacacgaagcccttgcctggtattatcatgggagggattttgccctttggctgcatctttatacaacttttcttcattctgaatagtatttggtcacaccagatgtattacatgtttggcttcctatttctggtgtttatcattttggttattacctgttctgaagcaactatacttctttgctatttccacctatgtgcagaggattatcattggcaatggcgttcattccttacgagtggctttactgcagtttatttcttaatctatgcagtacactacttcttttcaaaactgcagatcacgggaacagcaagcacaattctgtactttggttataccatgataatggttttgatcttctttctttttacaggaacaattggcttctttgcatgcttttggtttgttaccaaaatatacagtgtggtgaaggttgactgaagaagtccagtgtgtccagttaaaacagaaataaattaaactcttcatcaacaaagacctgtttttgtgactgccttgagttttatcagaattattggcctagtaatccttcagaaacaccgtaattctaaataaacctcttcccatacacctttcccccataagatgtgtcttcaacactataaagcatttgtattgtgatttgattaagtatatatttggttgttctcaatgaagagcaaatttaaatattatgtgcatttgtaaatacagtagctataaaattttccatacttctaatggcagaatagaggaggccatattaaataatactgatgaaaggcaggacactgcattgtaaataggattttctaggctcggtaggcagaaagaattatttttctttgaaggaaataactttttatcatggtaattttgaaggatgattcctatgatgtgttcaccaggggaatgtggcttttaaagaaaatcttctattggttgtaactgttcatatcttcttacttttctgtgttgacttcattattcccatggtattggccttttaaactatgtgcctctgagtctttcaatttataaatttgttatcttaataaatattataaaaatg

SEQ ID NO: 300350 - DNA, 2774 bp, Homo sapiens
atgtgcagacggcggtgcgcatgctctgttgcggtccgcttcggtttctgttgcgggacccggggtgtctcctagcgcaaccggaactagccttctgggggccggcttcctttatctctggcggccttgtagtcgtctccgagactccccacccctccttccctcttgaccccctaggtttgattgccctttccccgaaacaactatcatgagcgcgaggctgccggtgttgtctccacctcggtggccgcggctgttgctgctgtcgctgctcctgctgggggcggttcctggcccgcgccggagcggcgctttctacctgcccggcctggcgcccgtcaacttctgcgacgaagaaaaaaagagcgacgagtgcaaggccgaaatagaactatttgtgaacagacttgattcagtggaatcagttcttccttatgaatacacagcgtttgatttttgccaagcatcagaaggaaagcgcccatctgaaaatcttggtcaggtactattcggggaaagaattgaaccttcaccatataagtttacgtttaataagaaggagacctgtaagcttgtttgtacaaaaacataccatacagagaaagctgaagacaaacaaaagttagaattcttgaagtggtgttacgatgttgaagatggtcagaggttctgtaatcctggatttcctattggctgttacattacagataaaggccatgcaaaagatgcctgtgttattagttcagatttccatgaaagagatacattttacatcttcaaccatgttgacatcaaaatatactatcatgttgttgaaactgggtccatgggagcaagattagtggctgctaaacttgaaccgaaaagcttcaaacatacccatatagataaaccagactgctcagggccccccatggacataagtaacaaggcttctggggagataaaaattgcctatacttactctgttagcttcgaggaagatgataagatcagatgggcgtctagatgggactatattctggagtctatgcctcatacccacattcagtggtttagcattatgaattccctggtcattgttctcttcttatctggaatggtagctatgattatgttacggacactgcacaaagatattgctagatataatcagatggactctacggaagatgcccaggaagaatttggctggaaacttgttcatggtgatatattccgtcctccaagaaaagggatgctgctatcagtctttctaggatccgggacacagattttaattatgacctttgtgactctatttttcgcttgcctgggatttttgtcacctgccaaccgaggagcgctgatgacgtgtgctgtggtcctgtgggtgctgctgggcacccctgcaggctatgttgctgccagattctataagtcctttggaggtgagaagtggaaaacaaatgttttattaacatcatttctttgtcctgggattgtatttgctgacttctttataatgaatctgatcctctggggagaaggatcttcagcagctattccttttgggacactggttgccatattggccctttggttctgcatatctgtgcctctgacgtttattggtgcatactttggttttaagaagaatgccattgaacacccagttcgaaccaatcagattccacgtcagattcctgaacagtcgttctacacgaagcccttgcctggtattatcatgggagggattttgccctttggctgcatctttatacaacttttcttcattctgaatagtatttggtcacaccagatgtattacatgtttggcttcctatttctggtgtttatcattttggttattacctgttctgaagcaactatacttctttgctatttccacctatgtgcagaggattatcattggcaatggcgttcattccttacgagtggctttactgcagtttatttcttaatctatgcagtacactacttcttttcaaaactgcagatcacgggaacagcaagcacaattctgtactttggttataccatgataatggttttgatcttctttctttttacaggaacaattggcttctttgcatgcttttggtttgttaccaaaatatacagtgtggtgaaggttgactgaagaagtccagtgtgtccagttaaaacagaaataaattaaactcttcatcaacaaagacctgtttttgtgactgccttgagttttatcagaattattggcctagtaatccttcagaaacaccgtaattctaaataaacctcttcccatacacctttcccccataagatgtgtcttcaacactataaagcatttgtattgtgatttgattaagtatatatttggttgttctcaatgaagagcaaatttaaatattatgtgcatttgtaaatacagtagctataaaattttccatacttctaatggcagaatagaggaggccatattaaataatactgatgaaaggcaggacactgcattgtaaataggattttctaggctcggtaggcagaaagaattatttttctttgaaggaaataactttttatcatggtaattttgaaggatgattcctatgatgtgttcaccaggggaatgtggcttttaaagaaaatcttctattggttgtaactgttcatatcttcttacttttctgtgttgacttcattattcccatggtattggccttttaaactatgtgcctctgagtctttcaatttataaatttgttatcttaataaatattataaaaatg

SEQ ID NO: 300351 - DNA, 2705 bp, Homo sapiens
atgtgcagacggcggtgcgcatgctctgttgcggtccgcttcggtttctgttgcgggacccggggtgtctcctagcgcaaccggaactagccttctgggggccggcttcctttatctctggcggccttgtagtcgtctccgagactccccacccctccttccctcttgaccccctaggtttgattgccctttccccgaaacaactatcatgagcgcgaggctgccggtgttgtctccacctcggtggccgcggctgttgctgctgtcgctgctcctgctgggggcggttcctggcccgcgccggagcggcgctttctacctgcccggcctggcgcccgtcaacttctgcgacgaagaaaaaaagagcgacgagtgcaaggccgaaatagaactatttgtgaacagacttgattcagtggaatcagttcttccttatgaatacacagcgtttgatttttgccaagcatcagaaggaaagcgcccatctgaaaatcttggtcaggtactattcggggaaagaattgaaccttcaccatataagtttacgtttaataagaaggagacctgtaagcttgtttgtacaaaaacataccatacagagaaagctgaagacaaacaaaagttagaattcttgaaaaaaagcatgttattgaattatcaacatcactggattgtggataatatgcctgtaacgtggtgttacgatgttgaagatggtcagaggttctgtaatcctggatttcctattggctgttacattacagataaaggccatgcaaaagatgcctgtgttattagttcagatttccatgaaagagatacattttacatcttcaaccatgttgacatcaaaatatactatcatgttgttgaaactgggtccatgggagcaagattagtggctgctaaacttgaaccgaaaagcttcaaacatacccatatagataaaccagactgctcagggccccccatggacataagtaacaaggcttctggggagataaaaattgcctatacttactctgttagcttcgaggaagatgataagatcagatgggcgtctagatgggactatattctggagtctatgcctcatacccacattcagtggtttagcattatgaattccctggtcattgttctcttcttatctggaatggtagctatgattatgttacggacactgcacaaagatattgctagatataatcagatggactctacggaagatgcccaggaagaatttggctggaaacttgttcatggtgatatattccgtcctccaagaaaagggatgctgctatcagtctttctaggatccgggacacagattttaattatgacctttgtgactctatttttcgcttgcctgggatttttgtcacctgccaaccgaggagcgctgatgacgtgtgctgtggtcctgtgggtgctgctgggcacccctgcaggctatgttgctgccagattctataagtcctttggaggtgagaagtggaaaacaaatgttttattaacatcatttctttgtcctgggattgtatttgctgacttctttataatgaatctgatcctctggggagaaggatcttcagcagctattccttttgggacactggttgccatattggccctttggttctgcatatctgtgcctctgacgtttattggtgcatactttggttttaagaagaatgccattgaacacccagttcgaaccaatcagattccacgtcagattcctgaacagtcgttctacacgaagcccttgcctggtattatcatgggagggattttgccctttggctgcatctttatacaacttttcttcattctgaatagtatttggtcacaccagatgtattacatgtttggcttcctatttctggtgtttatcattttggttattacctgttctgaagcaactatacttctttgctatttccacctatgtgcagaggattatcattggcaatggcgttcattccttacgagtggctttactgcagtttatttcttaatctatgcagtacactacttcttttcaaaactgcagatcacgggaacagcaagcacaattctgtactttggttataccatgataatggttttgatcttctttctttttacaggaacaattggcttctttgcatgcttttggtttgttaccaaaatatacagtgtggtgaaggttgactgaagaagtccagtgtgtccagttaaaacagaaataaattaaactcttcatcaacaaagacctgtttttgtgactgccttgagttttatcagaattattggcctagtaatccttcagaaacaccgtaattctaaataaacctcttcccatacacctttcccccataagatgtgtcttcaacactataaagcatttgtattgtgatttgattaagtatatatttggttgttctcaatgaagagcaaatttaaatattatgtgcatttgtaaatacagtagctataaaattttccatacttctaatacttttcctaaaatttgggggccaaagcgaaaacaactctcaaccaaaccggggaaaccgggccccccaatttaaatttttctcacacaaacttataaattaacctttggaaattgcaccacacgggccaaggggaaccaaacctttggcccatttgttacaacttagcgatttttcttaggctcggtaggcagaaccagaatc

SEQ ID NO: 300352 - DNA, 2562 bp, Homo sapiens
agcggacagtgtgtaagtctacagttgtgtacagtagtgtcctaggccttcacattcattcaccgctcactcacccagagcagcttccagccttgcaagttctattcatggccgaaatagaactatttgtgaacagacttgattcagtggaatcagttcttccttatgaatacacagcgtttgatttttgccaagcatcagaaggaaagcgcccatctgaaaatcttggtcaggtactattcggggaaagaattgaaccttcaccatataagtttacgtttaataagaaggagacctgtaagcttgtttgtacaaaaacataccatacagagaaagctgaagacaaacaaaagttagaattcttgaaaaaaagcatgttattgaattatcaacatcactggattgtggataatatgcctgtaacgtggtgttacgatgttgaagatggtcagaggttctgtaatcctggatttcctattggctgttacattacagataaaggccatgcaaaagatgcctgtgttattagttcagatttccatgaaagagatacattttacatcttcaaccatgttgacatcaaaatatactatcatgttgttgaaactgggtccatgggagcaagattagtggctgctaaacttgaaccgaaaagcttcaaacatacccatatagataaaccagactgctcagggccccccatggacataagtaacaaggcttctggggagataaaaattgcctatacttactctgttagcttcgaggaagatgataagatcagatgggcgtctagatgggactatattctggagtctatgcctcatacccacattcagtggtttagcattatgaattccctggtcattgttctcttcttatctggaatggtagctatgattatgttacggacactgcacaaagatattgctagatataatcagatggactctacggaagatgcccaggaagaatttggctggaaacttgttcatggtgatatattccgtcctccaagaaaagggatgctgctatcagtctttctaggatccgggacacagattttaattatgacctttgtgactctatttttcgcttgcctgggatttttgtcacctgccaaccgaggagcgctgatgacgtgtgctgtggtcctgtgggtgctgctgggcacccctgcaggctatgttgctgccagattctataagtcctttggaggtgagaagtggaaaacaaatgttttattaacatcatttctttgtcctgggattgtatttgctgacttctttataatgaatctgatcctctggggagaaggatcttcagcagctattccttttgggacactggttgccatattggccctttggttctgcatatctgtgcctctgacgtttattggtgcatactttggttttaagaagaatgccattgaacacccagttcgaaccaatcagattccacgtcagattcctgaacagtcgttctacacgaagcccttgcctggtattatcatgggagggattttgccctttggctgcatctttatacaacttttcttcattctgaatagtatttggtcacaccagatgtattacatgtttggcttcctatttctggtgtttatcattttggttattacctgttctgaagcaactatacttctttgctatttccacctatgtgcagaggattatcattggcaatggcgttcattccttacgagtggctttactgcagtttatttcttaatctatgcagtacactacttcttttcaaaactgcagatcacgggaacagcaagcacaattctgtactttggttataccatgataatggttttgatcttctttctttttacaggaacaattggcttctttgcatgcttttggtttgttaccaaaatatacagtgtggtgaaggttgactgaagaagtccagtgtgtccagttaaaacagaaataaattaaactcttcatcaacaaagacctgtttttgtgactgccttgagttttatcagaattattggcctagtaatccttcagaaacaccgtaattctaaataaacctcttcccatacacctttcccccataagatgtgtcttcaacactataaagcatttgtattgtgatttgattaagtatatatttggttgttctcaatgaagagcaaatttaaatattatgtgcatttgtaaatacagtagctataaaattttccatacttctaatggcagaatagaggaggccatattaaataatactgatgaaaggcaggacactgcattgtaaataggattttctaggctcggtaggcagaaagaattatttttctttgaaggaaataactttttatcatggtaattttgaaggatgattcctatgatgtgttcaccaggggaatgtggcttttaaagaaaatcttctattggttgtaactgttcatatcttcttacttttctgtgttgacttcattattcccatggtattggccttttaaactatgtgcctctgagtctttcaatttataaatttgttatcttaataaatattataaaaatg

SEQ ID NO: 300353 - DNA, 2777 bp, Homo sapiens
atgtgcagacggcggtgcgcatgctctgttgcggtccgcttcggtttctgttgcgggacccggggtgtctcctagcgcaaccggaactagccttctgggggccggcttcctttatctctggcggccttgtagtcgtctccgagactccccacccctccttccctcttgaccccctaggtttgattgccctttccccgaaacaactatcatgagcgcgaggctgccggtgttgtctccacctcggtggccgcggctgttgctgctgtcgctgctcctgctgggggcggttcctggcccgcgccggagcggcgctttctacctgcccggcctggcgcccgtcaacttctgcgacgaagaaacagtggaatcagttcttccttatgaatacacagcgtttgatttttgccaagcatcagaaggaaagcgcccatctgaaaatcttggtcaggtactattcggggaaagaattgaaccttcaccatataagtttacgtttaataagaaggagacctgtaagcttgtttgtacaaaaacataccatacagagaaagctgaagacaaacaaaagttagaattcttgaaaaaaagcatgttattgaattatcaacatcactggattgtggataatatgcctgtaacgtggtgttacgatgttgaagatggtcagaggttctgtaatcctggatttcctattggctgttacattacagataaaggccatgcaaaagatgcctgtgttattagttcagatttccatgaaagagatacattttacatcttcaaccatgttgacatcaaaatatactatcatgttgttgaaactgggtccatgggagcaagattagtggctgctaaacttgaaccgaaaagcttcaaacatacccatatagataaaccagactgctcagggccccccatggacataagtaacaaggcttctggggagataaaaattgcctatacttactctgttagcttcgaggaagatgataagatcagatgggcgtctagatgggactatattctggagtctatgcctcatacccacattcagtggtttagcattatgaattccctggtcattgttctcttcttatctggaatggtagctatgattatgttacggacactgcacaaagatattgctagatataatcagatggactctacggaagatgcccaggaagaatttggctggaaacttgttcatggtgatatattccgtcctccaagaaaagggatgctgctatcagtctttctaggatccgggacacagattttaattatgacctttgtgactctatttttcgcttgcctgggatttttgtcacctgccaaccgaggagcgctgatgacgtgtgctgtggtcctgtgggtgctgctgggcacccctgcaggctatgttgctgccagattctataagtcctttggaggtgagaagtggaaaacaaatgttttattaacatcatttctttgtcctgggattgtatttgctgacttctttataatgaatctgatcctctggggagaaggatcttcagcagctattccttttgggacactggttgccatattggccctttggttctgcatatctgtgcctctgacgtttattggtgcatactttggttttaagaagaatgccattgaacacccagttcgaaccaatcagattccacgtcagattcctgaacagtcgttctacacgaagcccttgcctggtattatcatgggagggattttgccctttggctgcatctttatacaacttttcttcattctgaatagtatttggtcacaccagatgtattacatgtttggcttcctatttctggtgtttatcattttggttattacctgttctgaagcaactatacttctttgctatttccacctatgtgcagaggattatcattggcaatggcgttcattccttacgagtggctttactgcagtttatttcttaatctatgcagtacactacttcttttcaaaactgcagatcacgggaacagcaagcacaattctgtactttggttataccatgataatggttttgatcttctttctttttacaggaacaattggcttctttgcatgcttttggtttgttaccaaaatatacagtgtggtgaaggttgactgaagaagtccagtgtgtccagttaaaacagaaataaattaaactcttcatcaacaaagacctgtttttgtgactgccttgagttttatcagaattattggcctagtaatccttcagaaacaccgtaattctaaataaacctcttcccatacacctttcccccataagatgtgtcttcaacactataaagcatttgtattgtgatttgattaagtatatatttggttgttctcaatgaagagcaaatttaaatattatgtgcatttgtaaatacagtagctataaaattttccatacttctaatggcagaatagaggaggccatattaaataatactgatgaaaggcaggacactgcattgtaaataggattttctaggctcggtaggcagaaagaattatttttctttgaaggaaataactttttatcatggtaattttgaaggatgattcctatgatgtgttcaccaggggaatgtggcttttaaagaaaatcttctattggttgtaactgttcatatcttcttacttttctgtgttgacttcattattcccatggtattggccttttaaactatgtgcctctgagtctttcaatttataaatttgttatcttaataaatattataaaaatg

SEQ ID NO: 300354 - DNA, 2643 bp, Homo sapiens
agcggacagtgtgtaagtctacagttgtgtacagtagtgtcctaggccttcacattcattcaccgctcactcacccagagcagcttccagccttgcaagttctattcatggccgaaatagaactatttgtgaacagacttgattcagtggaatcagttcttccttatgaatacacagccactcttcacagagggtctttttagccatgcttcacatattgggatgtgttggcaagtgtactgagatgagacaactgcaggtttgatttttgccaagcatcagaaggaaagcgcccatctgaaaatcttggtcaggtactattcggggaaagaattgaaccttcaccatataagtttacgtttaataagaaggagacctgtaagcttgtttgtacaaaaacataccatacagagaaagctgaagacaaacaaaagttagaattcttgaaaaaaagcatgttattgaattatcaacatcactggattgtggataatatgcctgtaacgtggtgttacgatgttgaagatggtcagaggttctgtaatcctggatttcctattggctgttacattacagataaaggccatgcaaaagatgcctgtgttattagttcagatttccatgaaagagatacattttacatcttcaaccatgttgacatcaaaatatactatcatgttgttgaaactgggtccatgggagcaagattagtggctgctaaacttgaaccgaaaagcttcaaacatacccatatagataaaccagactgctcagggccccccatggacataagtaacaaggcttctggggagataaaaattgcctatacttactctgttagcttcgaggaagatgataagatcagatgggcgtctagatgggactatattctggagtctatgcctcatacccacattcagtggtttagcattatgaattccctggtcattgttctcttcttatctggaatggtagctatgattatgttacggacactgcacaaagatattgctagatataatcagatggactctacggaagatgcccaggaagaatttggctggaaacttgttcatggtgatatattccgtcctccaagaaaagggatgctgctatcagtctttctaggatccgggacacagattttaattatgacctttgtgactctatttttcgcttgcctgggatttttgtcacctgccaaccgaggagcgctgatgacgtgtgctgtggtcctgtgggtgctgctgggcacccctgcaggctatgttgctgccagattctataagtcctttggaggtgagaagtggaaaacaaatgttttattaacatcatttctttgtcctgggattgtatttgctgacttctttataatgaatctgatcctctggggagaaggatcttcagcagctattccttttgggacactggttgccatattggccctttggttctgcatatctgtgcctctgacgtttattggtgcatactttggttttaagaagaatgccattgaacacccagttcgaaccaatcagattccacgtcagattcctgaacagtcgttctacacgaagcccttgcctggtattatcatgggagggattttgccctttggctgcatctttatacaacttttcttcattctgaatagtatttggtcacaccagatgtattacatgtttggcttcctatttctggtgtttatcattttggttattacctgttctgaagcaactatacttctttgctatttccacctatgtgcagaggattatcattggcaatggcgttcattccttacgagtggctttactgcagtttatttcttaatctatgcagtacactacttcttttcaaaactgcagatcacgggaacagcaagcacaattctgtactttggttataccatgataatggttttgatcttctttctttttacaggaacaattggcttctttgcatgcttttggtttgttaccaaaatatacagtgtggtgaaggttgactgaagaagtccagtgtgtccagttaaaacagaaataaattaaactcttcatcaacaaagacctgtttttgtgactgccttgagttttatcagaattattggcctagtaatccttcagaaacaccgtaattctaaataaacctcttcccatacacctttcccccataagatgtgtcttcaacactataaagcatttgtattgtgatttgattaagtatatatttggttgttctcaatgaagagcaaatttaaatattatgtgcatttgtaaatacagtagctataaaattttccatacttctaatggcagaatagaggaggccatattaaataatactgatgaaaggcaggacactgcattgtaaataggattttctaggctcggtaggcagaaagaattatttttctttgaaggaaataactttttatcatggtaattttgaaggatgattcctatgatgtgttcaccaggggaatgtggcttttaaagaaaatcttctattggttgtaactgttcatatcttcttacttttctgtgttgacttcattattcccatggtattggccttttaaactatgtgcctctgagtctttcaatttataaatttgttatcttaataaatattataaaaatg

SEQ ID NO: 300355 - DNA, 2020 bp, Homo sapiens
cctgtcagtcgctcgtggacaattagggaagttcagcaagtcaggacaaaatctgtttatcccccaaattactacaaagcatagcgggctctatgttggctctgttcgtagctccggtcagtcgctctgggcctgtaaccagactgctcagggccccccatggacataagtaacaaggcttctggggagataaaaattgcctatacttactctgttagcttcgaggaagatgataagatcagatgggcgtctagatgggactatattctggagtctatgcctcatacccacattcagtggtttagcattatgaattccctggtcattgttctcttcttatctggaatggtagctatgattatgttacggacactgcacaaagatattgctagatataatcagatggactctacggaagatgcccaggaagaatttggctggaaacttgttcatggtgatatattccgtcctccaagaaaagggatgctgctatcagtctttctaggatccgggacacagattttaattatgacctttgtgactctatttttcgcttgcctgggatttttgtcacctgccaaccgaggagcgctgatgacgtgtgctgtggtcctgtgggtgctgctgggcacccctgcaggctatgttgctgccagattctataagtcctttggaggtgagaagtggaaaacaaatgttttattaacatcatttctttgtcctgggattgtatttgctgacttctttataatgaatctgatcctctggggagaaggatcttcagcagctattccttttgggacactggttgccatattggccctttggttctgcatatctgtgcctctgacgtttattggtgcatactttggttttaagaagaatgccattgaacacccagttcgaaccaatcagattccacgtcagattcctgaacagtcgttctacacgaagcccttgcctggtattatcatgggagggattttgccctttggctgcatctttatacaacttttcttcattctgaatagtatttggtcacaccagatgtattacatgtttggcttcctatttctggtgtttatcattttggttattacctgttctgaagcaactatacttctttgctatttccacctatgtgcagaggattatcattggcaatggcgttcattccttacgagtggctttactgcagtttatttcttaatctatgcagtacactacttcttttcaaaactgcagatcacgggaacagcaagcacaattctgtactttggttataccatgataatggttttgatcttctttctttttacaggaacaattggcttctttgcatgcttttggtttgttaccaaaatatacagtgtggtgaaggttgactgaagaagtccagtgtgtccagttaaaacagaaataaattaaactcttcatcaacaaagacctgtttttgtgactgccttgagttttatcagaattattggcctagtaatccttcagaaacaccgtaattctaaataaacctcttcccatacacctttcccccataagatgtgtcttcaacactataaagcatttgtattgtgatttgattaagtatatatttggttgttctcaatgaagagcaaatttaaatattatgtgcatttgtaaatacagtagctataaaattttccatacttctaatggcagaatagaggaggccatattaaataatactgatgaaaggcaggacactgcattgtaaataggattttctaggctcggtaggcagaaagaattatttttctttgaaggaaataactttttatcatggtaattttgaaggatgattcctatgatgtgttcaccaggggaatgtggcttttaaagaaaatcttctattggttgtaactgttcatatcttcttacttttctgtgttgacttcattattcccatggtattggccttttaaactatgtgcctctgagtctttcaatttataaatttgttatcttaataaatattataaaaatg

SEQ ID NO: 300356 - DNA, 2429 bp, Homo sapiens
gtttccgattgggagattgtcttagaaaattgaagggagtatttttattagcgaagtttcttaaaatgcaagtttatcattaaaatgcaagaatcttaggcagtgttccaactctattttttaaaacttttggcaatccaatatagttgtgatgtttaatatccccgtataatgtttcattttgcaaacctggtgcagtaaatagtatatatttctagatattaagagctcagtgtgcctggaatgactggtctagagtaatagctgcccccggcataaagaaaagaataattattccattccattccattattttcttaaaaaaaaaaaaaaacctacatataggtctaaatgttgacatctaaacatctagttataatttaaagcaatacttttagtaggtattactaggaattcttttttttttttttttgggttgcataatcttactctgatttcccctagactttagtaaatctgaaactctccaaatctcaggactaaccaaagttagataatttagaaattgcagttgttgactcaatggaaggacaagctttgaatgggatttttttttgttcttaatgtgctgtcagcagatgtttacttaaagagattttttaatctcctctaggaagatgataagatcagatgggcgtctagatgggactatattctggagtctatgcctcatacccacattcagtggtttagcattatgaattccctggtcattgttctcttcttatctggaatggtagctatgattatgttacggacactgcacaaagatattgctagatataatcagatggactctacggaagatgcccaggaagaatttggctggaaacttgttcatggtgatatattccgtcctccaagaaaagggatgctgctatcagtctttctaggatccgggacacagattttaattatgacctttgtgactctatttttcgcttgcctgggatttttgtcacctgccaaccgaggagcgctgatgacgtgtgctgtggtcctgtgggtgctgctgggcacccctgcaggctatgttgctgccagattctataagtcctttggaggtgagaagtggaaaacaaatgttttattaacatcatttctttgtcctgggattgtatttgctgacttctttataatgaatctgatcctctggggagaaggatcttcagcagctattccttttgggacactggttgccatattggccctttggttctgcatatctgtgcctctgacgtttattggtgcatactttggttttaagaagaatgccattgaacacccagttcgaaccaatcagattccacgtcagattcctgaacagtcgttctacacgaagcccttgcctggtattatcatgggagggattttgccctttggctgcatctttatacaacttttcttcattctgaatagtatttggtcacaccagatgtattacatgtttggcttcctatttctggtgtttatcattttggttattacctgttctgaagcaactatacttctttgctatttccacctatgtgcagaggattatcattggcaatggcgttcattccttacgagtggctttactgcagtttatttcttaatctatgcagtacactacttcttttcaaaactgcagatcacgggaacagcaagcacaattctgtactttggttataccatgataatggttttgatcttctttctttttacaggaacaattggcttctttgcatgcttttggtttgttaccaaaatatacagtgtggtgaaggttgactgaagaagtccagtgtgtccagttaaaacagaaataaattaaactcttcatcaacaaagacctgtttttgtgactgccttgagttttatcagaattattggcctagtaatccttcagaaacaccgtaattctaaataaacctcttcccatacacctttcccccataagatgtgtcttcaacactataaagcatttgtattgtgatttgattaagtatatatttggttgttctcaatgaagagcaaatttaaatattatgtgcatttgtaaatacagtagctataaaattttccatacttctaatggcagaatagaggaggccatattaaataatactgatgaaaggcaggacactgcattgtaaataggattttctaggctcggtaggcagaaagaattatttttctttgaaggaaataactttttatcatggtaattttgaaggatgattcctatgatgtgttcaccaggggaatgtggcttttaaagaaaatcttctattggttgtaactgttcatatcttcttacttttctgtgttgacttcattattcccatggtattggccttttaaactatgtgcctctgagtctttcaatttataaatttgttatcttaataaatattataaaaatg

SEQ ID NO: 300357 - DNA, 3194 bp, Homo sapiens
gtttccgattgggagattgtcttagaaaattgaagggagtatttttattagcgaagtttcttaaaatgcaagtttatcattaaaatgcaagaatcttaggcagtgttccaactctattttttaaaacttttggcaatccaatatagttgtgatgtttaatatccccgtataatgtttcattttgcaaacctggtgcagtaaatagtatatatttctagatattaagagctcagtgtgcctggaatgactggtctagagtaatagctgcccccggcataaagaaaagaataattattccattccattccattattttcttaaaaaaaaaaaaaaacctacatataggtctaaatgttgacatctaaacatctagttataatttaaagcaatacttttagtaggtattactaggaattcttttttttttttttttgggttgcataatcttactctgatttcccctagactttagtaaatctgaaactctccaaatctcaggactaaccaaagttagataatttagaaattgcagttgttgactcaatggaaggacaagctttgaatgggatttttttttgttcttaatgtgctgtcagcagatgtttacttaaagagattttttaatctcctctaggaagatgataagatcagatgggcgtctagatgggactatattctggagtctatgcctcatacccacattcagtggtttaggtaagagtacagagttagcctgcttttgctttctacttttctaccctctgtccctttgaacatctcatttactctcaaatcctctctactttattcaaaagtctggccttgggttcaaatcctggctttcagccactgattgtgagtcacagcaggtcccttaatttctcagcgtctgtttctttatctagaaatacccaccttatgggattgttgtgaggattaaaggacatcatgggacagaatatttgaggacattgtctggcacataagagtgttcagaaacagaagccgctgttgttgctatgactttattattatccccttcaaacatgattcaaaacttttatctagagttgttcatgttgccataactctccttttcctattgctgtctgatctttttgacactcactaatttactgagtaaagttgttcttcagtaaatttcttgagggcacaagccagtcctttgttgtggcagtgatttgggcacagtagttatttcataatattgaccatgtaccaaaaaattctagttctaaacagactatgaaactgtattatgataagtatataatgttatttatctactggagggaaacatgaaagaacacagttcattgaatttgttggatttcagatagctttcattttgattttgatcaagactgttttaatgttactcaataaacagtttttaaaagagttttactgttcctaggattaagctacagattactcatgatgtgcttatttctacagcattatgaattccctggtcattgttctcttcttatctggaatggtagctatgattatgttacggacactgcacaaagatattgctagatataatcagatggactctacggaagatgcccaggaagaatttggctggaaacttgttcatggtgatatattccgtcctccaagaaaagggatgctgctatcagtctttctaggatccgggacacagattttaattatgacctttgtgactctatttttcgcttgcctgggatttttgtcacctgccaaccgaggagcgctgatgacgtgtgctgtggtcctgtgggtgctgctgggcacccctgcaggctatgttgctgccagattctataagtcctttggaggtgagaagtggaaaacaaatgttttattaacatcatttctttgtcctgggattgtatttgctgacttctttataatgaatctgatcctctggggagaaggatcttcagcagctattccttttgggacactggttgccatattggccctttggttctgcatatctgtgcctctgacgtttattggtgcatactttggttttaagaagaatgccattgaacacccagttcgaaccaatcagattccacgtcagattcctgaacagtcgttctacacgaagcccttgcctggtattatcatgggagggattttgccctttggctgcatctttatacaacttttcttcattctgaatagtatttggtcacaccagatgtattacatgtttggcttcctatttctggtgtttatcattttggttattacctgttctgaagcaactatacttctttgctatttccacctatgtgcagaggattatcattggcaatggcgttcattccttacgagtggctttactgcagtttatttcttaatctatgcagtacactacttcttttcaaaactgcagatcacgggaacagcaagcacaattctgtactttggttataccatgataatggttttgatcttctttctttttacaggaacaattggcttctttgcatgcttttggtttgttaccaaaatatacagtgtggtgaaggttgactgaagaagtccagtgtgtccagttaaaacagaaataaattaaactcttcatcaacaaagacctgtttttgtgactgccttgagttttatcagaattattggcctagtaatccttcagaaacaccgtaattctaaataaacctcttcccatacacctttcccccataagatgtgtcttcaacactataaagcatttgtattgtgatttgattaagtatatatttggttgttctcaatgaagagcaaatttaaatattatgtgcatttgtaaatacagtagctataaaattttccatacttctaatggcagaatagaggaggccatattaaataatactgatgaaaggcaggacactgcattgtaaataggattttctaggctcggtaggcagaaagaattatttttctttgaaggaaataactttttatcatggtaattttgaaggatgattcctatgatgtgttcaccaggggaatgtggcttttaaagaaaatcttctattggttgtaactgttcatatcttcttacttttctgtgttgacttcattattcccatggtattggccttttaaactatgtgcctctgagtctttcaatttataaatttgttatcttaataaatattataaaaatg

SEQ ID NO: 300358 - DNA, 2816 bp, Homo sapiens
atgtgcagacggcggtgcgcatgctctgttgcggtccgcttcggtttctgttgcgggacccggggtgtctcctagcgcaaccggaactagccttctgggggccggcttcctttatctctggcggccttgtagtcgtctccgagactccccacccctccttccctcttgaccccctaggtttgattgccctttccccgaaacaactatcatgagcgcgaggctgccggtgttgtctccacctcggtggccgcggctgttgctgctgtcgctgctcctgctgggggcggttcctggcccgcgccggagcggcgctttctacctgcccggcctggcgcccgtcaacttctgcgacgaagaaaaaaagagcgacgagtgcaaggccgaaatagaactatttgtgaacagacttgattcagtggaatcagttcttccttatgaatacacagcgtttgatttttgccaagcatcagaaggaaagcgcccatctgaaaatcttggtcaggtactattcggggaaagaattgaaccttcaccatataagtttacgtttaataagaaggagacctgtaagcttgtttgtacaaaaacataccatacagagaaagctgaagacaaacaaaagttagaattcttgaaaaaaagcatgttattgaattatcaacatcactggattgtggataatatgcctgtaacgtggtgttacgatgttgaagatggtcagaggttctgtaatcctggatttcctattggctgttacattacagataaaggccatgcaaaagatgcctgtgttattagttcagatttccatgaaagagatacattttacatcttcaaccatgttgacatcaaaatatactatcatgttgttgaaactgggtccatgggagcaagattagtggctgctaaacttgaaccgaaaagcttcaaacatacccatatagataaaccagactgctcagggccccccatggacataagtaacaaggcttctggggagataaaaattgcctatacttactctgttagcttcgaggaagatgataagatcagatgggcgtctagatgggactatattctggagtctatgcctcatacccacattcagtggtttagcattatgaattccctggtcattgttctcttcttatctggaatggtagctatgattatgttacggacactgcacaaagatattgctagatataatcagatggactctacggaagatgcccaggaagaatttggctggaaacttgttcatggtgatatattccgtcctccaagaaaagggatgctgctatcagtctttctaggatccgggacacagattttaattatgacctttgtgactctatttttcgcttgcctgggatttttgtcacctgccaaccgaggagcgctgatgacgtgtgctgtggtcctgtgggtgctgctgggcacccctgcaggctatgttgctgccagattctataagtcctttggaggtgagaagtggaaaacaaatgttttattaacatcatttctttgtcctgggattgtatttgctgacttctttataatgaatctgatcctctggggagaaggatcttcagcagctattccttttgggacactggttgccatattggccctttggttctgcatatctgtgcctctgacgtttattggtgcatactttggttttaagaagaatgccattgaacacccagttcgaaccaatcagattccacgtcagattcctgaacagtcgttctacacgaagcccttgcctgggattttgccctttggctgcatctttatacaacttttcttcattctgaatagtatttggtcacaccagatgtattacatgtttggcttcctatttctggtgtttatcattttggttattacctgttctgaagcaactatacttctttgctatttccacctatgtgcagaggattatcattggcaatggcgttcattccttacgagtggctttactgcagtttatttcttaatctatgcagtacactacttcttttcaaaactgcagatcacgggaacagcaagcacaattctgtactttggttataccatgataatggttttgatcttctttctttttacaggaacaattggcttctttgcatgcttttggtttgttaccaaaatatacagtgtggtgaaggttgactgaagaagtccagtgtgtccagttaaaacagaaataaattaaactcttcatcaacaaagacctgtttttgtgactgccttgagttttatcagaattattggcctagtaatccttcagaaacaccgtaattctaaataaacctcttcccatacacctttcccccataagatgtgtcttcaacactataaagcatttgtattgtgatttgattaagtatatatttggttgttctcaatgaagagcaaatttaaatattatgtgcatttgtaaatacagtagctataaaattttccatacttctaatggcagaatagaggaggccatattaaataatactgatgaaaggcaggacactgcattgtaaataggattttctaggctcggtaggcagaaagaattatttttctttgaaggaaataactttttatcatggtaattttgaaggatgattcctatgatgtgttcaccaggggaatgtggcttttaaagaaaatcttctattggttgtaactgttcatatcttcttacttttctgtgttgacttcattattcccatggtattggccttttaaactatgtgcctctgagtctttcaatttataaatttgttatcttaataaatattataaaaatg

SEQ ID NO: 300359 - DNA, 2659 bp, Homo sapiens
atgtgcagacggcggtgcgcatgctctgttgcggtccgcttcggtttctgttgcgggacccggggtgtctcctagcgcaaccggaactagccttctgggggccggcttcctttatctctggcggccttgtagtcgtctccgagactccccacccctccttccctcttgaccccctaggtttgattgccctttccccgaaacaactatcatgagcgcgaggctgccggtgttgtctccacctcggtggccgcggctgttgctgctgtcgctgctcctgctgggggcggttcctggcccgcgccggagcggcgctttctacctgcccggcctggcgcccgtcaacttctgcgacgaagaaaaaaagagcgacgagtgcaaggccgaaatagaactatttgtgaacagacttgattcagtggaatcagttcttccttatgaatacacagcgtttgatttttgccaagcatcagaaggaaagcgcccatctgaaaatcttggtcaggtactattcggggaaagaattgaaccttcaccatataagtttacgtttaataagaaggagacctgtaagcttgtttgtacaaaaacataccatacagagaaagctgaagacaaacaaaagttagaattcttgaaaaaaagcatgttattgaattatcaacatcactggattgtggataatatgcctgtaacgtggtgttacgatgttgaagatggtcagaggttctgtaatcctggatttcctattggctgttacattacagataaaggccatgcaaaagatgcctgtgttattagttcagatttccatgaaagagatacattttacatcttcaaccatgttgacatcaaaatatactatcatgttgttgaaactgggtccatgggagcaagattagtggctgctaaacttgaaccgaaaagcttcaaacatacccatatagataaaccagactgctcagggccccccatggacataagtaacaaggcttctggggagataaaaattgcctatacttactctgttagcttcgaggaagatgataagatcagatgggcgtctagatgggactatattctggagtctatgcctcatacccacattcagtggtttagcattatgaattccctggtcattgttctcttcttatctggaatggtagctatgattatgttacggacactgcacaaagatattgctagatataatcagatggactctacggaagatgcccaggaagaatttggctggaaacttgttcatggtgatatattccgtcctccaagaaaagggatgctgctatcagtctttctaggatccgggacacagattttaattatgacctttgtgactctatttttcgcttgcctgggatttttgtcacctgccaaccgaggagcgctgatgacgtgtgctgtggtcctgtgggtgctgctgggcacccctgcaggctatgttgctgccagattctataagtcctttggaggtgagaagtggaaaacaaatgttttattaacatcatttctttgtcctgggattgtatttgctgacttctttataatgaatctgatcctctggggagaaggatcttcagcagctattccttttgggacactggttgccatattggccctttggttctgcatatctgtgcctctgacgtttattggtgcatactttggttttaagaagaatgccattgaacacccagttcgaaccaatcagattccacgtcagattcctgaacagtcgttctacacgaagcccttgcctggtattatcatgggagggattttgccctttggctgcatctttatacaacttttcttcattctgaatagtatttggtcacaccagatgtattacatgtttggcttcctatttctggtgtttatcattttggttattacctgttctgaagcaactatacttctttgctatttccacctatgtgcagaggaacaattggcttctttgcatgcttttggtttgttaccaaaatatacagtgtggtgaaggttgactgaagaagtccagtgtgtccagttaaaacagaaataaattaaactcttcatcaacaaagacctgtttttgtgactgccttgagttttatcagaattattggcctagtaatccttcagaaacaccgtaattctaaataaacctcttcccatacacctttcccccataagatgtgtcttcaacactataaagcatttgtattgtgatttgattaagtatatatttggttgttctcaatgaagagcaaatttaaatattatgtgcatttgtaaatacagtagctataaaattttccatacttctaatggcagaatagaggaggccatattaaataatactgatgaaaggcaggacactgcattgtaaataggattttctaggctcggtaggcagaaagaattatttttctttgaaggaaataactttttatcatggtaattttgaaggatgattcctatgatgtgttcaccaggggaatgtggcttttaaagaaaatcttctattggttgtaactgttcatatcttcttacttttctgtgttgacttcattattcccatggtattggccttttaaactatgtgcctctgagtctttcaatttataaatttgttatcttaataaatattataaaaatg

SEQ ID NO: 300360 - DNA, 1534 bp, Homo sapiens
aaaacatgtaaggaactgactttcataggctgctgggaggagtttaactcaggcaaacccaatctgaagagcaattgggtagtttctagtcaagttttacattcagacatcctgtgatgcagcaattccactttctttgtatatatatattagaaacatagaagttgtcatattaattacatactactgttgcattttgttatctctggttttacccaaaagcctgttgtgtctttcaggattgtatttgctgacttctttataatgaatctgatcctctggggagaaggatcttcagcagctattccttttgggacactggttgccatattggccctttggttctgcatatctgtgcctctgacgtttattggtgcatactttggttttaagaagaatgccattgaacacccagttcgaaccaatcagattccacgtcagattcctgaacagtcgttctacacgaagcccttgcctggtattatcatgggagggattttgccctttggctgcatctttatacaacttttcttcattctgaatagtatttggtcacaccagatgtattacatgtttggcttcctatttctggtgtttatcattttggttattacctgttctgaagcaactatacttctttgctatttccacctatgtgcagaggattatcattggcaatggcgttcattccttacgagtggctttactgcagtttatttcttaatctatgcagtacactacttcttttcaaaactgcagatcacgggaacagcaagcacaattctgtactttggttataccatgataatggttttgatcttctttctttttacaggaacaattggcttctttgcatgcttttggtttgttaccaaaatatacagtgtggtgaaggttgactgaagaagtccagtgtgtccagttaaaacagaaataaattaaactcttcatcaacaaagacctgtttttgtgactgccttgagttttatcagaattattggcctagtaatccttcagaaacaccgtaattctaaataaacctcttcccatacacctttcccccataagatgtgtcttcaacactataaagcatttgtattgtgatttgattaagtatatatttggttgttctcaatgaagagcaaatttaaatattatgtgcatttgtaaatacagtagctataaaattttccatacttctaatggcagaatagaggaggccatattaaataatactgatgaaaggcaggacactgcattgtaaataggattttctaggctcggtaggcagaaagaattatttttctttgaaggaaataactttttatcatggtaattttgaaggatgattcctatgatgtgttcaccaggggaatgtggcttttaaagaaaatcttctattggttgtaactgttcatatcttcttacttttctgtgttgacttcattattcccatggtattggccttttaaactatgtgcctctgagtctttcaatttataaatttgttatcttaataaatattataaaaatg

SEQ ID NO: 300361 - DNA, 2981 bp, Homo sapiens
  misc_feature (2297)..(2297): n is a, c, g, or t
atgtgcagacggcggtgcgcatgctctgttgcggtccgcttcggtttctgttgcgggacccggggtgtctcctagcgcaaccggaactagccttctgggggccggcttcctttatctctggcggccttgtagtcgtctccgagactccccacccctccttccctcttgaccccctaggtttgattgccctttccccgaaacaactatcatgagcgcgaggctgccggtgttgtctccacctcggtggccgcggctgttgctgctgtcgctgctcctgctgggggcggttcctggcccgcgccggagcggcgctttctacctgcccggcctggcgcccgtcaacttctgcgacgaagaaaaaaagagcgacgagtgcaaggccgaaatagaactatttgtgaacagacttgattcagtggaatcagttcttccttatgaatacacagcgtttgatttttgccaagcatcagaaggaaagcgcccatctgaaaatcttggtcaggtactattcggggaaagaattgaaccttcaccatataagtttacgtttaataagaaggagacctgtaagcttgtttgtacaaaaacataccatacagagaaagctgaagacaaacaaaagttagaattcttgaaaaaaagcatgttattgaattatcaacatcactggattgtggataatatgcctgtaacgtggtgttacgatgttgaagatggtcagaggttctgtaatcctggatttcctattggctgttacattacagataaaggccatgcaaaagatgcctgtgttattagttcagatttccatgaaagagatacattttacatcttcaaccatgttgacatcaaaatatactatcatgttgttgaaactgggtccatgggagcaagattagtggctgctaaacttgaaccgaaaagcttcaaacatacccatatagataaaccagactgctcagggccccccatggacataagtaacaaggcttctggggagataaaaattgcctatacttactctgttagcttcgaggaagatgataagatcagatgggcgtctagatgggactatattctggagtctatgcctcatacccacattcagtggtttagcattatgaattccctggtcattgttctcttcttatctggaatggtagctatgattatgttacggacactgcacaaagatattgctagatataatcagatggactctacggaagatgcccaggaagaatttggctggaaacttgttcatggtgatatattccgtcctccaagaaaagggatgctgctatcagtctttctaggatccgggacacagattttaattatgacctttgtgactctatttttcgcttgcctgggatttttgtcacctgccaaccgaggagcgctgatgacgtgtgctgtggtcctgtgggtgctgctgggcacccctgcaggctatgttgctgccagattctataagtcctttggaggtgagaagtggaaaacaaatgttttattaacatcatttctttgtcctgggattgtatttgctgacttctttataatgaatctgatcctctggggagaaggatcttcagcagctattccttttgggacactggttgccatattggccctttggttctgcatatctgtgcctctgacgtttattggtgcatactttggttttaagaagaatgccattgaacacccagttcgaaccaatcagattccacgtcagattcctgaacagtcgttctacacgaagcccttgcctggtattatcatgggagggattttgccctttggctgcatctttatacaacttttcttcattctgaatagtatttggtcacaccagatgtattacatgtttggcttcctatttctggtgtttatcattttggttattacctgttctgaagcaactatacttctttgctatttccacctatgtgcagaggattatcattggcaatggcgttcattccttacgagtggctttactgcagtttatttcttaatctatgcagtacactacttcttttcaaaactgcagatcacgggaacagcaagcacaattctgtactttggttataccatgataatggttttgatcttctttctttttacaggaacaattggcttctttgcatgcttttggtttgttaccaaaatatacagtgtggtgaaggttgactgaagaagtccagtgtgtccagttaaaacagaaataaattaaactcttcatcaacaaaaaaaaaaaaaaaaaaaaaaaaaaaaaaaagaaaaaagaaaanaaaaaaaaaaaaaaaaaaaaaaaaaaaaaaaaaaagaaaaaaaaaataaaaaaattacgaaaaatcaaataaggatataaaatgaggtggagcagtaggtctaaataacacaaacacagcggaaaggcaaataataacaagcaactgcttattacaaagaggagatgggtctctatgttggacccctccataaaagcgctcaagagtacttacgagtaatccacttacacccagtttaacgacaagcaaatctacggctcaagcattttatacggtagccacaggcttcttagggggcttcaaggtcattatggctcaacctatctacataatctgggttcatcagccaaacaataattccgtttgagcgttcacacaaccactcgcgcctcgaaagccgggagccgaaatacgggccactcggctaaaatcttagaaacaaaatgtcgccggcggcccgcacaatggaaaacggaaccaccaaacaaacgcaaagagcgcgccggcaccagacccaggagccacacgcacccactggtgaaggcccccaggaggatatcacgcagaggacaaacaagcacaaccacaccaaagacgcacacgagaacagcaacgcgaacagacgacctgaatagcaacgtcacgaagcgcacaatccaactcagagacaaaaagaacacaaaa

SEQ ID NO: 300362 - DNA, 1254 bp, Homo sapiens
tccatttaggtccattgtccatttaggtccattgtccatttaggtccatttaggtcctttggttctgcatatctgtgcctctgacgtttattggtgcatactttggttttaagaagaatgccattgaacacccagttcgaaccaatcagattccacgtcagattcctgaacagtcgttctacacgaagcccttgcctggtattatcatgggagggattttgccctttggctgcatctttatacaacttttcttcattctgaatagtatttggtcacaccagatgtattacatgtttggcttcctatttctggtgtttatcattttggttattacctgttctgaagcaactatacttctttgctatttccacctatgtgcagaggattatcattggcaatggcgttcattccttacgagtggctttactgcagtttatttcttaatctatgcagtacactacttcttttcaaaactgcagatcacgggaacagcaagcacaattctgtactttggttataccatgataatggttttgatcttctttctttttacaggaacaattggcttctttgcatgcttttggtttgttaccaaaatatacagtgtggtgaaggttgactgaagaagtccagtgtgtccagttaaaacagaaataaattaaactcttcatcaacaaagacctgtttttgtgactgccttgagttttatcagaattattggcctagtaatccttcagaaacaccgtaattctaaataaacctcttcccatacacctttcccccataagatgtgtcttcaacactataaagcatttgtattgtgatttgattaagtatatatttggttgttctcaatgaagagcaaatttaaatattatgtgcatttgtaaatacagtagctataaaattttccatacttctaatggcagaatagaggaggccatattaaataatactgatgaaaggcaggacactgcattgtaaataggattttctaggctcggtaggcagaaagaattatttttctttgaaggaaataactttttatcatggtaattttgaaggatgattcctatgatgtgttcaccaggggaatgtggcttttaaagaaaatcttctattggttgtaactgttcatatcttcttacttttctgtgttgacttcattattcccatggtattggccttttaaactatgtgcctctgagtctttcaatttataaatttgttatcttaataaatattataaaaatg

SEQ ID NO: 300363 - DNA, 1237 bp, Homo sapiens
cgtggcagacgcacgtgttttagagagcacaggattgggggtaaggtcgtagatcaacaggatcccaaggcagaagaatttttcttagtacagaacaaaatgaaaagtctcccatgtctacctccctctacacagacacagcaaccatccgatttctcaatcttttccccacctttcccccctttctattccacaaaaccgccattgtcatcatggcccgttctcaatgaagagcaaatttaaatattatgtgcatttgtaaatacagtagctataaaattttccatacttctaatggcagaatagaggaggccatattaaataatactgatgaaaggcaggacactgcattgtaaataggattttctaggctcggtaggcagaaagaattatttttctttgaaggaaataactttttatcatggtaattttgaaggatgattcctatgatgtgttcaccaggggaatgtggcttttaaagaaaatcttctattggttgtaactgttcatatcttcttacttttctgtgttgacttcattattcccatggtattggccttttaaactatgtgcctctgagtctttcaatttataaatttgttatcttaataaatattataaaaatgtcttcattgcatcattacctattatatattcaaggaggttctgtaaatacagatctatttaccaaggtgttttgaaatgatttatactattttatcagattttactggattttgttaatgtaacactttctgagttttgatctgaatggaatttcactgtgtaaggcattgtctaaaatgttcactgtgaggcagtagaggaggttgaagtcatgcatatctagacagatgaattatctgcaagtacttaaggtggagccttactacattgtcattaaggagtttctatttttgacttgtttttcaaaatacagtgttttaagtcaggttttattacctggacattagcaatcactagcaagtcttcatctttatgatttcattgttttaatttagatttcacaaacagttttacttctaagagttaagaaatgcactgtctttcacattcatctgactaattgaaatccatttatgtagaatataggaatggggggtgattctgaagtatcggtctgcttgtatctgtgagcatattcatttgtattttagggtctctctgcttgctgcttaggagagcaaatcagatactgtcattaaacttacaacta

SEQ ID NO: 300364 - DNA, 418 bp, Homo sapiens
agcttccaggcaggaaaagtgtttaaatgtataagcattagtgtgctcataatattttaaattttattttgtttcattttaaatgaaaggctagaaaatactagattagtgttcttttgaattggtacttattagattttatgtaaaaaaactgtaagaagcatataccttccccaattaatttttggcttaaaaagagtttaagtataaaattgaaacatgttaatgtgaaaggcttaaaattccattcaaacttaaattttcttacttgttgtagcccattttaaagttttaagttttgactcttatgtagtcagttttctacctttaacttttaagttctgttctgcagtcagatttccatgaaagagatacattttacatcttcaaccatgttgacatcaaaatatactatcat

SEQ ID NO: 300365 - DNA, 542 bp, Homo sapiens
aataactgtacttagaaaatatccccatttaatcattatttgaacctgttttaatgtattcatctcataccttaaaaaattctagtagcgttttccattttgttgtaaaatattcttaaataggaaaggacagttgacatccttcagtcttttctatgtagtaaggaaaataatgtgtattgtagaaagcttaggtaatcttatagtagaaaaaagttctaccaatttttgtaagaaacttgatttgaggtggtcgtatatttttcagacgtgctcatagatctgtagtatattcccggtgggtaatagtttatagttttgcgacttttttaaggaaccagtcattgtaagtctgtatttttgtgtaaagtatgaaacttcctttgaaaaggggtttattttgatcttctttctttttacaggaacaattggcttctttgcatgcttttggtttgttaccaaaatatacagtgtggtgaaggttgactgaagaagtccagtgtgtccagttaaaacagaaataaattaaactcttcatcaac

SEQ ID NO: 300366 - DNA, 1145 bp, Homo sapiens
cactttattcaggttattaggtttccaggtgtagacaaatgggtgtgttaaaatggggtgaattggactgttattagagaaaccagggtacatttcaagctgtggcatgacttggacccattaccccctggtgccaccctgggcgtttgcctggaatgggagaattccaggcaaccctggccaacccaggcttcctgcaccacccaagggtccctgcaagcttgctttgttaaagctttttttggagacctggaggcaactccccaggctggaaacggtcgatggtgagccaagccttgaagatttggaagaaagtacaacttgtctgggaacaagggatgggtttcaaccctgtcttgaagatcccgaaggtataatgttaacctttccctgttcgttcaaggtttacaattcgcgcaatagtgttcctgggaagaaagcctgggaccacttgaaccattgttcaaacatccaatttctgtctaattttttggtcaactgaagggtgcttggaacgtcaaattggcttccctcgcgttaataccctccgtgacctttcggttgcaaacctttttccctccccccatccctggagaaatgaacaagcaattcgcaagggtaaccaatcaaaaagcggaaaggcgagcaatggacccttggtgacggagtttaatagctcactgcaaatctaacttcatcatggtgaactaatttagagcatcctccagagctgaagcagaacattccagaacccgttgtggaaaaaccctttcaagaagctgttttaagaggctcgggcagcgtcttgaaaatgggcaccgctgggaggaggtggatgacttctttacaaaggaaaatggtagcagcttcagtgagaaactgcccttacaaacagtcccttctctgctgtcaatccaatactgctcccaaatcctgttttcagtgttcatttccctcaaggcaggcgctgggctcccacgacccctcaggacagatctggccgtcagccgcgggccgctgggaactccactcggggaactcctttccaagctgacctcagttttctcacaagaacccagttagctgatgttttattgtaattgtcttaatttgctaagaacaagtaataagtaaatttttaaaaa

SEQ ID NO: 300367 - DNA, 2244 bp, Homo sapiens
cgcctcgcgcatgcgccgcgctcgctcgcgggagggcatggcgggggccgtgccgggcgccatcatggacgaggactactacgggagcgcggccgagtggggcgacgaggctgacggcggccagcaggaggatgattctggagaaggagaggatgatgcggaggttcagcaagaatgcctgcataaattttccacccgggattatatcatggaaccctccatcttcaacactctgaagaggtattttcaggcaggagggtctccagagaatgttatccagctcttatctgaaaactacaccgctgtggcccagactgtgaacctgctggccgagtggctcattcagacaggtgttgagccagtgcaggttcaggaaactgtggaaaatcacttgaagagtttgctgatcaaacattttgacccccgcaaagcagattctatttttactgaagaaggagagaccccagcgtggctggaacagatgattgcacataccacgtggcgggaccttttttataaactggctgaagcccatccagactgtttgatgctgaacttcaccgttaagcttatttctgacgcagggtaccagggggagatcaccagtgtgtccacagcatgccagcagctagaagtgttctcgagagtgctccggacctctctagctacaattttagatggaggagaagaaaaccttgaaaaaaatctccctgagtttgccaagatggtgtgccacggggagcacacgtacctgtttgcccaggccatgatgtccgtgctggcccaggaggagcaggggggctccgctgtgcgcaggatcgcccaggaagtgcagcgctttgcccaggagaaaggtcatgacgccagtcagatcacactagccttgggcacagctgcctcctaccccagggcctgccaggctctcggggccatgctgtccaaaggagccctgaaccctgctgacatcaccgtcctgttcaagatgttcacaagcatggaccctcctccggttgaacttatccgcgttccagccttcctggacctgttcatgcagtcactctttaaaccaggggctcggatcaaccaggaccacaagcacaaatacatccacatcttggcgtacgcagcaagcgtggttgagacctggaagaagaacaagcgagtgagcatcaataaagatgagctgaagtcaacgtcaaaagctgtcgaaaccgttcacaatttgtgttgcaacgagaacaaaggggcctctgaactagtggcagaattgagcacactttatcagtgtattaggtttccagtggtagcaatgggtgtgctgaagtgggtggattggactgtatcagaaccaaggtactttcagctgcagactgaccatacccctgtccacctggcgttgctggatgagatcagcacctgccaccagctcctgcacccccaggtcctgcagctgcttgttaagctttttgagactgagcactcccagctggacgtgatggagcagcttgagttgaagaagacactgctggacaggatggttcacctgctgagtcgaggttatgtacttcctgttgtcagttacatccgaaagtgtctggagaagctggacactgacatttcactcattcgctattttgtcactgaggtgctggacgtcattgctcctccttatacctctgacttcgtgcaacttttcctccccatcctggagaatgacagcatcgcaggtaccatcaaaacggaaggcgagcatgaccctgtgacggagtttatagctcactgcaaatctaacttcatcatggtgaactaatttagagcatcctccagagctgaagcagaacattccagaacccgttgtggaaaaaccctttcaagaagctgttttaagaggctcgggcagcgtcttgaaaatgggcaccgctgggaggaggtggatgacttctttacaaaggaaaatggtagcagcttcagtgagaaactgcccttacaaacagtcccttctctgctgtcaatccaatactgctcccaaatcctgttttcagtgttcatttccctcaaggcaggcgctgggctcccacgacccctcaggacagatctggccgtcagccgcgggccgctgggaactccactcggggaactcctttccaagctgacctcagttttctcacaagaacccagttagctgatgttttattgtaattgtcttaatttgctaagaacaagtaataagtaaatttttaaaaa

SEQ ID NO: 300368 - DNA, 1772 bp, Homo sapiens
  misc_feature (66)..(66): n is a, c, g, or t
ataggctagtacgaggctgggtgtgaatcggccgaggccatccagacgttgatgctgaacttcacngttaagcttatttctgacgcagggtaccagggggagatcaccagtgtgtccacagcatgccagcagctagaagtgttctcgagagtgctccggacctctctagctacaattttagatggaggagaagaaaaccttgaaaaaaatctccctgagtttgccaagatggtgtgccacggggagcacacgtacctgtttgcccaggccatgatgtccgtgctggcccaggaggagcaggggggctccgctgtgcgcaggatcgcccaggaagtgcagcgctttgcccaggagaaaggtcatgacgccagtcagatcacactagccttgggcacagctgcctcctaccccagggcctgccaggctctcggggccatgctgtccaaaggagccctgaaccctgctgacatcaccgtcctgttcaagatgttcacaagcatggaccctcctccggttgaacttatccgcgttccagccttcctggacctgttcatgcagtcactctttaaaccaggggctcggatcaaccaggaccacaagcacaaatacatccacatcttggcgtacgcagcaagcgtggttgagacctggaagaagaacaagcgagtgagcatcaataaagatgagctgaagtcaacgtcaaaagctgtcgaaaccgttcacaatttgtgttgcaacgagaacaaaggggcctctgaactagtggcagaattgagcacactttatcagtgtattaggtttccagtggtagcaatgggtgtgctgaagtgggtggattggactgtatcagaaccaaggtactttcagctgcagactgaccatacccctgtccacctggcgttgctggatgagatcagcacctgccaccagctcctgcacccccaggtcctgcagctgcttgttaagctttttgagactgagcactcccagctggacgtgatggagcagcttgagttgaagaagacactgctggacaggatggttcacctgctgagtcgaggttatgtacttcctgttgtcagttacatccgaaagtgtctggagaagctggacactgacatttcactcattcgctattttgtcactgaggtgctggacgtcattgctcctccttatacctctgacttcgtgcaacttttcctccccatcctggagaatgacagcatcgcaggtaccatcaaaacggaaggcgagcatgaccctgtgacggagtttatagctcactgcaaatctaacttcatcatggtgaactaatttagagcatcctccagagctgaagcagaacattccagaacccgttgtggaaaaaccctttcaagaagctgttttaagaggctcgggcagcgtcttgaaaatgggcaccgctgggaggaggtggatgacttctttacaaaggaaaatggtagcagcttcagtgagaaactgcccttacaaacagtcccttctctgctgtcaatccaatactgctcccaaatcctgttttcagtgttcatttccctcaaggcaggcgctgggctcccacgacccctcaggacagatctggccgtcagccgcgggccgctgggaactccactcggggaactcctttccaagctgacctcagttttctcacaagaacccagttagctgatgttttattgtaattgtcttaatttgctaagaacaagtaataagtaaatttttaaaaagcctttctgctgggttggattaaa

SEQ ID NO: 300369 - DNA, 3400 bp, Homo sapiens
cgagcatgaccctgtgacggagtttatagctcactgcaaatctaaattagttcaccatgatgaagttagatttgcagtgagctataaactccgtcacagggtcatgctcgccttccgttttgatggtacctgcgatgctgtcattctccagaatcatcctcctgctggccgtgccgggcgccatcatggacgaggactactacgggagcgcggccgagtggggcgacgaggctgacggcggccagcaggaggatgattctggagaaggagaggatgatgcggaggttcagcaagaatgcctgcataaattttccacccgggattatatcatggaaccctccatcttcaacactctgaagaggtatgtgagaaaggtgtctgtattgggaggaggctgggggtaatttagagaaagttttgtaatacacccagaaggtgctatgtaaagcaagagtaacgcgaactgaactaaaggcttcaagggggggtcccctctgccactttttttttttttttaaatttttttaagacagagtcttgctctgttgcagtggcacaatcaccgctcactgcagcttcagcctcctggaatcaagcagttctcccacctcagccttgcaagctggccaccacaggcgtctgccatcatgcctggctatttttgtttttgttttttgggagagacagggctccttacgttgccctggctgctcttgaactcctaggctcaagtgattctcccacctctgcctcccaaagtgctgggattacaggtgtgcaccactgcacccagccccctccgctgctttaaaaattttgaaacctgattctcttcctccttccttaccttcctgttgtccatcattccattcattcgggtgtaattgctgttgttactttccctaggtattttcaggcaggagggtctccagagaatgttatccagctcttatctgaaaactacaccgctgtggcccagactgtgaacctgctggccgagtggctcattcagacaggtgttgagccagtgcaggttcaggaaactgtggaaaatcacttgaagagtttgctgatcaaacattttgacccccgcaaagcagattctatttttactgaagaaggagagaccccagcgtggctggaacagatgattgcacataccacgtggcgggaccttttttataaactggctgaagcccatccagactgtttgatgctgaacttcaccgttaaggtaggaagagttctagagttaaggagaaaagtgtttatgaatgtttatttttggttgttggtctgtttcctttgacagttcatatttgctttttttccataaaggtctttattgttttattttcataagccttacactgagaaagaaaagtgtaaaatttgtatctgtttttgggtcagtgttgactgtgttttaggatttagcagggatacaagaattctcttgtggttggagaggagctttaggcgtgcctgcttgatcttcctcttgcatatgaagaaacgatggagaggtggtcagcccagggcacacacctaggtgatagcagggtgagggcggagtgaaggcctgagacccacgaccagcgcacacttactccacctcaccatgaacactgacaagccagcttcccgtggaggtgcggtcactgcatgcctcccctctgacttcttgttttgtgtcctagcttatttctgacgcagggtaccagggggagatcaccagtgtgtccacagcatgccagcagctagaagtgttctcgagagtgctccggacctctctagctacaattttagatggaggagaagaaaaccttgaaaaaaatctccctgagtttgccaagatggtgtgccacggggagcacacgtacctgtttgcccaggccatgatgtccgtgctggcccaggaggagcaggggggctccgctgtgcgcaggatcgcccaggaagtgcagcgctttgcccaggagaaaggtcatgacgccagtcagatcacactagccttgggcacagctgcctcctaccccagggcctgccaggctctcggggccatgctgtccaaaggagccctgaaccctgctgacatcaccgtcctgttcaagatgttcacaagcatggaccctcctccggttgaacttatccgcgttccagccttcctggacctgttcatgcagtcactctttaaaccaggggctcggatcaaccaggaccacaagcacaaatacatccacatcttggcgtacgcagcaagcgtggttgagacctggaagaagaacaagcgagtgagcatcaataaagatgagctgaagtcaacgtcaaaagctgtcgaaaccgttcacaatttgtgttgcaacgagaacaaaggggcctctgaactagtggcagaattgagcacactttatcagtgtattaggtttccagtggtagcaatgggtgtgctgaagtgggtggattggactgtatcagaaccaaggtactttcagctgcagactgaccatacccctgtccacctggcgttgctggatgagatcagcacctgccaccagctcctgcacccccaggtcctgcagctgcttgttaagctttttgagactgagcactcccagctggacgtgatggagcagcttgagttgaagaagacactgctggacaggatggttcacctgctgagtcgaggttatgtacttcctgttgtcagttacatccgaaagtgtctggagaagctggacactgacatttcactcattcgctattttgtcactgaggtgctggacgtcattgctcctccttatacctctgacttcgtgcaacttttcctccccatcctggagaatgacagcatcgcaggtaccatcaaaacggaaggcgagcatgaccctgtgacggagtttatagctcactgcaaatctaacttcatcatggtgaactaatttagagcatcctccagagctgaagcagaacattccagaacccgttgtggaaaaaccctttcaagaagctgttttaagaggctcgggcagcgtcttgaaaatgggcaccgctgggaggaggtggatgacttctttacaaaggaaaatggtagcagcttcagtgagaaactgcccttacaaacagtcccttctctgctgtcaatccaatactgctcccaaatcctgttttcagtgttcatttccctcaaggcaggcgctgggctcccacgacccctcaggacagatctggccgtcagccgcgggccgctgggaactccactcggggaactcctttccaagctgacctcagttttctcacaagaacccagttagctgatgttttattgtaattgtcttaatttgctaagaacaagtaataagtaaatttttaaaaagcctttctgctgggttggattaaa

SEQ ID NO: 300370 - DNA, 4321 bp, Homo sapiens
cgagcatgaccctgtgacggagtttatagctcactgcaaatctaaattagttcaccatgatgaagttagatttgcagtgagctataaactccgtcacagggtcatgctcgccttccgttttgatggtacctgcgatgctgtcattctccagaatcatcctcctgctggccgtgccgggcgccatcatggacgaggactactacgggagcgcggccgagtggggcgacgaggctgacggcggccagcaggaggatgattctggagaaggagaggatgatgcggaggttcagcaagaatgcctgcataaattttccacccgggattatatcatggaaccctccatcttcaacactctgaagaggtatgtgagaaaggtgtctgtattgggaggaggctgggggtaatttagagaaagttttgtaatacacccagaaggtgctatgtaaagcaagagtaacgcgaactgaactaaaggcttcaagggggggtcccctctgccactttttttttttttttaaatttttttaagacagagtcttgctctgttgcagtggcacaatcaccgctcactgcagcttcagcctcctggaatcaagcagttctcccacctcagccttgcaagctggccaccacaggcgtctgccatcatgcctggctatttttgtttttgttttttgggagagacagggctccttacgttgccctggctgctcttgaactcctaggctcaagtgattctcccacctctgcctcccaaagtgctgggattacaggtgtgcaccactgcacccagccccctccgctgctttaaaaattttgaaacctgattctcttcctccttccttaccttcctgttgtccatcattccattcattcgggtgtaattgctgttgttactttccctaggtattttcaggcaggagggtctccagagaatgttatccagctcttatctgaaaactacaccgctgtggcccagactgtgaacctgctggccgagtggctcattcagacaggtgttgagccagtgcaggttcaggaaactgtggaaaatcacttgaagagtttgctgatcaaacattttgacccccgcaaagcagattctatttttactgaagaaggagagaccccagcgtggctggaacagatgattgcacataccacgtggcgggaccttttttataaactggctgaagcccatccagactgtttgatgctgaacttcaccgttaaggtaggaagagttctagagttaaggagaaaagtgtttatgaatgtttatttttggttgttggtctgtttcctttgacagttcatatttgctttttttccataaaggtctttattgttttattttcataagccttacactgagaaagaaaagtgtaaaatttgtatctgtttttgggtcagtgttgactgtgttttaggatttagcagggatacaagaattctcttgtggttggagaggagctttaggcgtgcctgcttgatcttcctcttgcatatgaagaaacgatggagaggtggtcagcccagggcacacacctaggtgatagcagggtgagggcggagtgaaggcctgagacccacgaccagcgcacacttactccacctcaccatgaacactgacaagccagcttcccgtggaggtgcggtcactgcatgcctcccctctgacttcttgttttgtgtcctagcttatttctgacgcagggtaccagggggagatcaccagtgtgtccacagcatgccagcagctagaagtgttctcgagagtgctccggacctctctagctacaattttagatggaggagaagaaaaccttgaaaaaaatctccctgagtttgccaagatggtgtgccacggggagcacacgtacctgtttgcccaggccatgatgtccgtgctggcccaggaggagcaggggggctccgctgtgcgcaggatcgcccaggaagtgcagcgctttgcccaggagaagtgagaggccctgtttctgctcagcccttccttcctagtgctccccacaaaacccttcccatggcccgtgttccacagccaaagctgctagctccttctgttcaacgtagaggtaaacttgcttttggctgggcgtggtggctcacgcctgtaatcccagcactttgggaggccgaggcggatggatcacctaaggtcaggagtttgagaccagcttgaccaacatggagaaaccccatctctggtaaacaaaaatacaaaattagccgggtgtggcggcacatgcctgtaatcccagctacttgggaggctgaggcaggagaatcgcttgaacctgggaggtggaggttgtggtcagccaagattgcaccattgcactccagcctgggcaacaagagcaaaactctgtctcaaaaaaaaaaaaaaaaattaaaaacttccttttatccagcagagctggaaaagttggagttgtttttggtatacttggagagctggctttctaaagtgctgctttgaggactgttgtgtaaagcacttgattcgtcttccctttgctggagttatgggcctgggcttttacactggggttctgaagtaacaaacaaagtcagtccagaaatagttgctcagcaatctcattgttacagtgtcgcaaaatgagctcatattagctttattttctgctaccaatagagtgttcctaagtatttaaagtgtgtgactcctttcttatagagccagcaagctgtattggaatcacttttccagtgttgtaaatgttatttttgtgggtcagtcagtatactcgtgaatgacagaaaaacagatcccaacaatgcaaagtattatatgtgtaaaaaagaacagaaaaaagaagctgccttgttagtaacgggctctatggtttttctcatcaagaggtcatgacgccagtcagatcacactagccttgggcacagctgcctcctaccccagggcctgccaggctctcggggccatgctgtccaaaggagccctgaaccctgctgacatcaccgtcctgttcaagatgttcacaagcatggaccctcctccggttgaacttatccgcgttccagccttcctggacctgttcatgcagtcactctttaaaccaggggctcggatcaaccaggaccacaagcacaaatacatccacatcttggcgtacgcagcaagcgtggttgagacctggaagaagaacaagcgagtgagcatcaataaagatgagctgaagtcaacgtcaaaagctgtcgaaaccgttcacaatttgtgttgcaacgagaacaaaggggcctctgaactagtggcagaattgagcacactttatcagtgtattaggtttccagtggtagcaatgggtgtgctgaagtgggtggattggactgtatcagaaccaaggtactttcagctgcagactgaccatacccctgtccacctggcgttgctggatgagatcagcacctgccaccagctcctgcacccccaggtcctgcagctgcttgttaagctttttgagactgagcactcccagctggacgtgatggagcagcttgagttgaagaagacactgctggacaggatggttcacctgctgagtcgaggttatgtacttcctgttgtcagttacatccgaaagtgtctggagaagctggacactgacatttcactcattcgctattttgtcactgaggtgctggacgtcattgctcctccttatacctctgacttcgtgcaacttttcctccccatcctggagaatgacagcatcgcaggtaccatcaaaacggaaggcgagcatgaccctgtgacggagtttatagctcactgcaaatctaacttcatcatggtgaactaatttagagcatcctccagagctgaagcagaacattccagaacccgttgtggaaaaaccctttcaagaagctgttttaagaggctcgggcagcgtcttgaaaatgggcaccgctgggaggaggtggatgacttctttacaaaggaaaatggtagcagcttcagtgagaaactgcccttacaaacagtcccttctctgctgtcaatccaatactgctcccaaatcctgttttcagtgttcatttccctcaaggcaggcgctgggctcccacgacccctcaggacagatctggccgtcagccgcgggccgctgggaactccactcggggaactcctttccaagctgacctcagttttctcacaagaacccagttagctgatgttttattgtaattgtcttaatttgctaagaacaagtaataagtaaatttttaaaaagcctttctgctgggttggattaaa

SEQ ID NO: 300371 - DNA, 2117 bp, Homo sapiens
  misc_feature (66)..(66): n is a, c, g, or t
ataggctagtacgaggctgggtgtgaatcggccgaggccatccagacgttgatgctgaacttcacngttaagcttatttctgacgcagggtaccagggggagatcaccagtgtgtccacagcatgccagcagctagaagtgttctcgagagtgctccggacctctctagctacaattttagatggaggagaagaaaaccttgaaaaaaatctccctgagtttgccaagatggtgtgccacggggagcacacgtacctgtttgcccaggccatgatgtccgtgctggcccaggaggagcaggggggctccgctgtgcgcaggatcgcccaggaagtgcagcgctttgcccaggagaaaggtcatgacgccagtcagatcacactagccttgggcacagctgcctcctaccccagggcctgccaggctctcggggccatgctgtccaaaggagccctgaaccctgctgacatcaccgtcctgttcaagatgttcacaagcatggaccctcctccggttgaacttatccgcgttccagccttcctggacctgttcatgcagtcactctttaaaccaggggctcggatcaaccaggaccacaagcacaaatacatccacatcttggcgtacgcagcaagcgtggttgagacctggaagaagaacaagcgagtgagcatcaataaagatgagctgaagtcaacgtcaaaagctgtcgaaaccgttcacaatttgtgttgcaacgagaacaaaggggcctctgaactagtggcagaattgagcacactttatcagtgtattaggtttccagtggtagcaatgggtgtgctgaagtgggtggattggactgtatcagaaccaaggtactttcagctgcagactgaccatacccctgtccacctggcgttgctggatgagatcagcacctgccaccagctcctgcacccccaggtcctgcagctgcttgttaagctttttgagactgagcactcccagctggacgtgatggagcagcttgagttgaagaagacactgctggacaggatggttcacctgctgagtcgaggttatgtacttcctgttgtcagttacatccgaaagtgtctggagaagctggacactgacatttcactcattcgctattttgtcactgaggtcagcaatgcaccgttggtttcatgtttcatactgtttacactagcactgccctttttggcttaatttagttcattttgtacctaactgagaactgtgctttctgatgtagtgatgacaatgacagatactcgtttaccaaaaagcaccttctgcctgcagcagctgtatgacacactttacctccattaccaccctgggcatctgaatgttggagatgggtggtgtcaccggccggtgggggtggggagggattttttccaaactgatggccatttcacccggatgtcggtggatgccccgcactagtgtgcggaagaagtcaccctgtgctcccccacgcaggtgctggacgtcattgctcctccttatacctctgacttcgtgcaacttttcctccccatcctggagaatgacagcatcgcaggtaccatcaaaacggaaggcgagcatgaccctgtgacggagtttatagctcactgcaaatctaacttcatcatggtgaactaatttagagcatcctccagagctgaagcagaacattccagaacccgttgtggaaaaaccctttcaagaagctgttttaagaggctcgggcagcgtcttgaaaatgggcaccgctgggaggaggtggatgacttctttacaaaggaaaatggtagcagcttcagtgagaaactgcccttacaaacagtcccttctctgctgtcaatccaatactgctcccaaatcctgttttcagtgttcatttccctcaaggcaggcgctgggctcccacgacccctcaggacagatctggccgtcagccgcgggccgctgggaactccactcggggaactcctttccaagctgacctcagttttctcacaagaacccagttagctgatgttttattgtaattgtcttaatttgctaagaacaagtaataagtaaatttttaaaaagcctttctgctgggttggattaaa

SEQ ID NO: 300372 - DNA, 4557 bp, Homo sapiens
cgagcatgaccctgtgacggagtttatagctcactgcaaatctaaattagttcaccatgatgaagttagatttgcagtgagctataaactccgtcacagggtcatgctcgccttccgttttgatggtacctgcgatgctgtcattctccagaatcatcctcctgctggccgtgccgggcgccatcatggacgaggactactacgggagcgcggccgagtggggcgacgaggctgacggcggccagcaggaggatgattctggagaaggagaggatgatgcggaggttcagcaagaatgcctgcataaattttccacccgggattatatcatggaaccctccatcttcaacactctgaagaggtatgtgagaaaggtgtctgtattgggaggaggctgggggtaatttagagaaagttttgtaatacacccagaaggtgctatgtaaagcaagagtaacgcgaactgaactaaaggcttcaagggggggtcccctctgccactttttttttttttttaaatttttttaagacagagtcttgctctgttgcagtggcacaatcaccgctcactgcagcttcagcctcctggaatcaagcagttctcccacctcagccttgcaagctggccaccacaggcgtctgccatcatgcctggctatttttgtttttgttttttgggagagacagggctccttacgttgccctggctgctcttgaactcctaggctcaagtgattctcccacctctgcctcccaaagtgctgggattacaggtgtgcaccactgcacccagccccctccgctgctttaaaaattttgaaacctgattctcttcctccttccttaccttcctgttgtccatcattccattcattcgggtgtaattgctgttgttactttccctaggtattttcaggcaggagggtctccagagaatgttatccagctcttatctgaaaactacaccgctgtggcccagactgtgaacctgctggccgagtggctcattcagacaggtgttgagccagtgcaggttcaggaaactgtggaaaatcacttgaagagtttgctgatcaaacattttgacccccgcaaagcagattctatttttactgaagaaggagagaccccagcgtggctggaacagatgattgcacataccacgtggcgggaccttttttataaactggctgaagcccatccagactgtttgatgctgaacttcaccgttaaggtaggaagagttctagagttaaggagaaaagtgtttatgaatgtttatttttggttgttggtctgtttcctttgacagttcatatttgctttttttccataaaggtctttattgttttattttcataagccttacactgagaaagaaaagtgtaaaatttgtatctgtttttgggtcagtgttgactgtgttttaggatttagcagggatacaagaattctcttgtggttggagaggagctttaggcgtgcctgcttgatcttcctcttgcatatgaagaaacgatggagaggtggtcagcccagggcacacacctaggtgatagcagggtgagggcggagtgaaggcctgagacccacgaccagcgcacacttactccacctcaccatgaacactgacaagccagcttcccgtggaggtgcggtcactgcatgcctcccctctgacttcttgttttgtgtcctagcttatttctgacgcagggtaccagggggagatcaccagtgtgtccacagcatgccagcagctagaagtgttctcgagagtgctccggacctctctagctacaattttagatggaggagaagaaaaccttgaaaaaaatctccctgagtttgccaagatggtgtgccacggggagcacacgtacctgtttgcccaggccatgatgtccgtgctggcccaggaggagcaggggggctccgctgtgcgcaggatcgcccaggaagtgcagcgctttgcccaggagaagtgagaggccctgtttctgctcagcccttccttcctagtgctccccacaaaacccttcccatggcccgtgttccacagccaaagctgctagctccttctgttcaacgtagaggtaaacttgcttttggctgggcgtggtggctcacgcctgtaatcccagcactttgggaggccgaggcggatggatcacctaaggtcaggagtttgagaccagcttgaccaacatggagaaaccccatctctggtaaacaaaaatacaaaattagccgggtgtggcggcacatgcctgtaatcccagctacttgggaggctgaggcaggagaatcgcttgaacctgggaggtggaggttgtggtcagccaagattgcaccattgcactccagcctgggcaacaagagcaaaactctgtctcaaaaaaaaaaaaaaaaattaaaaacttccttttatccagcagagctggaaaagttggagttgtttttggtatacttggagagctggctttctaaagtgctgctttgaggactgttgtgtaaagcacttgattcgtcttccctttgctggagttatgggcctgggcttttacactggggttctgaagtaacaaacaaagtcagtccagaaatagttgctcagcaatctcattgttacagtgtcgcaaaatgagctcatattagctttattttctgctaccaatagagtgttcctaagtatttaaagtgtgtgactcctttcttatagagccagcaagctgtattggaatcacttttccagtgttgtaaatgttatttttgtgggtcagtcagtatactcgtgaatgacagaaaaacagatcccaacaatgcaaagtattatatgtgtaaaaaagaacagaaaaaagaagctgccttgttagtaacgggctctatggtttttctcatcaagaggtcatgacgccagtcagatcacactagccttgggcacagctgcctcctaccccagggcctgccaggctctcggggccatgctgtccaaaggagccctgaaccctgctgacatcaccgtcctgttcaagatgttcacaagcatggaccctcctccggttgaacttgtaagttgcttctcaagaatccccaatgtcagctggtaaggtgactttggaaagtctgtgcttgtctgattgtctgaaggctgtgaatgcaaatccatcattgtcctggtccttcctcagtcacactctctgcctggagcctgttgggcccctgctgtgtagggaaccctgaggggaggtgggtgagcagtgccctcacgcctgccatcccgaactgggcatatgcttctcctcagatccgcgttccagccttcctggacctgttcatgcagtcactctttaaaccaggggctcggatcaaccaggaccacaagcacaaatacatccacatcttggcgtacgcagcaagcgtggttgagacctggaagaagaacaagcgagtgagcatcaataaagatgagctgaagtcaacgtcaaaagctgtcgaaaccgttcacaatttgtgttgcaacgagaacaaaggggcctctgaactagtggcagaattgagcacactttatcagtgtattaggtttccagtggtagcaatgggtgtgctgaagtgggtggattggactgtatcagaaccaaggtactttcagctgcagactgaccatacccctgtccacctggcgttgctggatgagatcagcacctgccaccagctcctgcacccccaggtcctgcagctgcttgttaagctttttgagactgagcactcccagctggacgtgatggagcagcttgagttgaagaagacactgctggacaggatggttcacctgctgagtcgaggttatgtacttcctgttgtcagttacatccgaaagtgtctggagaagctggacactgacatttcactcattcgctattttgtcactgaggtgctggacgtcattgctcctccttatacctctgacttcgtgcaacttttcctccccatcctggagaatgacagcatcgcaggtaccatcaaaacggaaggcgagcatgaccctgtgacggagtttatagctcactgcaaatctaacttcatcatggtgaactaatttagagcatcctccagagctgaagcagaacattccagaacccgttgtggaaaaaccctttcaagaagctgttttaagaggctcgggcagcgtcttgaaaatgggcaccgctgggaggaggtggatgacttctttacaaaggaaaatggtagcagcttcagtgagaaactgcccttacaaacagtcccttctctgctgtcaatccaatactgctcccaaatcctgttttcagtgttcatttccctcaaggcaggcgctgggctcccacgacccctcaggacagatctggccgtcagccgcgggccgctgggaactccactcggggaactcctttccaagctgacctcagttttctcacaagaacccagttagctgatgttttattgtaattgtcttaatttgctaagaacaagtaataagtaaatttttaaaaagcctttctgctgggttggattaaa

SEQ ID NO: 300373 - DNA, 1696 bp, Homo sapiens
  misc_feature (66)..(66): n is a, c, g, or t
ataggctagtacgaggctgggtgtgaatcggccgaggccatccagacgttgatgctgaacttcacngttaagcttatttctgacgcagggtaccagggggagatcaccagtgtgtccacagcatgccagcagctagaagtgttctcgagagtgctccggacctctctagctacaattttagatggaggagaagaaaaccttgaaaaaaatctccctgagtttgccggggctccgctgtgcgcaggatcgcccaggaagtgcagcgctttgcccaggagaaaggtcatgacgccagtcagatcacactagccttgggcacagctgcctcctaccccagggcctgccaggctctcggggccatgctgtccaaaggagccctgaaccctgctgacatcaccgtcctgttcaagatgttcacaagcatggaccctcctccggttgaacttatccgcgttccagccttcctggacctgttcatgcagtcactctttaaaccaggggctcggatcaaccaggaccacaagcacaaatacatccacatcttggcgtacgcagcaagcgtggttgagacctggaagaagaacaagcgagtgagcatcaataaagatgagctgaagtcaacgtcaaaagctgtcgaaaccgttcacaatttgtgttgcaacgagaacaaaggggcctctgaactagtggcagaattgagcacactttatcagtgtattaggtttccagtggtagcaatgggtgtgctgaagtgggtggattggactgtatcagaaccaaggtactttcagctgcagactgaccatacccctgtccacctggcgttgctggatgagatcagcacctgccaccagctcctgcacccccaggtcctgcagctgcttgttaagctttttgagactgagcactcccagctggacgtgatggagcagcttgagttgaagaagacactgctggacaggatggttcacctgctgagtcgaggttatgtacttcctgttgtcagttacatccgaaagtgtctggagaagctggacactgacatttcactcattcgctattttgtcactgaggtgctggacgtcattgctcctccttatacctctgacttcgtgcaacttttcctccccatcctggagaatgacagcatcgcaggtaccatcaaaacggaaggcgagcatgaccctgtgacggagtttatagctcactgcaaatctaacttcatcatggtgaactaatttagagcatcctccagagctgaagcagaacattccagaacccgttgtggaaaaaccctttcaagaagctgttttaagaggctcgggcagcgtcttgaaaatgggcaccgctgggaggaggtggatgacttctttacaaaggaaaatggtagcagcttcagtgagaaactgcccttacaaacagtcccttctctgctgtcaatccaatactgctcccaaatcctgttttcagtgttcatttccctcaaggcaggcgctgggctcccacgacccctcaggacagatctggccgtcagccgcgggccgctgggaactccactcggggaactcctttccaagctgacctcagttttctcacaagaacccagttagctgatgttttattgtaattgtcttaatttgctaagaacaagtaataagtaaatttttaaaaagcctttctgctgggttggattaaa

SEQ ID NO: 300374 - DNA, 3253 bp, Homo sapiens
cgagcatgaccctgtgacggagtttatagctcactgcaaatctaaattagttcaccatgatgaagttagatttgcagtgagctataaactccgtcacagggtcatgctcgccttccgttttgatggtacctgcgatgctgtcattctccagaatcatcctcctgctggccgtgccgggcgccatcatggacgaggactactacgggagcgcggccgagtggggcgacgaggctgacggcggccagcaggaggatgattctggagaaggagaggatgatgcggaggttcagcaagaatgcctgcataaattttccacccgggattatatcatggaaccctccatcttcaacactctgaagaggtatgtgagaaaggtgtctgtattgggaggaggctgggggtaatttagagaaagttttgtaatacacccagaaggtgctatgtaaagcaagagtaacgcgaactgaactaaaggcttcaagggggggtcccctctgccactttttttttttttttaaatttttttaagacagagtcttgctctgttgcagtggcacaatcaccgctcactgcagcttcagcctcctggaatcaagcagttctcccacctcagccttgcaagctggccaccacaggcgtctgccatcatgcctggctatttttgtttttgttttttgggagagacagggctccttacgttgccctggctgctcttgaactcctaggctcaagtgattctcccacctctgcctcccaaagtgctgggattacaggtgtgcaccactgcacccagccccctccgctgctttaaaaattttgaaacctgattctcttcctccttccttaccttcctgttgtccatcattccattcattcgggtgtaattgctgttgttactttccctaggtattttcaggcaggagggtctccagagaatgttatccagctcttatctgaaaactacaccgctgtggcccagactgtgaacctgctggccgagtggctcattcagacaggtgttgagccagtgcaggttcaggaaactgtggaaaatcacttgaagagtttgctgatcaaacattttgacccccgcaaagcagattctatttttactgaagaaggagagaccccagcgtggctggaacagatgattgcacataccacgtggcgggaccttttttataaactggctgaagcccatccagactgtttgatgctgaacttcaccgttaaggtaggaagagttctagagttaaggagaaaagtgtttatgaatgtttatttttggttgttggtctgtttcctttgacagttcatatttgctttttttccataaaggtctttattgttttattttcataagccttacactgagaaagaaaagtgtaaaatttgtatctgtttttgggtcagtgttgactgtgttttaggatttagcagggatacaagaattctcttgtggttggagaggagctttaggcgtgcctgcttgatcttcctcttgcatatgaagaaacgatggagaggtggtcagcccagggcacacacctaggtgatagcagggtgagggcggagtgaaggcctgagacccacgaccagcgcacacttactccacctcaccatgaacactgacaagccagcttcccgtggaggtgcggtcactgcatgcctcccctctgacttcttgttttgtgtcctagcttatttctgacgcagggtaccagggggagatcaccagtgtgtccacagcatgccagcagctagaagtgttctcgagagtgctccggacctctctagctacaattttagatggaggagaagaaaaccttgaaaaaaatctccctgagtttgccaagatggtgtgccacggggagcacacgtacctgtttgcccaggccatgatgtccgtgctggcccaggaggagcagggagccctgaaccctgctgacatcaccgtcctgttcaagatgttcacaagcatggaccctcctccggttgaacttatccgcgttccagccttcctggacctgttcatgcagtcactctttaaaccaggggctcggatcaaccaggaccacaagcacaaatacatccacatcttggcgtacgcagcaagcgtggttgagacctggaagaagaacaagcgagtgagcatcaataaagatgagctgaagtcaacgtcaaaagctgtcgaaaccgttcacaatttgtgttgcaacgagaacaaaggggcctctgaactagtggcagaattgagcacactttatcagtgtattaggtttccagtggtagcaatgggtgtgctgaagtgggtggattggactgtatcagaaccaaggtactttcagctgcagactgaccatacccctgtccacctggcgttgctggatgagatcagcacctgccaccagctcctgcacccccaggtcctgcagctgcttgttaagctttttgagactgagcactcccagctggacgtgatggagcagcttgagttgaagaagacactgctggacaggatggttcacctgctgagtcgaggttatgtacttcctgttgtcagttacatccgaaagtgtctggagaagctggacactgacatttcactcattcgctattttgtcactgaggtgctggacgtcattgctcctccttatacctctgacttcgtgcaacttttcctccccatcctggagaatgacagcatcgcaggtaccatcaaaacggaaggcgagcatgaccctgtgacggagtttatagctcactgcaaatctaacttcatcatggtgaactaatttagagcatcctccagagctgaagcagaacattccagaacccgttgtggaaaaaccctttcaagaagctgttttaagaggctcgggcagcgtcttgaaaatgggcaccgctgggaggaggtggatgacttctttacaaaggaaaatggtagcagcttcagtgagaaactgcccttacaaacagtcccttctctgctgtcaatccaatactgctcccaaatcctgttttcagtgttcatttccctcaaggcaggcgctgggctcccacgacccctcaggacagatctggccgtcagccgcgggccgctgggaactccactcggggaactcctttccaagctgacctcagttttctcacaagaacccagttagctgatgttttattgtaattgtcttaatttgctaagaacaagtaataagtaaatttttaaaaagcctttctgctgggttggattaaa

SEQ ID NO: 300375 - DNA, 4991 bp, Homo sapiens
cgagcatgaccctgtgacggagtttatagctcactgcaaatctaaattagttcaccatgatgaagttagatttgcagtgagctataaactccgtcacagggtcatgctcgccttccgttttgatggtacctgcgatgctgtcattctccagaatcatcctcctgctggccgtgccgggcgccatcatggacgaggactactacgggagcgcggccgagtggggcgacgaggctgacggcggccagcaggaggatgattctggagaaggagaggatgatgcggaggttcagcaagaatgcctgcataaattttccacccgggattatatcatggaaccctccatcttcaacactctgaagaggtatgtgagaaaggtgtctgtattgggaggaggctgggggtaatttagagaaagttttgtaatacacccagaaggtgctatgtaaagcaagagtaacgcgaactgaactaaaggcttcaagggggggtcccctctgccactttttttttttttttaaatttttttaagacagagtcttgctctgttgcagtggcacaatcaccgctcactgcagcttcagcctcctggaatcaagcagttctcccacctcagccttgcaagctggccaccacaggcgtctgccatcatgcctggctatttttgtttttgttttttgggagagacagggctccttacgttgccctggctgctcttgaactcctaggctcaagtgattctcccacctctgcctcccaaagtgctgggattacaggtgtgcaccactgcacccagccccctccgctgctttaaaaattttgaaacctgattctcttcctccttccttaccttcctgttgtccatcattccattcattcgggtgtaattgctgttgttactttccctaggtattttcaggcaggagggtctccagagaatgttatccagctcttatctgaaaactacaccgctgtggcccagactgtgaacctgctggccgagtggctcattcagacaggtgttgagccagtgcaggttcaggaaactgtggaaaatcacttgaagagtttgctgatcaaacattttgacccccgcaaagcagattctatttttactgaagaaggagagaccccagcgtggctggaacagatgattgcacataccacgtggcgggaccttttttataaactggctgaagcccatccagactgtttgatgctgaacttcaccgttaaggtaggaagagttctagagttaaggagaaaagtgtttatgaatgtttatttttggttgttggtctgtttcctttgacagttcatatttgctttttttccataaaggtctttattgttttattttcataagccttacactgagaaagaaaagtgtaaaatttgtatctgtttttgggtcagtgttgactgtgttttaggatttagcagggatacaagaattctcttgtggttggagaggagctttaggcgtgcctgcttgatcttcctcttgcatatgaagaaacgatggagaggtggtcagcccagggcacacacctaggtgatagcagggtgagggcggagtgaaggcctgagacccacgaccagcgcacacttactccacctcaccatgaacactgacaagccagcttcccgtggaggtgcggtcactgcatgcctcccctctgacttcttgttttgtgtcctagcttatttctgacgcagggtaccagggggagatcaccagtgtgtccacagcatgccagcagctagaagtgttctcgagagtgctccggacctctctagctacaattttagatggaggagaagaaaaccttgaaaaaaatctccctgagtttgccaagatggtgtgccacggggagcacacgtacctgtttgcccaggccatgatgtccgtgctggcccaggaggagcaggggggctccgctgtgcgcaggatcgcccaggaagtgcagcgctttgcccaggagaagtgagaggccctgtttctgctcagcccttccttcctagtgctccccacaaaacccttcccatggcccgtgttccacagccaaagctgctagctccttctgttcaacgtagaggtaaacttgcttttggctgggcgtggtggctcacgcctgtaatcccagcactttgggaggccgaggcggatggatcacctaaggtcaggagtttgagaccagcttgaccaacatggagaaaccccatctctggtaaacaaaaatacaaaattagccgggtgtggcggcacatgcctgtaatcccagctacttgggaggctgaggcaggagaatcgcttgaacctgggaggtggaggttgtggtcagccaagattgcaccattgcactccagcctgggcaacaagagcaaaactctgtctcaaaaaaaaaaaaaaaaattaaaaacttccttttatccagcagagctggaaaagttggagttgtttttggtatacttggagagctggctttctaaagtgctgctttgaggactgttgtgtaaagcacttgattcgtcttccctttgctggagttatgggcctgggcttttacactggggttctgaagtaacaaacaaagtcagtccagaaatagttgctcagcaatctcattgttacagtgtcgcaaaatgagctcatattagctttattttctgctaccaatagagtgttcctaagtatttaaagtgtgtgactcctttcttatagagccagcaagctgtattggaatcacttttccagtgttgtaaatgttatttttgtgggtcagtcagtatactcgtgaatgacagaaaaacagatcccaacaatgcaaagtattatatgtgtaaaaaagaacagaaaaaagaagctgccttgttagtaacgggctctatggtttttctcatcaagaggtcatgacgccagtcagatcacactagccttgggcacagctgcctcctaccccagggcctgccaggctctcggggccatgctgtccaaaggagccctgaaccctgctgacatcaccgtcctgttcaagatgttcacaagcatggaccctcctccggttgaacttgtaagttgcttctcaagaatccccaatgtcagctggtaaggtgactttggaaagtctgtgcttgtctgattgtctgaaggctgtgaatgcaaatccatcattgtcctggtccttcctcagtcacactctctgcctggagcctgttgggcccctgctgtgtagggaaccctgaggggaggtgggtgagcagtgccctcacgcctgccatcccgaactgggcatatgcttctcctcagatccgcgttccagccttcctggacctgttcatgcagtcactctttaaaccaggggctcggatcaaccaggaccacaagcacaaatacatccacatcttggcgtacgcagcaagcgtggttgagacctggaagaaggtaccatcggttctgggaatttgtggattttttaggagacaaatatcctcctctgctttgatattattttggaattttggctgcaagaaatcttgaccctccctagtatcaggcatgtgttttcttgtgtttctgtgtagagaaagcactaaacgtctccagaaaatgtgcgtaatgtctccaatgctctgcaaaccgtaaattgaaatgtgactaaagaaatgaaactgatttccgtaagacatggacaaacactagtctcattgcttttcagtttctgtacactgtgtgactgtgaagtttgacagctgaattgactcccaacttaagtagaaatagggaaagtgctttgcaagaagtggccgacaccagaacaccccgacagcagggatatctgccctgtcaggctcaccagcttgtgtgtgtgttttcagaacaagcgagtgagcatcaataaagatgagctgaagtcaacgtcaaaagctgtcgaaaccgttcacaatttgtgttgcaacgagaacaaaggggcctctgaactagtggcagaattgagcacactttatcagtgtattaggtttccagtggtagcaatgggtgtgctgaagtgggtggattggactgtatcagaaccaaggtactttcagctgcagactgaccatacccctgtccacctggcgttgctggatgagatcagcacctgccaccagctcctgcacccccaggtcctgcagctgcttgttaagctttttgagactgagcactcccagctggacgtgatggagcagcttgagttgaagaagacactgctggacaggatggttcacctgctgagtcgaggttatgtacttcctgttgtcagttacatccgaaagtgtctggagaagctggacactgacatttcactcattcgctattttgtcactgaggtgctggacgtcattgctcctccttatacctctgacttcgtgcaacttttcctccccatcctggagaatgacagcatcgcaggtaccatcaaaacggaaggcgagcatgaccctgtgacggagtttatagctcactgcaaatctaacttcatcatggtgaactaatttagagcatcctccagagctgaagcagaacattccagaacccgttgtggaaaaaccctttcaagaagctgttttaagaggctcgggcagcgtcttgaaaatgggcaccgctgggaggaggtggatgacttctttacaaaggaaaatggtagcagcttcagtgagaaactgcccttacaaacagtcccttctctgctgtcaatccaatactgctcccaaatcctgttttcagtgttcatttccctcaaggcaggcgctgggctcccacgacccctcaggacagatctggccgtcagccgcgggccgctgggaactccactcggggaactcctttccaagctgacctcagttttctcacaagaacccagttagctgatgttttattgtaattgtcttaatttgctaagaacaagtaataagtaaatttttaaaaagcctttctgctgggttggattaaa

SEQ ID NO: 300376 - DNA, 4755 bp, Homo sapiens
cgagcatgaccctgtgacggagtttatagctcactgcaaatctaaattagttcaccatgatgaagttagatttgcagtgagctataaactccgtcacagggtcatgctcgccttccgttttgatggtacctgcgatgctgtcattctccagaatcatcctcctgctggccgtgccgggcgccatcatggacgaggactactacgggagcgcggccgagtggggcgacgaggctgacggcggccagcaggaggatgattctggagaaggagaggatgatgcggaggttcagcaagaatgcctgcataaattttccacccgggattatatcatggaaccctccatcttcaacactctgaagaggtatgtgagaaaggtgtctgtattgggaggaggctgggggtaatttagagaaagttttgtaatacacccagaaggtgctatgtaaagcaagagtaacgcgaactgaactaaaggcttcaagggggggtcccctctgccactttttttttttttttaaatttttttaagacagagtcttgctctgttgcagtggcacaatcaccgctcactgcagcttcagcctcctggaatcaagcagttctcccacctcagccttgcaagctggccaccacaggcgtctgccatcatgcctggctatttttgtttttgttttttgggagagacagggctccttacgttgccctggctgctcttgaactcctaggctcaagtgattctcccacctctgcctcccaaagtgctgggattacaggtgtgcaccactgcacccagccccctccgctgctttaaaaattttgaaacctgattctcttcctccttccttaccttcctgttgtccatcattccattcattcgggtgtaattgctgttgttactttccctaggtattttcaggcaggagggtctccagagaatgttatccagctcttatctgaaaactacaccgctgtggcccagactgtgaacctgctggccgagtggctcattcagacaggtgttgagccagtgcaggttcaggaaactgtggaaaatcacttgaagagtttgctgatcaaacattttgacccccgcaaagcagattctatttttactgaagaaggagagaccccagcgtggctggaacagatgattgcacataccacgtggcgggaccttttttataaactggctgaagcccatccagactgtttgatgctgaacttcaccgttaaggtaggaagagttctagagttaaggagaaaagtgtttatgaatgtttatttttggttgttggtctgtttcctttgacagttcatatttgctttttttccataaaggtctttattgttttattttcataagccttacactgagaaagaaaagtgtaaaatttgtatctgtttttgggtcagtgttgactgtgttttaggatttagcagggatacaagaattctcttgtggttggagaggagctttaggcgtgcctgcttgatcttcctcttgcatatgaagaaacgatggagaggtggtcagcccagggcacacacctaggtgatagcagggtgagggcggagtgaaggcctgagacccacgaccagcgcacacttactccacctcaccatgaacactgacaagccagcttcccgtggaggtgcggtcactgcatgcctcccctctgacttcttgttttgtgtcctagcttatttctgacgcagggtaccagggggagatcaccagtgtgtccacagcatgccagcagctagaagtgttctcgagagtgctccggacctctctagctacaattttagatggaggagaagaaaaccttgaaaaaaatctccctgagtttgccaagatggtgtgccacggggagcacacgtacctgtttgcccaggccatgatgtccgtgctggcccaggaggagcaggggggctccgctgtgcgcaggatcgcccaggaagtgcagcgctttgcccaggagaagtgagaggccctgtttctgctcagcccttccttcctagtgctccccacaaaacccttcccatggcccgtgttccacagccaaagctgctagctccttctgttcaacgtagaggtaaacttgcttttggctgggcgtggtggctcacgcctgtaatcccagcactttgggaggccgaggcggatggatcacctaaggtcaggagtttgagaccagcttgaccaacatggagaaaccccatctctggtaaacaaaaatacaaaattagccgggtgtggcggcacatgcctgtaatcccagctacttgggaggctgaggcaggagaatcgcttgaacctgggaggtggaggttgtggtcagccaagattgcaccattgcactccagcctgggcaacaagagcaaaactctgtctcaaaaaaaaaaaaaaaaattaaaaacttccttttatccagcagagctggaaaagttggagttgtttttggtatacttggagagctggctttctaaagtgctgctttgaggactgttgtgtaaagcacttgattcgtcttccctttgctggagttatgggcctgggcttttacactggggttctgaagtaacaaacaaagtcagtccagaaatagttgctcagcaatctcattgttacagtgtcgcaaaatgagctcatattagctttattttctgctaccaatagagtgttcctaagtatttaaagtgtgtgactcctttcttatagagccagcaagctgtattggaatcacttttccagtgttgtaaatgttatttttgtgggtcagtcagtatactcgtgaatgacagaaaaacagatcccaacaatgcaaagtattatatgtgtaaaaaagaacagaaaaaagaagctgccttgttagtaacgggctctatggtttttctcatcaagaggtcatgacgccagtcagatcacactagccttgggcacagctgcctcctaccccagggcctgccaggctctcggggccatgctgtccaaaggagccctgaaccctgctgacatcaccgtcctgttcaagatgttcacaagcatggaccctcctccggttgaacttatccgcgttccagccttcctggacctgttcatgcagtcactctttaaaccaggggctcggatcaaccaggaccacaagcacaaatacatccacatcttggcgtacgcagcaagcgtggttgagacctggaagaaggtaccatcggttctgggaatttgtggattttttaggagacaaatatcctcctctgctttgatattattttggaattttggctgcaagaaatcttgaccctccctagtatcaggcatgtgttttcttgtgtttctgtgtagagaaagcactaaacgtctccagaaaatgtgcgtaatgtctccaatgctctgcaaaccgtaaattgaaatgtgactaaagaaatgaaactgatttccgtaagacatggacaaacactagtctcattgcttttcagtttctgtacactgtgtgactgtgaagtttgacagctgaattgactcccaacttaagtagaaatagggaaagtgctttgcaagaagtggccgacaccagaacaccccgacagcagggatatctgccctgtcaggctcaccagcttgtgtgtgtgttttcagaacaagcgagtgagcatcaataaagatgagctgaagtcaacgtcaaaagctgtcgaaaccgttcacaatttgtgttgcaacgagaacaaaggggcctctgaactagtggcagaattgagcacactttatcagtgtattaggtttccagtggtagcaatgggtgtgctgaagtgggtggattggactgtatcagaaccaaggtactttcagctgcagactgaccatacccctgtccacctggcgttgctggatgagatcagcacctgccaccagctcctgcacccccaggtcctgcagctgcttgttaagctttttgagactgagcactcccagctggacgtgatggagcagcttgagttgaagaagacactgctggacaggatggttcacctgctgagtcgaggttatgtacttcctgttgtcagttacatccgaaagtgtctggagaagctggacactgacatttcactcattcgctattttgtcactgaggtgctggacgtcattgctcctccttatacctctgacttcgtgcaacttttcctccccatcctggagaatgacagcatcgcaggtaccatcaaaacggaaggcgagcatgaccctgtgacggagtttatagctcactgcaaatctaacttcatcatggtgaactaatttagagcatcctccagagctgaagcagaacattccagaacccgttgtggaaaaaccctttcaagaagctgttttaagaggctcgggcagcgtcttgaaaatgggcaccgctgggaggaggtggatgacttctttacaaaggaaaatggtagcagcttcagtgagaaactgcccttacaaacagtcccttctctgctgtcaatccaatactgctcccaaatcctgttttcagtgttcatttccctcaaggcaggcgctgggctcccacgacccctcaggacagatctggccgtcagccgcgggccgctgggaactccactcggggaactcctttccaagctgacctcagttttctcacaagaacccagttagctgatgttttattgtaattgtcttaatttgctaagaacaagtaataagtaaatttttaaaaagcctttctgctgggttggattaaa

SEQ ID NO: 300377 - DNA, 1683 bp, Homo sapiens
  misc_feature (66)..(66): n is a, c, g, or t
ataggctagtacgaggctgggtgtgaatcggccgaggccatccagacgttgatgctgaacttcacngttaagcttatttctgacgcagggtaccagggggagatcaccagtgtgtccacagcatgccagcagctagaagtgttctcgagagtgctccggacctctctagctacaattttagatggaggagaagaaaaccttgaaaaaaatctccctgagtttgccaagatggtgtgccacggggagcacacgtacctgtttgcccaggccatgatgtccgtgctggcccaggaggagcaggggggctccgctgtgcgcaggatcgcccaggaagtgcagcgctttgcccaggagaaaggtcatgacgccagtcagatcacactagccttgggcacagctgcctcctaccccagggcctgccaggctctcggggccatgctgtccaaaggagccctgaaccctgctgacatcaccgtcctgttcaagatgttcacaagcatggaccctcctccggttgaacttatccgcgttccagccttcctggacctgttcatgcagtcactctttaaaccaggggctcggatcaaccaggaccacaagcacaaatacatccacatcttggcgtacgcagcaagcgtggttgagacctggaagaagaacaagcgagtgagcatcaataaagatgagctgaagtcaacgtcaaaagctgtcgaaaccgttcacaatttgtgttgcaacgagaacaaaggggcctctgaactagtggcagaattgagcacactttatcagtgtattaggtttccagtggtagcaatgggtgtgctgaagtgggtggattggactgtatcagaaccaaggtactttcagctgcagactgaccatacccctgtccacctggcgttgctggatgagatcagcacctgccaccagctcctgcacccccaggtcctgcagctgcttgttaagctttttgagactgagcactcccagctggacgtgatggagcagcttgagttgaagaagacactgctggacaggatggttcacctgctgagtcgaggtgctggacgtcattgctcctccttatacctctgacttcgtgcaacttttcctccccatcctggagaatgacagcatcgcaggtaccatcaaaacggaaggcgagcatgaccctgtgacggagtttatagctcactgcaaatctaacttcatcatggtgaactaatttagagcatcctccagagctgaagcagaacattccagaacccgttgtggaaaaaccctttcaagaagctgttttaagaggctcgggcagcgtcttgaaaatgggcaccgctgggaggaggtggatgacttctttacaaaggaaaatggtagcagcttcagtgagaaactgcccttacaaacagtcccttctctgctgtcaatccaatactgctcccaaatcctgttttcagtgttcatttccctcaaggcaggcgctgggctcccacgacccctcaggacagatctggccgtcagccgcgggccgctgggaactccactcggggaactcctttccaagctgacctcagttttctcacaagaacccagttagctgatgttttattgtaattgtcttaatttgctaagaacaagtaataagtaaatttttaaaaagcctttctgctgggttggattaaa

SEQ ID NO: 300378 - DNA, 3367 bp, Homo sapiens
cgagcatgaccctgtgacggagtttatagctcactgcaaatctaaattagttcaccatgatgaagttagatttgcagtgagctataaactccgtcacagggtcatgctcgccttccgttttgatggtacctgcgatgctgtcattctccagaatcatcctcctgctggccgtgccgggcgccatcatggacgaggactactacgggagcgcggccgagtggggcgacgaggctgacggcggccagcaggaggatgattctggagaaggagaggatgatgcggaggttcagcaagaatgcctgcataaattttccacccgggattatatcatggaaccctccatcttcaacactctgaagaggtatgtgagaaaggtgtctgtattgggaggaggctgggggtaatttagagaaagttttgtaatacacccagaaggtgctatgtaaagcaagagtaacgcgaactgaactaaaggcttcaagggggggtcccctctgccactttttttttttttttaaatttttttaagacagagtcttgctctgttgcagtggcacaatcaccgctcactgcagcttcagcctcctggaatcaagcagttctcccacctcagccttgcaagctggccaccacaggcgtctgccatcatgcctggctatttttgtttttgttttttgggagagacagggctccttacgttgccctggctgctcttgaactcctaggctcaagtgattctcccacctctgcctcccaaagtgctgggattacaggtgtgcaccactgcacccagccccctccgctgctttaaaaattttgaaacctgattctcttcctccttccttaccttcctgttgtccatcattccattcattcgggtgtaattgctgttgttactttccctaggtattttcaggcaggagggtctccagagaatgttatccagctcttatctgaaaactacaccgctgtggcccagactgtgaacctgctggccgagtggctcattcagacaggtgttgagccagtgcaggttcaggaaactgtggaaaatcacttgaagagtttgctgatcaaacattttgacccccgcaaagcagattctatttttactgaagaaggagagaccccagcgtggctggaacagatgattgcacataccacgtggcgggaccttttttataaactggctgaagcccatccagactgtttgatgctgaacttcaccgttaaggtaggaagagttctagagttaaggagaaaagtgtttatgaatgtttatttttggttgttggtctgtttcctttgacagttcatatttgctttttttccataaaggtctttattgttttattttcataagccttacactgagaaagaaaagtgtaaaatttgtatctgtttttgggtcagtgttgactgtgttttaggatttagcagggatacaagaattctcttgtggttggagaggagctttaggcgtgcctgcttgatcttcctcttgcatatgaagaaacgatggagaggtggtcagcccagggcacacacctaggtgatagcagggtgagggcggagtgaaggcctgagacccacgaccagcgcacacttactccacctcaccatgaacactgacaagccagcttcccgtggaggtgcggtcactgcatgcctcccctctgacttcttgttttgtgtcctagcttatttctgacgcagggtaccagggggagatcaccagtgtgtccacagcatgccagcagctagaagtgttctcgagagtgctccggacctctctagctacaattttagatggaggagaagaaaaccttgaaaaaaatctccctgagtttgccaagatggtgtgccacggggagcacacgtacctgtttgcccaggccatgatgtccgtgctggcccaggaggagcaggggggctccgctgtgcgcaggatcgcccaggaagtgcagcgctttgcccaggagaaaggtcatgacgccagtcagatcacactagccttgggcacagctgcctcctaccccagggcctgccaggctctcggggccatgctgtccaaaggagccctgaaccctgctgacatcaccgtcctgttcaagatgttcacaagcatggaccctcctccggttgaacttatccgcgttccagccttcctggacctgttcatgcagtcactctttaaaccaggggctcggatcaaccaggaccacaagcacaaatacatccacatcttggcgtacgcagcaagcgtggttgagacctggaagaagaacaagcgagtgagcatcaataaagatgagctgaagtcaacgtcaaaagctgtcgaaaccgttcacaatttgtgttgcaacgagaacaaaggggcctctgaactagtggcagaattgagcacactttatcagtgtattaggtttccagtggtagcaatgggtgtgctgaagtgggtggattggactgtatcagaaccaaggtactttcagctgcagactgaccatacccctgtccacctggcgttgctggatgaggtcctgcagctgcttgttaagctttttgagactgagcactcccagctggacgtgatggagcagcttgagttgaagaagacactgctggacaggatggttcacctgctgagtcgaggttatgtacttcctgttgtcagttacatccgaaagtgtctggagaagctggacactgacatttcactcattcgctattttgtcactgaggtgctggacgtcattgctcctccttatacctctgacttcgtgcaacttttcctccccatcctggagaatgacagcatcgcaggtaccatcaaaacggaaggcgagcatgaccctgtgacggagtttatagctcactgcaaatctaacttcatcatggtgaactaatttagagcatcctccagagctgaagcagaacattccagaacccgttgtggaaaaaccctttcaagaagctgttttaagaggctcgggcagcgtcttgaaaatgggcaccgctgggaggaggtggatgacttctttacaaaggaaaatggtagcagcttcagtgagaaactgcccttacaaacagtcccttctctgctgtcaatccaatactgctcccaaatcctgttttcagtgttcatttccctcaaggcaggcgctgggctcccacgacccctcaggacagatctggccgtcagccgcgggccgctgggaactccactcggggaactcctttccaagctgacctcagttttctcacaagaacccagttagctgatgttttattgtaattgtcttaatttgctaagaacaagtaataagtaaatttttaaaaagcctttctgctgggttggattaaa

SEQ ID NO: 300379 - DNA, 1748 bp, Homo sapiens
  misc_feature (66)..(66): n is a, c, g, or t
ataggctagtacgaggctgggtgtgaatcggccgaggccatccagacgttgatgctgaacttcacngttaagcttatttctgacgcagggtaccagggggagatcaccagtgtgtccacagcatgccagcagctagaagtgttctcgagagtgctccggacctctctagctacaattttagatggaggagaagaaaaccttgaaaaaaatctccctgagtttgccaagatggtgtgccacggggagcacacgtacctgtttgcccaggccatgatgtccgtgctggcccaggaggagcaggggggctccgctgtgcgcaggatcgcccaggaagtgcagcgctttgcccaggagaaaggtcatgacgccagtcagatcacactagccttgggcacagctgcctcctaccccagggcctgccaggctctcggggccatgctgtccaaaggagccctgaaccctgctgacatcaccgtcctgttcaagatgttcacaagcatggaccctcctccggttgaacttatccgcgttccagccttcctggacctgttcatgcagtcactctttaaaccaggggctcggatcaaccaggaccacaagcacaaatacatccacatcttggcgtacgcagcaagcgtggttgagacctggaagaagaacaagcgagtgagcatcaataaagatgagctgaagtcaacgtcaaaagctgtcgaaaccgttcacaatttgtgttgcaacgagaacaaaggggcctctgaactagtggcagaattgagcacactttatcagtgtattaggtttccagtggtagcaatgggtgtgctgaagtgggtggattggactgtatcagaaccaaggtactttcagctgcagactgaccatacccctgtccacctggcgttgctggatgagatcagcacctgccaccagctcctgcacccccaggtcctgcagctgcttgttaagctttttgagactgagcactcccagctggacgtgatggagcagcttgagttgaagaagacactgctggacaggatggttcacctgctgagtcgaggttatgtacttcctgttgtcagttacatccgaaagtgtctggagaagctggacactgacatttcactcattcgctattttgtcactgaggtgctggacgtcattgctcctccttatacctctgacttcgtgcaacttttcctccccatcctggagaatgacagcatcgcaggtaccatcaaaacggaaggcgagcatgaccctgtgacggagtttatagctcactgcaaatctaacttcatcatggtgaactaatttagagcatcctccagagctgaagcagaacattccagaacccgttgtggaaaaaccctttcaagaagctgttttaagaggctcgggcagcgtcttgaaaatgggcaccgctgggaggaggtggatgacttctttacaaaggaaaatggtagcagcttcagtgagaaactgcccttacaaacagtcccttctctgctgtcaatccaatactgctcccaaatcctgttttcagtgttcatttccctcaaggcaggcgctgggctcccacgacccctcaggacagatctggccgtcagccgcgggccgctgggaactccactcggggaactcctttccaagctgacctcagttttctcacaagaacccagttagctgatgttttattgtaattgtcttaatttgctaagaacaagtaataagtaaatttttaaaaa

SEQ ID NO: 300380 - DNA, 2093 bp, Homo sapiens
  misc_feature (66)..(66): n is a, c, g, or t
ataggctagtacgaggctgggtgtgaatcggccgaggccatccagacgttgatgctgaacttcacngttaagcttatttctgacgcagggtaccagggggagatcaccagtgtgtccacagcatgccagcagctagaagtgttctcgagagtgctccggacctctctagctacaattttagatggaggagaagaaaaccttgaaaaaaatctccctgagtttgccaagatggtgtgccacggggagcacacgtacctgtttgcccaggccatgatgtccgtgctggcccaggaggagcaggggggctccgctgtgcgcaggatcgcccaggaagtgcagcgctttgcccaggagaaaggtcatgacgccagtcagatcacactagccttgggcacagctgcctcctaccccagggcctgccaggctctcggggccatgctgtccaaaggagccctgaaccctgctgacatcaccgtcctgttcaagatgttcacaagcatggaccctcctccggttgaacttatccgcgttccagccttcctggacctgttcatgcagtcactctttaaaccaggggctcggatcaaccaggaccacaagcacaaatacatccacatcttggcgtacgcagcaagcgtggttgagacctggaagaagaacaagcgagtgagcatcaataaagatgagctgaagtcaacgtcaaaagctgtcgaaaccgttcacaatttgtgttgcaacgagaacaaaggggcctctgaactagtggcagaattgagcacactttatcagtgtattaggtttccagtggtagcaatgggtgtgctgaagtgggtggattggactgtatcagaaccaaggtactttcagctgcagactgaccatacccctgtccacctggcgttgctggatgagatcagcacctgccaccagctcctgcacccccaggtcctgcagctgcttgttaagctttttgagactgagcactcccagctggacgtgatggagcagcttgagttgaagaagacactgctggacaggatggttcacctgctgagtcgaggttatgtacttcctgttgtcagttacatccgaaagtgtctggagaagctggacactgacatttcactcattcgctattttgtcactgaggtcagcaatgcaccgttggtttcatgtttcatactgtttacactagcactgccctttttggcttaatttagttcattttgtacctaactgagaactgtgctttctgatgtagtgatgacaatgacagatactcgtttaccaaaaagcaccttctgcctgcagcagctgtatgacacactttacctccattaccaccctgggcatctgaatgttggagatgggtggtgtcaccggccggtgggggtggggagggattttttccaaactgatggccatttcacccggatgtcggtggatgccccgcactagtgtgcggaagaagtcaccctgtgctcccccacgcaggtgctggacgtcattgctcctccttatacctctgacttcgtgcaacttttcctccccatcctggagaatgacagcatcgcaggtaccatcaaaacggaaggcgagcatgaccctgtgacggagtttatagctcactgcaaatctaacttcatcatggtgaactaatttagagcatcctccagagctgaagcagaacattccagaacccgttgtggaaaaaccctttcaagaagctgttttaagaggctcgggcagcgtcttgaaaatgggcaccgctgggaggaggtggatgacttctttacaaaggaaaatggtagcagcttcagtgagaaactgcccttacaaacagtcccttctctgctgtcaatccaatactgctcccaaatcctgttttcagtgttcatttccctcaaggcaggcgctgggctcccacgacccctcaggacagatctggccgtcagccgcgggccgctgggaactccactcggggaactcctttccaagctgacctcagttttctcacaagaacccagttagctgatgttttattgtaattgtcttaatttgctaagaacaagtaataagtaaatttttaaaaa

SEQ ID NO: 300381 - DNA, 2038 bp, Homo sapiens
  misc_feature (66)..(66): n is a, c, g, or t
ataggctagtacgaggctgggtgtgaatcggccgaggccatccagacgttgatgctgaacttcacngttaagcttatttctgacgcagggtaccagggggagatcaccagtgtgtccacagcatgccagcagctagaagtgttctcgagagtgctccggacctctctagctacaattttagatggaggagaagaaaaccttgaaaaaaatctccctgagtttgccaagatggtgtgccacggggagcacacgtacctgtttgcccaggccatgatgtccgtgctggcccaggaggagcaggggggctccgctgtgcgcaggatcgcccaggaagtgcagcgctttgcccaggagaaaggtcatgacgccagtcagatcacactagccttgggcacagctgcctcctaccccagggcctgccaggctctcggggccatgctgtccaaaggagccctgaaccctgctgacatcaccgtcctgttcaagatgttcacaagcatggaccctcctccggttgaacttatccgcgttccagccttcctggacctgttcatgcagtcactctttaaaccaggggctcggatcaaccaggaccacaagcacaaatacatccacatcttggcgtacgcagcaagcgtggttgagacctggaagaagaacaagcgagtgagcatcaataaagatgagctgaagtcaacgtcaaaagctgtcgaaaccgttcacaatttgtgttgcaacgagaacaaaggggcctctgaactagtggcagaattgagcacactttatcagtgtattaggtttccagtggtagcaatgggtgtgctgaagtgggtggattggactgtatcagaaccaaggtactttcagctgcagactgaccatacccctgtccacctggcgttgctggatgagatcagcacctgccaccagctcctgcacccccaggtcctgcagctgcttgttaagctttttgagactgagcactcccagctggacgtgatggagcagcttgagttgaagaagacactgctggacaggatggttcacctgctgagtcgaggttatgtacttcctgttgtcagttacatccgaaagtgtctggagaagctggacactgacatttcactcattcgctattttgtcactgaggtgctggacgtcattgctcctccttatacctctgacttcgtgcaacttttcctccccatcctggagaatgacagcatcgcaggtaccatcaaaacggaaggcgagcatgaccctgtgacggagtttatagctcactgcaaatctaacttcatcatggtgaactaatttagagcatcctccagagctgaagcagaacattccagaacccgttgtggaaaaaccctttcaagaagctgttttaagaggctcgggcagcgtcttgaaaatgggcaccgctgggaggaggtggatgacttctttacaaaggaaaatggtagcagcttcagtgagaaactgcccttacaaacagtcccttctctgctgtcaatccaatactgctcccaaatcctgttttcagtgttcatttccctcaaggcaggcgctgggctcccacgacccctcaggacagatctggccgtcagccgcgggccgctgggaactccactcggggaactcctttccaagctgacctcagttttctcacaagaacccagttagctgatgttttattgtaattgtcttaatttgctaagaacaagtaataagtaaatttttaaaaaaaaaaaaaaaaaaaaaaaaaaaaaaaaaaaaaaaaaaaaaaaaaaaaaaaaaaaaaaaaaaagagaagaaaacagagaaaacagaaaaaaagaagacaacaaaacgaaggaagaaagacaaaagaagacagaagaacgaaccgcacagaaacgagagaacagcagagaagcgagagatggacgcgcacggcggggcgggggtcggcaagcgacgaggtgcgaggccgcggcggaggcagcgggggaggacgtgggcgcccgccgggggagagcggtcgaggaagagccag

SEQ ID NO: 300382 - DNA, 1772 bp, Homo sapiens
  misc_feature (66)..(66): n is a, c, g, or t
  misc_feature (1605)..(1605): n is a, c, g, or t
  misc_feature (1616)..(1616): n is a, c, g, or t
  misc_feature (1620)..(1620): n is a, c, g, or t
  misc_feature (1666)..(1666): n is a, c, g, or t
  misc_feature (1746)..(1746): n is a, c, g, or t
ataggctagtacgaggctgggtgtgaatcggccgaggccatccagacgttgatgctgaacttcacngttaagcttatttctgacgcagggtaccagggggagatcaccagtgtgtccacagcatgccagcagctagaagtgttctcgagagtgctccggacctctctagctacaattttagatggaggagaagaaaaccttgaaaaaaatctccctgagtttgccaagatggtgtgccacggggagcacacgtacctgtttgcccaggccatgatgtccgtgctggcccaggaggagcaggggggctccgctgtgcgcaggatcgcccaggaagtgcagcgctttgcccaggagaaaggtcatgacgccagtcagatcacactagccttgggcacagctgcctcctaccccagggcctgccaggctctcggggccatgctgtccaaaggagccctgaaccctgctgacatcaccgtcctgttcaagatgttcacaagcatggaccctcctccggttgaacttatccgcgttccagccttcctggacctgttcatgcagtcactctttaaaccaggggctcggatcaaccaggaccacaagcacaaatacatccacatcttggcgtacgcagcaagcgtggttgagacctggaagaagaacaagcgagtgagcatcaataaagatgagctgaagtcaacgtcaaaagctgtcgaaaccgttcacaatttgtgttgcaacgagaacaaaggggcctctgaactagtggcagaattgagcacactttatcagtgtattaggtttccagtggtagcaatgggtgtgctgaagtgggtggattggactgtatcagaaccaaggtactttcagctgcagactgaccatacccctgtccacctggcgttgctggatgagatcagcacctgccaccagctcctgcacccccaggtcctgcagctgcttgttaagctttttgagactgagcactcccagctggacgtgatggagcagcttgagttgaagaagacactgctggacaggatggttcacctgctgagtcgaggttatgtacttcctgttgtcagttacatccgaaagtgtctggagaagctggacactgacatttcactcattcgctattttgtcactgaggtgctggacgtcattgctcctccttatacctctgacttcgtgcaacttttcctccccatcctggagaatgacagcatcgcaggtaccatcaaaacggaaggcgagcatgaccctgtgacggagtttatagctcactgcaaatctaacttcatcatggtgaactaatttagagcatcctccagagctgaagcagaacattccagaacccgttgtggaaaaaccctttcaagaagctgttttaagaggctcgggcagcgtcttgaaaatgggcaccgctgggaggaggtggatgacttctttacaaaggaaaatggtagcagcttcagtgagaaactgcccttacaaacagtcccttctctgctgtcaatccaatactgctcccaaatcctgttttcagtgttcatttccctcaaggcaggcgctgggctcccacgacccctcaggacagatctgacnttcagccccgnacantcgaaaattccatcacacccccaccacccaacacacacctcaacancaccatcgcctccacaatatcccacaaccgccaccattccataccccactctcttccataaaaaccccacacaccctccntcaaccccatcccacccccccccaca

SEQ ID NO: 300383 - DNA, 1586 bp, Homo sapiens
  misc_feature (66)..(66): n is a, c, g, or t
ataggctagtacgaggctgggtgtgaatcggccgaggccatccagacgttgatgctgaacttcacngttaagcttatttctgacgcagggtaccagggggagatcaccagtgtgtccacagcatgccagcagctagaagtgttctcgagagtgctccggacctctctagctacaattttagatggaggagaagaaaaccttgaaaaaaatctccctgagtttgccaagatggtgtgccacggggagcacacgtacctgtttgcccaggccatgatgtccgtgctggcccaggaggagcaggggggctccgctgtgcgcaggatcgcccaggaagtgcagcgctttgcccaggagaaaggtcatgacgccagtcagatcacactagccttgggcacagctgcctcctaccccagggcctgccaggctctcggggccatgctgtccaaaggagccctgaaccctgctgacatcaccgtcctgttcaagatgttcacaagcatggaccctcctccggttgaacttatccgcgttccagccttcctggacctgttcatgcagtcactctttaaaccaggggctcggatcaaccaggaccacaagcacaaatacatccacatcttggcgtacgcagcaagcgtggttgagacctggaagaagaacaagcgagtgagcatcaataaagatgagctgaagtcaacgtcaaaagctgtcgaaaccgttcacaatttgtgttgcaacgagaacaaaggggcctctgaactagtggcagaattgagcacactttatcagtgtattaggtttccagtggtagcaatgggtgtgctgaagtgggtggattggactgtatcagaaccaaggtactttcagctgcagactgaccatacccctgtccacctggcgttgctggatgagatcagcacctgccaccagctcctgcacccccaggtcctgcagctgcttgttaagctttttgagactgagcactcccagctggacgtgatggagcagcttgagttgaagaagacactgctggacaggatggttcacctgctgagtcgaggttatgtacttcctgttgtcagttacatccgaaagtgtctggagaagctggacactgacatttcactcattcgctattttgtcactgaggtgctggacgtcattgctcctccttatacctctgacttcgtgcaacttttcctccccatcctggagaatgacagcatcgcaggtaccatcaaaacggaaggcgagcatgaccctgtgacggagtttatagctcactgcaaatctaacttcatcatggtgaactaatttagagcatcctccagagctgaagcagaacattccagaacccgttgtggaaaaaccctttcaagaagctgttttaagaggctcgggcagcgtcttgaaaatgggcaccgctgggaggaggtggatgacttctttacaaaggaaaatggtagcagcttcagtgagaaactgcccttacaaacagtcccttctctgctgtcaatccaatactgctcccaaatcctgttttcagtgttcacaatgaaataaagttattttctcattcccaaaaa

SEQ ID NO: 300384 - DNA, 1664 bp, Homo sapiens
  misc_feature (66)..(66): n is a, c, g, or t
ataggctagtacgaggctgggtgtgaatcggccgaggccatccagacgttgatgctgaacttcacngttaagcttatttctgacgcagggtaccagggggagatcaccagtgtgtccacagcatgccagcagctagaagtgttctcgagagtgctccggacctctctagctacaattttagatggaggagaagaaaaccttgaaaaaaatctccctgagtttgccaagatggtgtgccacggggagcacacgtacctgtttgcccaggccatgatgtccgtgctggcccaggaggagcaggggggctccgctgtgcgcaggatcgcccaggaagtgcagcgctttgcccaggagaaaggtcatgacgccagtcagatcacactagccttgggcacagctgcctcctaccccagggcctgccaggctctcggggccatgctgtccaaaggagccctgaaccctgctgacatcaccgtcctgttcaagatgttcacaagcatggaccctcctccggttgaacttatccgcgttccagccttcctggacctgttcatgcagtcactctttaaaccaggggctcggatcaaccaggaccacaagcacaaatacatccacatcttggcgtacgcagcaagcgtggttgagacctggaagaagaacaagcgagtgagcatcaataaagatgagctgaagtcaacgtcaaaagctgtcgaaaccgttcacaatttgtgttgcaacgagaacaaaggggcctctgaactagtggcagaattgagcacactttatcagtgtattaggtttccagtggtagcaatgggtgtgctgaagtgggtggattggactgtatcagaaccaaggtactttcagctgcagactgaccatacccctgtccacctggcgttgctggatgagatcagcacctgccaccagctcctgcacccccaggtcctgcagctgcttgttaagctttttgagactgagcactcccagctggacgtgatggagcagcttgagttgaagaagacactgctggacaggatggttcacctgctgagtcgaggttatgtacttcctgttgtcagttacatccgaaagtgtctggagaagctggacactgacatttcactcattcgctattttgtcactgaggtgctggacgtcattgctcctccttatacctctgacttcgtgcaacttttcctccccatcctggagaatgacagcatcgcaggtaccatcaaaacggaaggcgagcatgaccctgtgacggagtttatagctcactgcaaatctaacttcatcatggtgaactaatttagagcatcctccagagctgaagcagaacattccagaacccgttgtggaaaaaccctttcaagaagctgttttaagaggctcgggcagcgtcttgaaaatgggcaccgctgggaggaggtggatgacttctttacaaaggaaaatggtagcatttccctcaaggcaggcgctgggctcccacgacccctcaggacagatctggccgtcagccgcgggccgctgggaactccactcggggaactcctttccaagctgacctcagttttctcacaagaacccagttagctgatgttttattgtaattgtcttaatttgctaagaacaagtaataagtaaatttttaaaaa

SEQ ID NO: 300385 - DNA, 2009 bp, Homo sapiens
  misc_feature (66)..(66): n is a, c, g, or t
ataggctagtacgaggctgggtgtgaatcggccgaggccatccagacgttgatgctgaacttcacngttaagcttatttctgacgcagggtaccagggggagatcaccagtgtgtccacagcatgccagcagctagaagtgttctcgagagtgctccggacctctctagctacaattttagatggaggagaagaaaaccttgaaaaaaatctccctgagtttgccaagatggtgtgccacggggagcacacgtacctgtttgcccaggccatgatgtccgtgctggcccaggaggagcaggggggctccgctgtgcgcaggatcgcccaggaagtgcagcgctttgcccaggagaaaggtcatgacgccagtcagatcacactagccttgggcacagctgcctcctaccccagggcctgccaggctctcggggccatgctgtccaaaggagccctgaaccctgctgacatcaccgtcctgttcaagatgttcacaagcatggaccctcctccggttgaacttatccgcgttccagccttcctggacctgttcatgcagtcactctttaaaccaggggctcggatcaaccaggaccacaagcacaaatacatccacatcttggcgtacgcagcaagcgtggttgagacctggaagaagaacaagcgagtgagcatcaataaagatgagctgaagtcaacgtcaaaagctgtcgaaaccgttcacaatttgtgttgcaacgagaacaaaggggcctctgaactagtggcagaattgagcacactttatcagtgtattaggtttccagtggtagcaatgggtgtgctgaagtgggtggattggactgtatcagaaccaaggtactttcagctgcagactgaccatacccctgtccacctggcgttgctggatgagatcagcacctgccaccagctcctgcacccccaggtcctgcagctgcttgttaagctttttgagactgagcactcccagctggacgtgatggagcagcttgagttgaagaagacactgctggacaggatggttcacctgctgagtcgaggttatgtacttcctgttgtcagttacatccgaaagtgtctggagaagctggacactgacatttcactcattcgctattttgtcactgaggtcagcaatgcaccgttggtttcatgtttcatactgtttacactagcactgccctttttggcttaatttagttcattttgtacctaactgagaactgtgctttctgatgtagtgatgacaatgacagatactcgtttaccaaaaagcaccttctgcctgcagcagctgtatgacacactttacctccattaccaccctgggcatctgaatgttggagatgggtggtgtcaccggccggtgggggtggggagggattttttccaaactgatggccatttcacccggatgtcggtggatgccccgcactagtgtgcggaagaagtcaccctgtgctcccccacgcaggtgctggacgtcattgctcctccttatacctctgacttcgtgcaacttttcctccccatcctggagaatgacagcatcgcaggtaccatcaaaacggaaggcgagcatgaccctgtgacggagtttatagctcactgcaaatctaacttcatcatggtgaactaatttagagcatcctccagagctgaagcagaacattccagaacccgttgtggaaaaaccctttcaagaagctgttttaagaggctcgggcagcgtcttgaaaatgggcaccgctgggaggaggtggatgacttctttacaaaggaaaatggtagcatttccctcaaggcaggcgctgggctcccacgacccctcaggacagatctggccgtcagccgcgggccgctgggaactccactcggggaactcctttccaagctgacctcagttttctcacaagaacccagttagctgatgttttattgtaattgtcttaatttgctaagaacaagtaataagtaaatttttaaaaa

SEQ ID NO: 300386 - DNA, 1931 bp, Homo sapiens
  misc_feature (66)..(66): n is a, c, g, or t
ataggctagtacgaggctgggtgtgaatcggccgaggccatccagacgttgatgctgaacttcacngttaagcttatttctgacgcagggtaccagggggagatcaccagtgtgtccacagcatgccagcagctagaagtgttctcgagagtgctccggacctctctagctacaattttagatggaggagaagaaaaccttgaaaaaaatctccctgagtttgccaagatggtgtgccacggggagcacacgtacctgtttgcccaggccatgatgtccgtgctggcccaggaggagcaggggggctccgctgtgcgcaggatcgcccaggaagtgcagcgctttgcccaggagaaaggtcatgacgccagtcagatcacactagccttgggcacagctgcctcctaccccagggcctgccaggctctcggggccatgctgtccaaaggagccctgaaccctgctgacatcaccgtcctgttcaagatgttcacaagcatggaccctcctccggttgaacttatccgcgttccagccttcctggacctgttcatgcagtcactctttaaaccaggggctcggatcaaccaggaccacaagcacaaatacatccacatcttggcgtacgcagcaagcgtggttgagacctggaagaagaacaagcgagtgagcatcaataaagatgagctgaagtcaacgtcaaaagctgtcgaaaccgttcacaatttgtgttgcaacgagaacaaaggggcctctgaactagtggcagaattgagcacactttatcagtgtattaggtttccagtggtagcaatgggtgtgctgaagtgggtggattggactgtatcagaaccaaggtactttcagctgcagactgaccatacccctgtccacctggcgttgctggatgagatcagcacctgccaccagctcctgcacccccaggtcctgcagctgcttgttaagctttttgagactgagcactcccagctggacgtgatggagcagcttgagttgaagaagacactgctggacaggatggttcacctgctgagtcgaggttatgtacttcctgttgtcagttacatccgaaagtgtctggagaagctggacactgacatttcactcattcgctattttgtcactgaggtcagcaatgcaccgttggtttcatgtttcatactgtttacactagcactgccctttttggcttaatttagttcattttgtacctaactgagaactgtgctttctgatgtagtgatgacaatgacagatactcgtttaccaaaaagcaccttctgcctgcagcagctgtatgacacactttacctccattaccaccctgggcatctgaatgttggagatgggtggtgtcaccggccggtgggggtggggagggattttttccaaactgatggccatttcacccggatgtcggtggatgccccgcactagtgtgcggaagaagtcaccctgtgctcccccacgcaggtgctggacgtcattgctcctccttatacctctgacttcgtgcaacttttcctccccatcctggagaatgacagcatcgcaggtaccatcaaaacggaaggcgagcatgaccctgtgacggagtttatagctcactgcaaatctaacttcatcatggtgaactaatttagagcatcctccagagctgaagcagaacattccagaacccgttgtggaaaaaccctttcaagaagctgttttaagaggctcgggcagcgtcttgaaaatgggcaccgctgggaggaggtggatgacttctttacaaaggaaaatggtagcagcttcagtgagaaactgcccttacaaacagtcccttctctgctgtcaatccaatactgctcccaaatcctgttttcagtgttcacaatgaaataaagttattttctcattcccaaaaa

SEQ ID NO: 300387 - DNA, 1611 bp, Homo sapiens
  misc_feature (66)..(66): n is a, c, g, or t
ataggctagtacgaggctgggtgtgaatcggccgaggccatccagacgttgatgctgaacttcacngttaagcttatttctgacgcagggtaccagggggagatcaccagtgtgtccacagcatgccagcagctagaagtgttctcgagagtgctccggacctctctagctacaattttagatggaggagaagaaaaccttgaaaaaaatctccctgagtttgccaagatggtgtgccacggggagcacacgtacctgtttgcccaggccatgatgtccgtgctggcccaggaggagcaggggggctccgctgtgcgcaggatcgcccaggaagtgcagcgctttgcccaggagaaaggtcatgacgccagtcagatcacactagccttgggcacagctgcctcctaccccagggcctgccaggctctcggggccatgctgtccaaaggagccctgaaccctgctgacatcaccgtcctgttcaagatgttcacaagcatggaccctcctccggttgaacttatccgcgttccagccttcctggacctgttcatgcagtcactctttaaaccaggggctcggatcaaccaggaccacaagcacaaatacatccacatcttggcgtacgcagcaagcgtggttgagacctggaagaagaacaagcgagtgagcatcaataaagatgagctgaagtcaacgtcaaaagctgtcgaaaccgttcacaatttgtgttgcaacgagaacaaaggggcctctgaactagtggcagaattgagcacactttatcagtgtattaggtttccagtggtagcaatgggtgtgctgaagtgggtggattggactgtatcagaaccaaggtactttcagctgcagactgaccatacccctgtccacctggcgttgctggatgagatcagcacctgccaccagctcctgcacccccaggtcctgcagctgcttgttaagctttttgagactgagcactcccagctggacgtgatggagcagcttgagttgaagaagacactgctggacaggatggttcacctgctgagtcgaggtgctggacgtcattgctcctccttatacctctgacttcgtgcaacttttcctccccatcctggagaatgacagcatcgcagctcactgcaaatctaacttcatcatggtgaactaatttagagcatcctccagagctgaagcagaacattccagaacccgttgtggaaaaaccctttcaagaagctgttttaagaggctcgggcagcgtcttgaaaatgggcaccgctgggaggaggtggatgacttctttacaaaggaaaatggtagcagcttcagtgagaaactgcccttacaaacagtcccttctctgctgtcaatccaatactgctcccaaatcctgttttcagtgttcatttccctcaaggcaggcgctgggctcccacgacccctcaggacagatctggccgtcagccgcgggccgctgggaactccactcggggaactcctttccaagctgacctcagttttctcacaagaacccagttagctgatgttttattgtaattgtcttaatttgctaagaacaagtaataagtaaatttttaaaaa

SEQ ID NO: 300388 - DNA, 1950 bp, Homo sapiens
  misc_feature (66)..(66): n is a, c, g, or t
ataggctagtacgaggctgggtgtgaatcggccgaggccatccagacgttgatgctgaacttcacngttaagcttatttctgacgcagggtaccagggggagatcaccagtgtgtccacagcatgccagcagctagaagtgttctcgagagtgctccggacctctctagctacaattttagatggaggagaagaaaaccttgaaaaaaatctccctgagtttgccaagatggtgtgccacggggagcacacgtacctgtttgcccaggccatgatgtccgtgctggcccaggaggagcaggggggctccgctgtgcgcaggatcgcccaggaagtgcagcgctttgcccaggagaaaggtcatgacgccagtcagatcacactagccttgggcacagctgcctcctaccccagggcctgccaggctctcggggccatgctgtccaaaggagccctgaaccctgctgacatcaccgtcctgttcaagatgttcacaagcatggaccctcctccggttgaacttatccgcgttccagccttcctggacctgttcatgcagtcactctttaaaccaggggctcggatcaaccaggaccacaagcacaaatacatccacatcttggcgtacgcagcaagcgtggttgagacctggaagaagaacaagcgagtgagcatcaataaagatgagctgaagtcaacgtcaaaagctgtcgaaaccgttcacaatttgtgttgcaacgagaacaaaggggcctctgaactagtggcagaattgagcacactttatcagtgtattaggtttccagtggtagcaatgggtgtgctgaagtgggtggattggactgtatcagaaccaaggtactttcagctgcagactgaccatacccctgtccacctggcgttgctggatgagatcagcacctgccaccagctcctgcacccccaggtcctgcagctgcttgttaagctttttgagactgagcactcccagctggacgtgatggagcagcttgagttgaagaagacactgctggacaggatggttcacctgctgagtcgaggttatgtacttcctgttgtcagttacatccgaaagtgtctggagaagctggacactgacatttcactcattcgctattttgtcactgaggtcagcaatgcaccgttggtttcatgtttcatactgtttacactagcactgccctttttggcttaatttagttcattttgtacctaactgagaactgtgctttctgatgtagtgatgacaatgacagatactcgtttaccaaaaagcaccttctgcctgcagcagctgtatgacacactttacctccattaccaccctgggcatctgaatgttggagatgggtggtgtcaccggccggtgggggtggggagggattttttccaaactgatggccatttcacccggatgtcggtggatgccccgcactagtgtgcggaagaagtcaccctgtgctcccccacgcaggtgctggacgtcattgctcctccttatacctctgacttcgtgcaacttttcctccccatcctggagaatgacagcatcgcaggtaccatcaaaacggaaggcgagcatgaccctgtgacggagtttataggtgaggccgactgcctagccctttactacaatagaaaatgtcagctgggcgcggtggctcatgcctgtaatcccagcactttgggaggccaaggtgggtggatcacctgaggttgggagttcaagaccagcccgaccaacatggagaaaccccatctctactaaaaatacagcattagctgggcatggtggcacgtgcctgtaatcctagctactcgggaggctgaggcaggagaatcgcttaacctgggaggcagaggttgcagtgagccaagatcgcgccattgcactctatcctgggcaacaagagcaaaactgcatctcaaa

SEQ ID NO: 300389 - DNA, 1313 bp, Homo sapiens
  misc_feature (66)..(66): n is a, c, g, or t
ataggctagtacgaggctgggtgtgaatcggccgaggccatccagacgttgatgctgaacttcacngttaagcttatttctgacgcagggtaccagggggagatcaccagtgtgtccacagcatgccagcagctagaagtgttctcgagagtgctccggacctctctagctacaattttagatggaggagaagaaaaccttgaaaaaaatctccctgagtttgccaagatggtgtgccacggggagcacacgtacctgtttgcccaggccatgatgtccgtgctggcccaggaggagcaggggggctccgctgtgcgcaggatcgcccaggaagtgcagcgctttgcccaggagaaaggtcatgacgccagtcagatcacactagccttgggcacagctgcctcctaccccagggcctgccaggctctcggggccatgctgtccaaaggagccctgaaccctgctgacatcaccgtcctgttcaagatgttcacaagcatggaccctcctccggttgaacttatccgcgttccagccttcctggacctgttcatgcagtcactctttaaaccaggggctcggatcaaccaggaccacaagcacaaatacatccacatcttggcgtacgcagcaagcgtggttgagacctggaagaagaacaagcgagtgagcatcaataaagatgagctgaagtcaacgtcaaaagctgtcgaaaccgttcacaatttgtgttgcaacgagaacaaaggggcctctgaactagtggcagaattgagcacactttatcagtgtattaggtttccagtggtagcaatgggtgtgctgaagtgggtggattggactgtatcagaaccaaggtactttcagctgcagactgaccatacccctgtccacctggcgttgctggatgagatcagcacctgccaccagctcctgcacccccaggtcctgcagctgcttgttaagctttttgagactgagcactcccagctggacgtgatggagcagcttgagttgaagaagacactgctggacaggatggttcacctgctgagtcgaggttatgtacttcctgttgtcagttacatccgaaagtgtctggagaagctggacactgacatttcactcattcgctattttgtcactgaggtcagcaatgcaccgttggccgtcagccgcgggccgctgggaactccactcggggaactcctttccaagctgacctcagttttctcacaagaacccagttagctgatgttttattgtaattgtcttaatttgctaagaacaagtaataagtaaatttttaaaaa

SEQ ID NO: 300390 - DNA, 1165 bp, Homo sapiens
  misc_feature (66)..(66): n is a, c, g, or t
ataggctagtacgaggctgggtgtgaatcggccgaggccatccagacgttgatgctgaacttcacngttaagcttatttctgacgcagggtaccagggggagatcaccagtgtgtccacagcatgccagcagctagaagtgttctcgagagtgctccggacctctctagctacaattttagatggaggagaagaaaaccttgaaaaaaatctccctgagtttgccaagatggtgtgccacggggagcacacgtacctgtttgcccaggccatgatgtccgtgctggcccaggaggagcaggggggctccgctgtgcgcaggatcgcccaggaagtgcagcgctttgcccaggagaaaggtcatgacgccagtcagatcacactagccttgggcacagctgcctcctaccccagggcctgccaggctctcggggccatgctgtccaaaggagccctgaaccctgctgacatcaccgtcctgttcaagatgttcacaagcatggaccctcctccggttgaacttatccgcgttccagccttcctggacctgttcatgcagtcactctttaaaccaggggctcggatcaaccaggaccacaagcacaaatacatccacatcttggcgtacgcagcaagcgtggttgagacctggaagaagaacaagcgagtgagcatcaataaagatgagctgaagtcaacgtcaaaagctgtcgaaaccgttcacaatttgtgttgcaacgagaacaaaggggcctctgaactagtggcagaattgagcacactttatcagtgtattaggtttccagtggtagcaatgggtgtgctgaagtgggtggattggactgtatcagaaccaaggtactttcagctgcagactgaccatacccctgtccacctggcgttgctggatgagatcagcacctgccaccagctcctgcacccccaggtcctgcagctgcttgttaagctttttgagactgagcactcccagctggacgtgatggagcagcttgagttgaagaagacactgctggacaggatggttcacctgctgagtcgaggctggacgtcattgctcctccttatacctctgactgcggctcgcgccggggatctcaagagtcggagtgcgtccataagtcccctattaagaaggctgctcccct

SEQ ID NO: 300391 - DNA, 2414 bp, Homo sapiens
cgagcatgaccctgtgacggagtttatagctcactgcaaatctaaattagttcaccatgatgaagttagatttgcagtgagctataaactccgtcacagggtcatgctcgccttccgttttgatggtacctgcgatgctgtcattctccagaatcatcctcctgctggccgtgccgggcgccatcatggacgaggactactacgggagcgcggccgagtggggcgacgaggctgacggcggccagcaggaggatgattctggagaaggagaggatgatgcggaggttcagcaagaatgcctgcataaattttccacccgggattatatcatggaaccctccatcttcaacactctgaagaggtatgtgagaaaggtgtctgtattgggaggaggctgggggtaatttagagaaagttttgtaatacacccagaaggtgctatgtaaagcaagagtaacgcgaactgaactaaaggcttcaagggggggtcccctctgccactttttttttttttttaaatttttttaagacagagtcttgctctgttgcagtggcacaatcaccgctcactgcagcttcagcctcctggaatcaagcagttctcccacctcagccttgcaagctggccaccacaggcgtctgccatcatgcctggctatttttgtttttgttttttgggagagacagggctccttacgttgccctggctgctcttgaactcctaggctcaagtgattctcccacctctgcctcccaaagtgctgggattacaggtgtgcaccactgcacccagccccctccgctgctttaaaaattttgaaacctgattctcttcctccttccttaccttcctgttgtccatcattccattcattcgggtgtaattgctgttgttactttccctaggtattttcaggcaggagggtctccagagaatgttatccagctcttatctgaaaactacaccgctgtggcccagactgtgaacctgctggccgagtggctcattcagacaggtgttgagccagtgcaggttcaggaaactgtggaaaatcacttgaagagtttgctgatcaaacattttgacccccgcaaagcagattctatttttactgaagaaggagagaccccagcgtggctggaacagatgattgcacataccacgtggcgggaccttttttataaactggctgaagcccatccagactgtttgatgctgaacttcaccgttaaggtaggaagagttctagagttaaggagaaaagtgtttatgaatgtttatttttggttgttggtctgtttcctttgacagttcatatttgctttttttccataaaggtctttattgttttattttcataagccttacactgagaaagaaaagtgtaaaatttgtatctgtttttgggtcagtgttgactgtgttttaggatttagcagggatacaagaattctcttgtggttggagaggagctttaggcgtgcctgcttgatcttcctcttgcatatgaagaaacgatggagaggtggtcagcccagggcacacacctaggtgatagcagggtgagggcggagtgaaggcctgagacccacgaccagcgcacacttactccacctcaccatgaacactgacaagccagcttcccgtggaggtgcggtcactgcatgcctcccctctgacttcttgttttgtgtcctagcttatttctgacgcagggtaccagggggagatcaccagtgtgtccacagcatgccagcagctagaagtgttctcgagagtgctccggacctctctagctacaattttagatggaggagaagaaaaccttgaaaaaaatctccctgagtttgccaagatggtgtgccacggggagcacacgtacctgtttgcccaggccatgatgtccgtgctggcccaggaggagcaggggggctccgctgtgcgcaggatcgcccaggaagtgcagcgctttgcccaggagaaaggtcatgacgccagtcagatcacactagccttgggcacagctgcctcctaccccagggcctgccaggctctcggggccatgctgtccaaaggagccctgaaccctgctgacatcaccgtcctgttcaagatgttcacaagcatggaccctcctccggttgaacttatgacggggagagagacaggggaatggacagttggtggagcagtcagaacacacgcacatttattaattatgttcgctattttatatgagcatggttcatggcacccctaaacaatgacaatagtaccatcaaagatcactgattacagatcaccataatgaatataataataatgaaaagtttgaaatactgtgagaattgccaaagtgtgacacagagacataaagtgagcacaagctgttggagaaatacgccgcgacttg

SEQ ID NO: 300392 - DNA, 899 bp, Homo sapiens
agccagtggtttctgtgagtcttccttgccagcagaagatggctgtgccacccacgtatgccgatcttggcaaatctgccagggatgtcttcaccaagggctatggatttggcttaataaagcttgatttgaaaacaaaatctgagaatggattggaatttacaagctcaggctcagccaacactgagaccaccaaagtgacgggcagtctggaaaccaagtacagatggactgagtacggcctgacgtttacagagaaatggaataccgacaatacactaggcaccgagattactgtggaagatcagcttgcacgtggactgaagctgaccttcgattcatccttctcacctaacactgggaaaaaaaatgctaaaatcaagacagggtacaagcgggagcacattaacctgggctgcgacatggatttcgacattgctgggccttccatccggggtgctctggtgctaggttacgagggctggctggccggctaccagatgaattttgagactgcaaaatcccgagtgacccagagcaactttgcagttggctacaagactgatgaattccagcttcacactaatgtgaatgacgggacagagtttggcggctccatttaccagaaagtgaacaagaagttggagaccgctgtcaatcttgcctggacagcaggaaacagtaacacgcgcttcggaatagcagccaagtatcagattgaccctgacgcctgcttctcggctaaagtgaacaactccagctgattaggtttaaggattccctccagaactctaacagcccggtatttaactggacactgtcgctcctccggatgggcaagaacgctcattgctggtggcccaaaccttgtttaagacgggacattcagccttattgat

SEQ ID NO: 300393 - DNA, 760 bp, Homo sapiens
tgctgattctagagttcccttcggatacttggacagcaagtattaaactgacactgtcagctcttctggatggcaagaacgtcaatgctggtggccacaagcttggtctaggactggaatttcaagcataaatgaatactgtacaattgtttaattttaaactattttgcagcatagctaccttcagaatttagtgtatcttttaatgttgtatgtctgggatgcaagtattgctaaatatgttagccctccaggttaaagttgattcagctttaagatgttacccttccagaggtacagaagaaacctatttccaaaaaaggtcctttcagtggtagactcggggagaacttggtggcccctttgagatgccaggtttcttttttatctagaaatggctgcaagtggaagcggataatatgtaggcactttgtaaattcatattgagtaaatgaatgaaattgtgatttcctgagaatcgaaccttggttccctaaccctaattgatgagaggctcgctgcttgatggtgtgtacaaactcacctgaatgggacttttttagacagatcttcatgacctgttcccaccccagttcatcatcatctcttttacaccaggtggatgtgatgaagccaataattcaggacttattccttcttgtgttgtgtttttttttggcccttgcaccagagtatgaaatagcttccaggagctccagctataagcttgcaaggtctggggattgaaatacatggtgca

SEQ ID NO: 300394 - DNA, 521 bp, Homo sapiens
cgctcgcgaacgtgttatcctaaacctatcagattgaccctgacgcctgcttctcggctaaagtgaacaactccagcctgataggtttaggatacactcagactctaaagccaggtattaaactgacactgtcagctcttctggatggcaagaacgtcaatgctggtggccacaagcttggtctaggactggaatttcaagcataaatgaatactgtacaattgtttaattttaaactattttgcagcatagctaccttcagaatttagtgtatcttttaatgttgtatgtctgggatgcaagtattgctaaatatgttagccctccaggttaaagttgattcagctttaagatgttacccttccagaggtacagaagaaacctatttccaaaaaaggtcctttcagtggtagactcggggagaacttggtggcccctttgagatgccaggtttcttttttatctagaaatggctgcaagtggaagcggataatatgtacacgttcgcgaggggtaccgag

SEQ ID NO: 300395 - DNA, 1932 bp, Homo sapiens
acgctgtcccgggcggggcctgggggcggagcgcgccgggccgggcgcgcaggaggggaggcgggtccgcgccgccgccgtccgcgccgccccgcccttggcccagccgctcgctcggctccgctccctggctcggctccctgcctccgcgtcgcagcccccgccgtagccgcctccgagcccgccgccacatcctctgagcagaagatggctgtgccacccacgtatgccgatcttggcaaatctgccagggatgtcttcaccaagggctatggatttggcttaataaagcttgatttgaaaacaaaatctgagaatggattggaatttacaagctcaggctcagccaacactgagaccaccaaagtgacgggcagtctggaaaccaagtacagatggactgagtacggcctgacgtttacagagaaatggaataccgacaatacactaggcaccgagattactgtggaagatcagcttgcacgtggactgaagctgaccttcgattcatccttctcacctaacactgggaaaaaaaatgctaaaatcaagacagggtacaagcgggagcacattaacctgggctgcgacatggatttcgacattgctgggccttccatccggggtgctctggtgctaggttacgagggctggctggccggctaccagatgaattttgagactgcaaaatcccgagtgacccagagcaactttgcagttggctacaagactgatgaattccagcttcacactaatgtgaatgacgggacagagtttggcggctccatttaccagaaagtgaacaagaagttggagaccgctgtcaatcttgcctggacagcaggaaacagtaacacgcgcttcggaatagcagccaagtatcagattgaccctgacgcctgcttctcggctaaagtgaacaactccagcctgataggtttaggatacactcagactctaaagccaggtattaaactgacactgtcagctcttctggatggcaagaacgtcaatgctggtggccacaagcttggtctaggactggaatttcaagcataaatgaatactgtacaattgtttaattttaaactattttgcagcatagctaccttcagaatttagtgtatcttttaatgttgtatgtctgggatgcaagtattgctaaatatgttagccctccaggttaaagttgattcagctttaagatgttacccttccagaggtacagaagaaacctatttccaaaaaaggtcctttcagtggtagactcggggagaacttggtggcccctttgagatgccaggtttcttttttatctagaaatggctgcaagtggaagcggataatatgtaggcactttgtaaattcatattgagtaaatgaatgaaattgtgatttcctgagaatcgaaccttggttccctaaccctaattgatgagaggctcgctgcttgatggtgtgtacaaactcacctgaatgggacttttttagacagatcttcatgacctgttcccaccccagttcatcatcatctcttttacaccaaaaggtctgcagggtgtggtaactgtttcttttgtgccattttggggtggagaaggtggatgtgatgaagccaataattcaggacttattccttcttgtgttgtgtttttttttggcccttgcaccagagtatgaaatagcttccaggagctccagctataagcttggaagtgtctgtgtgattgtaatcacatggtgacaacactcagaatctaaattggacttctgttgtattctcaccactcaatttgttttttagcagtttaatgggtacattttagagtcttccattttgttggaattagatcctccccttcaaatgctgtaattaacaacacttaaaaaacttgaataaaatattgaaattcaaaaaaaaaaaaggggggg

SEQ ID NO: 300396 - DNA, 1384 bp, Homo sapiens
acgctgtcccgggcggggcctgggggcggagcgcgccgggccgggcgcgcaggaggggaggcgggtccgcgccgccgccgtccgcgccgccccgcccttggcccagccgctcgctcggctccgctccctggctcggctccctgcctccgcgtcgcagcccccgccgtagccgcctccgagcccgccgccacatcctctgagcagaagatggctgtgccacccacgtatgccgatcttggcaaatctgccagggatgtcttcaccaagggctatggatttggcttaataaagcttgatttgaaaacaaaatctgagaatggattggaatttacaagctcaggctcagccaacactgagaccaccaaagtgacgggcagtctggaaaccaagtacagatggactgagtacggcctgacgtttacagagaaatggaataccgacaatacactaggcaccgagattactgtggaagatcagcttgcacgtggactgaagctgaccttcgattcatccttctcacctaacactgggaaaaaaaatgctaaaatcaagacagggtacaagcgggagcacattaacctgggctgcgacatggatttcgacattgctgggccttccatccggggtgctctggtgctaggttacgagggctggctggccggctaccagatgaattttgagactgcaaaatcccgagtgacccagagcaactttgcagttggctacaagactgatgaattccagcttcacactaatgtgaatgacgggacagagtttggcggctccatttaccagaaagtgaacaagaagttggagaccgctgtcaatcttgcctggacagcaggaaacagtaacacgcgcttcggaatagcagccaagtatcagattgaccctgacgcctgcttctcggctaaagtgaacaactccagcctgataggtttaggatacactcagactctaaagccaggtattaaactgacactgtcagctcttctggatggcaagaacgtcaatgctggtggccacaagcttggtctaggactggaatttcaagcataaatgaatactgtacaattgtttaattttaaactattttgcagcatagctaccttcagaatttagtgtatcttttaatgttgtatgtctgggatgcaagtattgctaaatatgttagccctccaggttaaagttgattcagctttaagatgttacccttccagaggtacagaagaaacctatttccaaaaaaggtcctttcagtggtagactcggggagaacttggtggcccctttgagatgccaggtttcttttttatctagaaatggctgcaagtggaagcggataatatgtaggcatccagaggacacttgggggtaccgagct

SEQ ID NO: 300397 - DNA, 2405 bp, Homo sapiens
gcttttcccaatccacgttttgttttattttgtctttttgcctctcaaatgcatggaaattggctgctagtagctttgctacaggagaaaatcgctaatctgtagtgcaaaatcggcgcacaggggttttctctgagattgtctagacgccgcgcgggcgggtcggaggcgccagacacattgtatccggagcgcggagctcgggagcaacagtcgccgcctctactctgtatctgcgccgccccaggcgcccagtgtccgcgctgggcctgggactgccctcgggggatggggcccacgcgggctttgatggggggccgggggccactttgtccacccaggcgaggcttgggtccagcgccggccacatcaactcccgggggatctagcagcgcggaggccaagcaggaggcccaggagccccgcgcgtcttccattagcgcagggacctccgggccacagctcagagaatcggaaggcctcctcccccttcccgagcgctgccactggggccgaggtttccagcaagaacccgcgtgtccctgcgcacgcacacacggtgcacacgtcagtccggcgcctccccgtgccccgactcacgcaggtcctcccgcgcgcccgcaacacgcccgcaggctcctgtgtctgctgccggggcagcggggcccggaaggcagaagatggctgtgccacccacgtatgccgatcttggcaaatctgccagggatgtcttcaccaagggctatggatttggcttaataaagcttgatttgaaaacaaaatctgagaatggattggaatttacaagctcaggctcagccaacactgagaccaccaaagtgacgggcagtctggaaaccaagtacagatggactgagtacggcctgacgtttacagagaaatggaataccgacaatacactaggcaccgagattactgtggaagatcagcttgcacgtggactgaagctgaccttcgattcatccttctcacctaacactgggaaaaaaaatgctaaaatcaagacagggtacaagcgggagcacattaacctgggctgcgacatggatttcgacattgctgggccttccatccggggtgctctggtgctaggttacgagggctggctggccggctaccagatgaattttgagactgcaaaatcccgagtgacccagagcaactttgcagttggctacaagactgatgaattccagcttcacactaatgtgaatgacgggacagagtttggcggctccatttaccagaaagtgaacaagaagttggagaccgctgtcaatcttgcctggacagcaggaaacagtaacacgcgcttcggaatagcagccaagtatcagattgaccctgacgcctgcttctcggctaaagtgaacaactccagcctgataggtttaggatacactcagactctaaagccaggtattaaactgacactgtcagctcttctggatggcaagaacgtcaatgctggtggccacaagcttggtctaggactggaatttcaagcataaatgaatactgtacaattgtttaattttaaactattttgcagcatagctaccttcagaatttagtgtatcttttaatgttgtatgtctgggatgcaagtattgctaaatatgttagccctccaggttaaagttgattcagctttaagatgttacccttccagaggtacagaagaaacctatttccaaaaaaggtcctttcagtggtagactcggggagaacttggtggcccctttgagatgccaggtttcttttttatctagaaatggctgcaagtggaagcggataatatgtaggcactttgtaaattcatattgagtaaatgaatgaaattgtgatttcctgagaatcgaaccttggttccctaaccctaattgatgagaggctcgctgcttgatggtgtgtacaaactcacctgaatgggacttttttagacagatcttcatgacctgttcccaccccagttcatcatcatctcttttacaccaaaaggtctgcagggtgtggtaactgtttcttttgtgccattttggggtggagaaggtggatgtgatgaagccaataattcaggacttattccttcttgtgttgtgtttttttttggcccttgcaccagagtatgaaatagcttccaggagctccagctataagcttggaagtgtctgtgtgattgtaatcacatggtgacaacactcagaatctaaattggacttctgttgtattctcaccactcaatttgttttttagcagtttaatgggtacattttagagtcttccattttgttggaattagatcctccccttcaaatgctgtaattaacaacacttaaaaaacttgaataaaatattgaaattcaaaaaaaaaaaaggggggg

SEQ ID NO: 300398 - DNA, 1816 bp, Homo sapiens
acgtaggtaacctggttttgaatggcgaggggcttgccccggtgagccccgcgtaccgctccgagcccgccgcacatcctctgagcagaagatggctgtgccacccacgtatgccgatcttggcaaatctgccagggatgtcttcaccaagggctatggatttggcttaataaagcttgatttgaaaacaaaatctgagaatggattggaatttacaagctcaggctcagccaacactgagaccaccaaagtgacgggcagtctggaaaccaagtacagatggactgagtacggcctgacgtttacagagaaatggaataccgacaatacactaggcaccgagattactgtggaagatcagcttgcacgtggactgaagctgaccttcgattcatccttctcacctaacactgggaaaaaaaatgctaaaatcaagacagggtacaagcgggagcacattaacctgggctgcgacatggatttcgacattgctgggccttccatccggggtgctctggtgctaggttacgagggctggctggccggctaccagatgaattttgagactgcaaaatcccgagtgacccagagcaactttgcagttggctacaagactgatgaattccagcttcacactaatgtgaatgacgggacagagtttggcggctccatttaccagaaagtgaacaagaagttggagaccgctgtcaatcttgcctggacagcaggaaacagtaacacgcgcttcggaatagcagccaagtatcagattgaccctgacgcctgcttctcggctaaagtgaacaactccagcctgataggtttaggatacactcagactctaaagccaggtattaaactgacactgtcagctcttctggatggcaagaacgtcaatgctggtggccacaagcttggtctaggactggaatttcaagcataaatgaatactgtacaattgtttaattttaaactattttgcagcatagctaccttcagaatttagtgtatcttttaatgttgtatgtctgggatgcaagtattgctaaatatgttagccctccaggttaaagttgattcagctttaagatgttacccttccagaggtacagaagaaacctatttccaaaaaaggtcctttcagtggtagactcggggagaacttggtggcccctttgagatgccaggtttcttttttatctagaaatggctgcaagtggaagcggataatatgtaggcactttgtaaattcatattgagtaaatgaatgaaattgtgatttcctgagaatcgaaccttggttccctaaccctaattgatgagaggctcgctgcttgatggtgtgtacaaactcacctgaatgggacttttttagacagatcttcatgacctgttcccaccccagttcatcatcatctcttttacaccaaaaggtctgcagggtgtggtaactgtttcttttgtgccattttggggtggagaaggtggatgtgatgaagccaataattcaggacttattccttcttgtgttgtgtttttttttggcccttgcaccagagtatgaaatagcttccaggagctccagctataagcttggaagtgtctgtgtgattgtaatcacatggtgacaacactcagaatctaaattggacttctgttgtattctcaccactcaatttgttttttagcagtttaatgggtacattttagagtcttccattttgttggaattagatcctccccttcaaatgctgtaattaacaacacttaaaaaacttgaataaaatattgaaattcaaaaaaaaaaaaggggggg

SEQ ID NO: 300399 - DNA, 1883 bp, Homo sapiens
agcggaaaaggaccccggcttccttgcgccctggacggcgggggccaggcccctggggagctgagagggaggcgctgagggaggagcgggcgaggggccccggcagcccggccgcggggagggatcgcgagcggccggcgcgggcctggctgcagaagatggctgtgccacccacgtatgccgatcttggcaaatctgccagggatgtcttcaccaagggctatggatttggcttaataaagcttgatttgaaaacaaaatctgagaatggattggaatttacaagctcaggctcagccaacactgagaccaccaaagtgacgggcagtctggaaaccaagtacagatggactgagtacggcctgacgtttacagagaaatggaataccgacaatacactaggcaccgagattactgtggaagatcagcttgcacgtggactgaagctgaccttcgattcatccttctcacctaacactgggaaaaaaaatgctaaaatcaagacagggtacaagcgggagcacattaacctgggctgcgacatggatttcgacattgctgggccttccatccggggtgctctggtgctaggttacgagggctggctggccggctaccagatgaattttgagactgcaaaatcccgagtgacccagagcaactttgcagttggctacaagactgatgaattccagcttcacactaatgtgaatgacgggacagagtttggcggctccatttaccagaaagtgaacaagaagttggagaccgctgtcaatcttgcctggacagcaggaaacagtaacacgcgcttcggaatagcagccaagtatcagattgaccctgacgcctgcttctcggctaaagtgaacaactccagcctgataggtttaggatacactcagactctaaagccaggtattaaactgacactgtcagctcttctggatggcaagaacgtcaatgctggtggccacaagcttggtctaggactggaatttcaagcataaatgaatactgtacaattgtttaattttaaactattttgcagcatagctaccttcagaatttagtgtatcttttaatgttgtatgtctgggatgcaagtattgctaaatatgttagccctccaggttaaagttgattcagctttaagatgttacccttccagaggtacagaagaaacctatttccaaaaaaggtcctttcagtggtagactcggggagaacttggtggcccctttgagatgccaggtttcttttttatctagaaatggctgcaagtggaagcggataatatgtaggcactttgtaaattcatattgagtaaatgaatgaaattgtgatttcctgagaatcgaaccttggttccctaaccctaattgatgagaggctcgctgcttgatggtgtgtacaaactcacctgaatgggacttttttagacagatcttcatgacctgttcccaccccagttcatcatcatctcttttacaccaaaaggtctgcagggtgtggtaactgtttcttttgtgccattttggggtggagaaggtggatgtgatgaagccaataattcaggacttattccttcttgtgttgtgtttttttttggcccttgcaccagagtatgaaatagcttccaggagctccagctataagcttggaagtgtctgtgtgattgtaatcacatggtgacaacactcagaatctaaattggacttctgttgtattctcaccactcaatttgttttttagcagtttaatgggtacattttagagtcttccattttgttggaattagatcctccccttcaaatgctgtaattaacaacacttaaaaaacttgaataaaatattgaaattcaaaaaaaaaaaaggggggg

SEQ ID NO: 300400 - DNA, 1653 bp, Homo sapiens
  misc_feature (1)..(1): n is a, c, g, or t
  misc_feature (3)..(3): n is a, c, g, or t
  misc_feature (6)..(6): n is a, c, g, or t
  misc_feature (16)..(16): n is a, c, g, or t
  misc_feature (25)..(25): n is a, c, g, or t
ngnctnggtagcgagnctgggtggngcaaatctgagaatggattggaatttacaagctcaggctcagccaacactgagaccaccaaagtgacgggcagtctggaaaccaagtacagatggactgagtacggcctgacgtttacagagaaatggaataccgacaatacactaggcaccgagattactgtggaagatcagcttgcacgtggactgaagctgaccttcgattcatccttctcacctaacactgggaaaaaaaatgctaaaatcaagacagggtacaagcgggagcacattaacctgggctgcgacatggatttcgacattgctgggccttccatccggggtgctctggtgctaggttacgagggctggctggccggctaccagatgaattttgagactgcaaaatcccgagtgacccagagcaactttgcagttggctacaagactgatgaattccagcttcacactaatgtgaatgacgggacagagtttggcggctccatttaccagaaagtgaacaagaagttggagaccgctgtcaatcttgcctggacagcaggaaacagtaacacgcgcttcggaatagcagccaagtatcagattgaccctgacgcctgcttctcggctaaagtgaacaactccagcctgataggtttaggatacactcagactctaaagccaggtattaaactgacactgtcagctcttctggatggcaagaacgtcaatgctggtggccacaagcttggtctaggactggaatttcaagcataaatgaatactgtacaattgtttaattttaaactattttgcagcatagctaccttcagaatttagtgtatcttttaatgttgtatgtctgggatgcaagtattgctaaatatgttagccctccaggttaaagttgattcagctttaagatgttacccttccagaggtacagaagaaacctatttccaaaaaaggtcctttcagtggtagactcggggagaacttggtggcccctttgagatgccaggtttcttttttatctagaaatggctgcaagtggaagcggataatatgtaggcactttgtaaattcatattgagtaaatgaatgaaattgtgatttcctgagaatcgaaccttggttccctaaccctaattgatgagaggctcgctgcttgatggtgtgtacaaactcacctgaatgggacttttttagacagatcttcatgacctgttcccaccccagttcatcatcatctcttttacaccaaaaggtctgcagggtgtggtaactgtttcttttgtgccattttggggtggagaaggtggatgtgatgaagccaataattcaggacttattccttcttgtgttgtgtttttttttggcccttgcaccagagtatgaaatagcttccaggagctccagctataagcttggaagtgtctgtgtgattgtaatcacatggtgacaacactcagaatctaaattggacttctgttgtattctcaccactcaatttgttttttagcagtttaatgggtacattttagagtcttccattttgttggaattagatcctccccttcaaatgctgtaattaacaacacttaaaaaacttgaataaaatattgaaattcaaaaaaaaaaaaggggggg

SEQ ID NO: 300401 - DNA, 1802 bp, Homo sapiens
  misc_feature (22)..(22): n is a, c, g, or t
  misc_feature (78)..(78): n is a, c, g, or t
  misc_feature (84)..(84): n is a, c, g, or t
  misc_feature (90)..(91): n is a, c, g, or t
  misc_feature (97)..(97): n is a, c, g, or t
  misc_feature (160)..(160): n is a, c, g, or t
agcgggctgtagccagcccccnttccccgagcccgccgccacatcctctgagaagatggctgtgccacccacgtatgnccgaantttccnnttggcnaaatctgccagggatgtcttcaccaagggctatggatttggcttaataacaacacggcccctntggcaatttgaaaacaaaatctgagaatggattggaatttacaagctcaggctcagccaacactgagaccaccaaagtgacgggcagtctggaaaccaagtacagatggactgagtacggcctgacgtttacagagaaatggaataccgacaatacactaggcaccgagattactgtggaagatcagcttgcacgtggactgaagctgaccttcgattcatccttctcacctaacactgggaaaaaaaatgctaaaatcaagacagggtacaagcgggagcacattaacctgggctgcgacatggatttcgacattgctgggccttccatccggggtgctctggtgctaggttacgagggctggctggccggctaccagatgaattttgagactgcaaaatcccgagtgacccagagcaactttgcagttggctacaagactgatgaattccagcttcacactaatgtgaatgacgggacagagtttggcggctccatttaccagaaagtgaacaagaagttggagaccgctgtcaatcttgcctggacagcaggaaacagtaacacgcgcttcggaatagcagccaagtatcagattgaccctgacgcctgcttctcggctaaagtgaacaactccagcctgataggtttaggatacactcagactctaaagccaggtattaaactgacactgtcagctcttctggatggcaagaacgtcaatgctggtggccacaagcttggtctaggactggaatttcaagcataaatgaatactgtacaattgtttaattttaaactattttgcagcatagctaccttcagaatttagtgtatcttttaatgttgtatgtctgggatgcaagtattgctaaatatgttagccctccaggttaaagttgattcagctttaagatgttacccttccagaggtacagaagaaacctatttccaaaaaaggtcctttcagtggtagactcggggagaacttggtggcccctttgagatgccaggtttcttttttatctagaaatggctgcaagtggaagcggataatatgtaggcactttgtaaattcatattgagtaaatgaatgaaattgtgatttcctgagaatcgaaccttggttccctaaccctaattgatgagaggctcgctgcttgatggtgtgtacaaactcacctgaatgggacttttttagacagatcttcatgacctgttcccaccccagttcatcatcatctcttttacaccaaaaggtctgcagggtgtggtaactgtttcttttgtgccattttggggtggagaaggtggatgtgatgaagccaataattcaggacttattccttcttgtgttgtgtttttttttggcccttgcaccagagtatgaaatagcttccaggagctccagctataagcttggaagtgtctgtgtgattgtaatcacatggtgacaacactcagaatctaaattggacttctgttgtattctcaccactcaatttgttttttagcagtttaatgggtacattttagagtcttccattttgttggaattagatcctccccttcaaatgctgtaattaacaacacttaaaaaacttgaataaaatattgaaattcaaaaaaaaaaaaggggggg

SEQ ID NO: 300402 - DNA, 1507 bp, Homo sapiens
atcccgttataaatggctgttacactaggcccgagattttgtggaagatcagcttgcacgtggactgaagctgaccttcgattcatccttctcacctaacactgggaaaaaaaatgctaaaatcaagacagggtacaagcgggagcacattaacctgggctgcgacatggatttcgacattgctgggccttccatccggggtgctctggtgctaggttacgagggctggctggccggctaccagatgaattttgagactgcaaaatcccgagtgacccagagcaactttgcagttggctacaagactgatgaattccagcttcacactaatgtgaatgacgggacagagtttggcggctccatttaccagaaagtgaacaagaagttggagaccgctgtcaatcttgcctggacagcaggaaacagtaacacgcgcttcggaatagcagccaagtatcagattgaccctgacgcctgcttctcggctaaagtgaacaactccagcctgataggtttaggatacactcagactctaaagccaggtattaaactgacactgtcagctcttctggatggcaagaacgtcaatgctggtggccacaagcttggtctaggactggaatttcaagcataaatgaatactgtacaattgtttaattttaaactattttgcagcatagctaccttcagaatttagtgtatcttttaatgttgtatgtctgggatgcaagtattgctaaatatgttagccctccaggttaaagttgattcagctttaagatgttacccttccagaggtacagaagaaacctatttccaaaaaaggtcctttcagtggtagactcggggagaacttggtggcccctttgagatgccaggtttcttttttatctagaaatggctgcaagtggaagcggataatatgtaggcactttgtaaattcatattgagtaaatgaatgaaattgtgatttcctgagaatcgaaccttggttccctaaccctaattgatgagaggctcgctgcttgatggtgtgtacaaactcacctgaatgggacttttttagacagatcttcatgacctgttcccaccccagttcatcatcatctcttttacaccaaaaggtctgcagggtgtggtaactgtttcttttgtgccattttggggtggagaaggtggatgtgatgaagccaataattcaggacttattccttcttgtgttgtgtttttttttggcccttgcaccagagtatgaaatagcttccaggagctccagctataagcttggaagtgtctgtgtgattgtaatcacatggtgacaacactcagaatctaaattggacttctgttgtattctcaccactcaatttgttttttagcagtttaatgggtacattttagagtcttccattttgttggaattagatcctccccttcaaatgctgtaattaacaacacttaaaaaacttgaataaaatattgaaattcaaaaaaaaaaaaggggggg

SEQ ID NO: 300403 - DNA, 1538 bp, Homo sapiens
atgccaaggcatgggttaaccggagcctctcggggaaaaagtttcccactgagtgccagtaagtcgtcgaccacgcgtcgcagcttgcacgtggactgaagctgaccttcgattcatccttctcacctaacactgggaaaaaaaatgctaaaatcaagacagggtacaagcgggagcacattaacctgggctgcgacatggatttcgacattgctgggccttccatccggggtgctctggtgctaggttacgagggctggctggccggctaccagatgaattttgagactgcaaaatcccgagtgacccagagcaactttgcagttggctacaagactgatgaattccagcttcacactaatgtgaatgacgggacagagtttggcggctccatttaccagaaagtgaacaagaagttggagaccgctgtcaatcttgcctggacagcaggaaacagtaacacgcgcttcggaatagcagccaagtatcagattgaccctgacgcctgcttctcggctaaagtgaacaactccagcctgataggtttaggatacactcagactctaaagccaggtattaaactgacactgtcagctcttctggatggcaagaacgtcaatgctggtggccacaagcttggtctaggactggaatttcaagcataaatgaatactgtacaattgtttaattttaaactattttgcagcatagctaccttcagaatttagtgtatcttttaatgttgtatgtctgggatgcaagtattgctaaatatgttagccctccaggttaaagttgattcagctttaagatgttacccttccagaggtacagaagaaacctatttccaaaaaaggtcctttcagtggtagactcggggagaacttggtggcccctttgagatgccaggtttcttttttatctagaaatggctgcaagtggaagcggataatatgtaggcactttgtaaattcatattgagtaaatgaatgaaattgtgatttcctgagaatcgaaccttggttccctaaccctaattgatgagaggctcgctgcttgatggtgtgtacaaactcacctgaatgggacttttttagacagatcttcatgacctgttcccaccccagttcatcatcatctcttttacaccaaaaggtctgcagggtgtggtaactgtttcttttgtgccattttggggtggagaaggtggatgtgatgaagccaataattcaggacttattccttcttgtgttgtgtttttttttggcccttgcaccagagtatgaaatagcttccaggagctccagctataagcttggaagtgtctgtgtgattgtaatcacatggtgacaacactcagaatctaaattggacttctgttgtattctcaccactcaatttgttttttagcagtttaatgggtacattttagagtcttccattttgttggaattagatcctccccttcaaatgctgtaattaacaacacttaaaaaacttgaataaaatattgaaattcaaaaaaaaaaaaggggggg

SEQ ID NO: 300404 - DNA, 1987 bp, Homo sapiens
  misc_feature (340)..(340): n is a, c, g, or t
  misc_feature (358)..(358): n is a, c, g, or t
  misc_feature (457)..(457): n is a, c, g, or t
cgcgttcgacacgacgctcgccgatattcgactccgtaggcccgacgtgagatttctctgagcagaagatggcttgtagccaagcctcgagctggtagtgcctggattcctgtgagacataactcatggccacgagggaatgctccttccaacccgaagggcgccttcatcgagattgtctcgcgctatgacataagaaagcgtgtcgattgtggaaagacaccaatgaatcttcgtacatagtgtgattcggaaagtttaacaagaagcatcgcaggcctccacgaccaaccatcttgcagggacccatccgacatagtcgtatccgggaccacgtctngtggatagatccgacacngtgacaaggactcgtgcaacttggaggtcacttgcgcacttgtacccgtctttactatggagtacatatcgcgacgataaacccgaatctcaataatcnactacaaaggccatccagcatgtatcttacgtgggttgcgtaaacggatgcgaggcttttgcgacagtagagacgtgcacagcttgacctttcggattccattcgctttctcaaccttaacaacttgggaaaaaaaatgctaaaatcaagacagggtacaagcgggagcacattaacctgggctgcgacatggatttcgacattgctgggccttccatccggggtgctctggtgctaggttacgagggctggctggccggctaccagatgaattttgagactgcaaaatcccgagtgacccagagcaactttgcagttggctacaagactgatgaattccagcttcacactaatgtgaatgacgggacagagtttggcggctccatttaccagaaagtgaacaagaagttggagaccgctgtcaatcttgcctggacagcaggaaacagtaacacgcgcttcggaatagcagccaagtatcagattgaccctgacgcctgcttctcggctaaagtgaacaactccagcctgataggtttaggatacactcagactctaaagccaggtattaaactgacactgtcagctcttctggatggcaagaacgtcaatgctggtggccacaagcttggtctaggactggaatttcaagcataaatgaatactgtacaattgtttaattttaaactattttgcagcatagctaccttcagaatttagtgtatcttttaatgttgtatgtctgggatgcaagtattgctaaatatgttagccctccaggttaaagttgattcagctttaagatgttacccttccagaggtacagaagaaacctatttccaaaaaaggtcctttcagtggtagactcggggagaacttggtggcccctttgagatgccaggtttcttttttatctagaaatggctgcaagtggaagcggataatatgtaggcactttgtaaattcatattgagtaaatgaatgaaattgtgatttcctgagaatcgaaccttggttccctaaccctaattgatgagaggctcgctgcttgatggtgtgtacaaactcacctgaatgggacttttttagacagatcttcatgacctgttcccaccccagttcatcatcatctcttttacaccaaaaggtctgcagggtgtggtaactgtttcttttgtgccattttggggtggagaaggtggatgtgatgaagccaataattcaggacttattccttcttgtgttgtgtttttttttggcccttgcaccagagtatgaaatagcttccaggagctccagctataagcttggaagtgtctgtgtgattgtaatcacatggtgacaacactcagaatctaaattggacttctgttgtattctcaccactcaatttgttttttagcagtttaatgggtacattttagagtcttccattttgttggaattagatcctccccttcaaatgctgtaattaacaacacttaaaaaacttgaataaaatattgaaattcaaaaaaaaaaaaggggggg

SEQ ID NO: 300405 - DNA, 1193 bp, Homo sapiens
acgctgtcccgggcggggcctgggggcggagcgcgccgggccgggcgcgcaggaggggaggcgggtccgcgccgccgccgtccgcgccgccccgcccttggcccagccgctcgctcggctccgctccctggctcggctccctgcctccgcgtcgcagcccccgccgtagccgcctccgagcccgccgccacatcctctgagcagaagatggctgtgccacccacgtatgccgatcttggcaaatctgccagggatgtcttcaccaagggctatggatttggcttaataaagcttgatttgaaaacaaaatctgagaatggattggaatttacaagctcaggctcagccaacactgagaccaccaaagtgacgggcagtctggaaaccaagtacagatggactgagtacggcctgacgtttacagagaaatggaataccgacaatacactaggcaccgagattactgtggaagatcagcttgcacgtggactgaagctgaccttcgattcatccttctcacctaacactgggaaaaaaaatgctaaaatcaagacagggtacaagcgggagcacattaacctgggctgcgacatggatttcgacattgctgggccttccatccggggtgctctggtgctaggttacgagggctggctggccggctaccagatgaattttgagactgcaaaatcccgagtgacccagagcaactttgcagttggctacaagactgatgaattccagcttcacactaatgtgaatgacgggacagagtttggcggctccatttaccagaaagtgaacaagaagttggagaccgctgtcaatcttgcctggacagcaggaaacagtaacacgcgcttcggaatagcagccaagtatcagattgaccctgacgcctgcttctcggctaaagtgaacaactccagcctgataggtttaggatacactcagactctaaagccaggtattaaactgacactgtcagctcttctggatggcaagcatgtggtgtttggcaaagtgaaagaaggcatgaatattgtggaggccatggagcgctttgggtccaggaatggcaagaccagcaagaagatcaccattgctgactgtggacaactcgaataagtttgacttgtgttttatcttaaccaccagatcattccttctgtagctcaggcgagcacggggat

SEQ ID NO: 300406 - DNA, 1461 bp, Homo sapiens
gccggaagggggaaatagccgtggtacgagatatcaaattcaaaaacggaaatgtaatcatggcaagttaaatcagtggtggattttagagccatggcttccaggccagagctaatctggtggacctcatgaaggcactgtctgaatactttccatggtacgatagtttggtctccaaaaaactttctccagaagtcagcagcatcggctttggtgatacgaaagttatctccctggaatcgaccatggggaaagatggcttagatttctgccagcatgtgactgaagaatgacgggacagagtttggcggctccatttaccagaaagtgaacaagaagttggagaccgctgtcaatcttgcctggacagcaggaaacagtaacacgcgcttcggaatagcagccaagtatcagattgaccctgacgcctgcttctcggctaaagtgaacaactccagcctgataggtttaggatacactcagactctaaagccaggtattaaactgacactgtcagctcttctggatggcaagaacgtcaatgctggtggccacaagcttggtctaggactggaatttcaagcataaatgaatactgtacaattgtttaattttaaactattttgcagcatagctaccttcagaatttagtgtatcttttaatgttgtatgtctgggatgcaagtattgctaaatatgttagccctccaggttaaagttgattcagctttaagatgttacccttccagaggtacagaagaaacctatttccaaaaaaggtcctttcagtggtagactcggggagaacttggtggcccctttgagatgccaggtttcttttttatctagaaatggctgcaagtggaagcggataatatgtaggcactttgtaaattcatattgagtaaatgaatgaaattgtgatttcctgagaatcgaaccttggttccctaaccctaattgatgagaggctcgctgcttgatggtgtgtacaaactcacctgaatgggacttttttagacagatcttcatgacctgttcccaccccagttcatcatcatctcttttacaccaaaaggtctgcagggtgtggtaactgtttcttttgtgccattttggggtggagaaggtggatgtgatgaagccaataattcaggacttattccttcttgtgttgtgtttttttttggcccttgcaccagagtatgaaatagcttccaggagctccagctataagcttggaagtgtctgtgtgattgtaatcacatggtgacaacactcagaatctaaattggacttctgttgtattctcaccactcaatttgttttttagcagtttaatgggtacattttagagtcttccattttgttggaattagatcctccccttcaaatgctgtaattaacaacacttaaaaaacttgaataaaatattgaaattcaaaaaaaaaaaaggggggg

SEQ ID NO: 300407 - DNA, 1079 bp, Homo sapiens
cgctcgcgaacgtgttatcctaaacctatcagattgaccctgacgcctgcttctcggctaaagtgaacaactccagcctgataggtttaggatacactcagactctaaagccaggtattaaactgacactgtcagctcttctggatggcaagaacgtcaatgctggtggccacaagcttggtctaggactggaatttcaagcataaatgaatactgtacaattgtttaattttaaactattttgcagcatagctaccttcagaatttagtgtatcttttaatgttgtatgtctgggatgcaagtattgctaaatatgttagccctccaggttaaagttgattcagctttaagatgttacccttccagaggtacagaagaaacctatttccaaaaaaggtcctttcagtggtagactcggggagaacttggtggcccctttgagatgccaggtttcttttttatctagaaatggctgcaagtggaagcggataatatgtaggcactttgtaaattcatattgagtaaatgaatgaaattgtgatttcctgagaatcgaaccttggttccctaaccctaattgatgagaggctcgctgcttgatggtgtgtacaaactcacctgaatgggacttttttagacagatcttcatgacctgttcccaccccagttcatcatcatctcttttacaccaaaaggtctgcagggtgtggtaactgtttcttttgtgccattttggggtggagaaggtggatgtgatgaagccaataattcaggacttattccttcttgtgttgtgtttttttttggcccttgcaccagagtatgaaatagcttccaggagctccagctataagcttggaagtgtctgtgtgattgtaatcacatggtgacaacactcagaatctaaattggacttctgttgtattctcaccactcaatttgttttttagcagtttaatgggtacattttagagtcttccattttgttggaattagatcctccccttcaaatgctgtaattaacaacacttaaaaaacttgaataaaatattgaaattcaaaaaaaaaaaaggggggg

SEQ ID NO: 300408 - DNA, 1296 bp, Homo sapiens
acgctgtcccgggcggggcctgggggcggagcgcgccgggccgggcgcgcaggaggggaggcgggtccgcgccgccgccgtccgcgccgccccgcccttggcccagccgctcgctcggctccgctccctggctcggctccctgcctccgcgtcgcagcccccgccgtagccgcctccgagcccgccgccacatcctctgagcagaagatggctgtgccacccacgtatgccgatcttggcaaatctgccagggatgtcttcaccaagggctatggatttggcttaataaagcttgatttgaaaacaaaatctgagaatggattggaatttacaagctcaggctcagccaacactgagaccaccaaagtgacgggcagtctggaaaccaagtacagatggactgagtacggcctgacgtttacagagaaatggaataccgacaatacactaggcaccgagattactgtggaagatcagcttgcacgtggactgaagctgaccttcgattcatccttctcacctaacactgggaaaaaaaatgctaaaatcaagacagggtacaagcgggagcacattaacctgggctgcgacatggatttcgacattgctgggccttccatccggggtgctctggtgctaggttacgagggctggctggccggctaccagatgaattttgagactgcaaaatcccgagtgacccagagcaactttgcagttggctacaagactgatgaattccagcttcacactaatgtgtggacggtgtatggattgatgaccgatttcatgggaaaaaaaaggaagtagcttgccaaaagtctctggactctgtgaccgtgcctgattgaccaaaaatttcttcagcagctgctctacaaatatgcaatggaccctttaagcatttctcctttacagtgagcacaatgctaagctttgtcagcagatgccactggagcagcattgcagaagaaagcgagtttctcttcctgattttggtgtgctacttttcttcttcttgctccagctgcattatccatcagtggtactatgtataagaccatcccgctgtgccctgccctaccacctgcccagaggcacattcctcactgactatttggcctgattctgagcctgtggccaccttctcacagccctgcaacacaggcactgtgtgctccaaggctcacgtccccagcagtggcctgactgtgcacttagccacagccttagtttgcctgtgcttcaagaaattgcatcctattttgccagcagctatgggccaactcctggccc

SEQ ID NO: 300409 - DNA, 1582 bp, Homo sapiens
gtgtccatttttttttatctctgctctttcgtttgcttccggttatctctcgtggtccgcgtcttcctcttcctgcagttgtctctgtcctggtttggcccctttttttggtcctatatcagtggtatggtgtagcacattggggtgtcactcccctatgagcttgtgttcccttacccctattccatgagtgtgagtatcaaccgaggccattagattctgagcgtcgtcaccaggtgttctatcccacgacacttcccagctatactggagctcctggaagctattttcatactctgggcaagggcatattaatacactacacaagaagggaataagtcctgaattattggcttcatcacatccaccttctccacccctaaatggcacaaagaaacagttaccacaccctgcagaccttttggtgtaaaagagatgatgatgaactggggtgggaacaggtcatgaagatctgtctaaaaaagtcccattcaggtgagtttgtacacaccatcaagcagcgagcctctcatcaattagggttagggaaccaaggttcgattctcaggaaatcacaatttcattcatttactcaatattgaatttacaagtgcctacatattatccgcttccacttgcagccatttctagataaaaaagaaacctggcatctcaaagggccaccaagttctccccgagtctaccactgaaaggaccttttttggaaataggtttcttctgtacctctggaagggtaacatcttaaagctagtgtatcttttaatgttgtatgtctgggatgcaagtattgctaaatatgttagccctccaggttaaagttgattcagctttaagatgttacccttccagaggtacagaagaaacctatttccaaaaaaggtcctttcagtggtagactcggggagaacttggtggcccctttgagatgccaggtttcttttttatctagaaatggctgcaagtggaagcggataatatgtaggcactttgtaaattcatattgagtaaatgaatgaaattgtgatttcctgagaatcgaaccttggttccctaaccctaattgatgagaggctcgctgcttgatggtgtgtacaaactcacctgaatgggacttttttagacagatcttcatgacctgttcccaccccagttcatcatcatctcttttacaccaaaaggtctgcagggtgtggtaactgtttcttttgtgccattttggggtggagaaggtggatgtgatgaagccaataattcaggacttattccttcttgtgttgtgtttttttttggcccttgcaccagagtatgaaatagcttccaggagctccagctataagcttggaagtgtctgtgtgattgtaatcacatggtgacaacactcagaatctaaattggacttctgttgtattctcaccactcaatttgttttttagcagtttaatgggtacattttagagtcttccattttgttggaattagatcctccccttcaaatgctgtaattaacaacacttaaaaaacttgaataaaatattgaaattcaaaaaaaaaaaaggggggg

SEQ ID NO: 300410 - DNA, 1289 bp, Homo sapiens
gcttttcccaatccacgttttgttttattttgtctttttgcctctcaaatgcatggaaattggctgctagtagctttgctacaggagaaaatcgctaatctgtagtgcaaaatcggcgcacaggggttttctctgagattgtctagacgccgcgcgggcgggtcggaggcgccagacacattgtatccggagcgcggagctcgggagcaacagtcgccgcctctactctgtatctgcgccgccccaggcgcccagtgtccgcgctgggcctgggactgccctcgggggatggggcccacgcgggctttgatggggggccgggggccactttgtccacccaggcgaggcttgggtccagcgccggccacatcaactcccgggggatctagcagcgcggaggccaagcaggaggcccaggagccccgcgcgtcttccattagcgcagggacctccgggccacagctcagagaatcggaaggcctcctcccccttcccgagcgctgccactggggccgaggtttccagcaagaacccgcgtgtccctgcgcacgcacacacggtgcacacgtcagtccggcgcctccccgtgccccgactcacgcaggtcctcccgcgcgcccgcaacacgcccgcaggctcctgtgtctgctgccggggcagcggggcccggaaggcagaagatggctgtgccacccacgtatgccgatcttggcaaatctgccagggatgtcttcaccaagggctatggatttggcttaataaagcttgatttgaaaacaaaatctgagaatggattggaatttacaagctcaggctcagccaacactgagaccaccaaagtgacgggcagtctggaaaccaagtacagatggactgagtacggcctgacgtttacagagaaatggaataccgacaatacactaggcaccgagattactgtggaagatcagcttgcacgtggactgaagctgaccttcgattcatccttctcacctaacactgggaaaaaaaatgctaaaatcaagacaggagtatgaaatagcttccaggagctccagctataagcttggaagtgtctgtgtgattgtaatcacatggtgacaacactcagaatctaaattggacttctgttgtattctcaccactcaatttgttttttagcagtttaatgggtacattttagagtcttccattttgttggaattagatcctccccttcaaatgctgtaattaacaacacttaaaaaacttgaataaaatattgaaattcaaaaaaaaaaaaggggggg

SEQ ID NO: 300411 - DNA, 1027 bp, Homo sapiens
  misc_feature (1021)..(1021): n is a, c, g, or t
gcttttcccaatccacgttttgttttattttgtctttttgcctctcaaatgcatggaaattggctgctagtagctttgctacaggagaaaatcgctaatctgtagtgcaaaatcggcgcacaggggttttctctgagattgtctagacgccgcgcgggcgggtcggaggcgccagacacattgtatccggagcgcggagctcgggagcaacagtcgccgcctctactctgtatctgcgccgccccaggcgcccagtgtccgcgctgggcctgggactgccctcgggggatggggcccacgcgggctttgatggggggccgggggccactttgtccacccaggcgaggcttgggtccagcgccggccacatcaactcccgggggatctagcagcgcggaggccaagcaggaggcccaggagccccgcgcgtcttccattagcgcagggacctccgggccacagctcagagaatcggaaggcctcctcccccttcccgagcgctgccactggggccgaggtttccagcaagaacccgcgtgtccctgcgcacgcacacacggtgcacacgtcagtccggcgcctccccgtgccccgactcacgcaggtcctcccgcgcgcccgcaacacgcccgcaggctcctgtgtctgctgccggggcagcggggcccggaaggcagaagatggctgtgccacccacgtatgccgatcttggcaaatctgccagggatgtcttcaccaagggctatggatttggcttaataaagcttgatttgaaaacaaaatctgagaatggattggaatttacaagctcaggctcagccaacactgagaccaccaaagtgacgggcagtctggaaaccaagtacagatggactgagtacggcctgacgtttacagagaaatggaataccgacaatacactaggcaccgagattactgtggaagatcagcttgcacgtggactgaagctgaccttcgattcatccttctcacctaacactggtccccatcacgaatgcanagccat

SEQ ID NO: 300412 - DNA, 894 bp, Homo sapiens
ggaaaagtggtttgcaggtttcctctgcacagttggctaggccagtccacggcgtattatagttctagtgtataaccacttttgaaccctggaaatctaagactaccagctactccctgaatcaggttattccagggaatgtcagtttgttgtgtgcatctgtggatgtacatgcacactacacatgtgtgtacactatgaacatgaacatgtaagaccttaggttggattcaggattgaggtttcatttaaagggatgattgccaaagaagcttactgcatgctaccagtgctatagactaattgtaccaggggaacagtgagaggaaaaaggaaagtggggttccagaagtagatttgggtaggctctctgggcggtgggataattatagttgttttataagcccactgtagtatgcctgttggtcagatagtgctaagtaacaaggattgaagggccatgtagtttggaccctgctgataatacctggaacaggttctgaatttggtgttaatctttcttgtcatttctttcctccattcctcctcctttcctctccctcatttttctccctgcaggtattaaactgacactgtcagctcttctggatggcaagaacgtcaatgctggtggccacaagcttggtctaggactggaatttcaagcataaatgaatactgtacaattgtttaattttaaactattttgcagcatagctaccttcagaatttagtgtatcttttaatgttgtatgtctgggatgcaagtattgctaaatatgttagccctccaggttaaagttgattcagctttaagatgttacccttccagaggtacagaagaaacctatttccaaaaaaggtcctttcagtggtagactcggggagaacttg

SEQ ID NO: 300413 - DNA, 2310 bp, Homo sapiens
ccccgtttccatctctttccctggggtgtccccagccagacctgcgcgtcctgtccctcacatttgatcactgtgaccttctgggggaggggggagttgaaaatgcacatcggcctcagatatttttttcttttttctcctatttggtgttaacatacacccaagcccacccggcccgtcgtgacctctgatctgtgcccactcctccggttccagacgcacctctctcctctgtcttcacagtggggtgtggggcccgtgggatgggcctcaggccaccaggcaataaccacagggcctgcagcagtgcccctgccagccccgaatcccacccccgggaccagccacatccacagcacaactgccccgctggagaggcaccatgggcgtggaggggcttcccggacaccgcccacccgggacccgcctcttccaccaagacagagacgttagcaacgcatggcgggtggggacctggggtgctcaggagggggtacccggggccccggccagagatacatcaattacacccccgtggggggacagccgatgggagccagcaccagcaggatccgagggcgccccggacagaggtctgccccacccacttcctccccaccacctgtgccccagagagcagggcctgcccgggaaggtggcgtcctggagtcgagtgtacctgcagccatgaggttctgggtgttttttgagagagtctgagtgacaccacactcgtgtgaccccacagggttgtgtccaacatacacggaagtggctatggaatggtgtatttgtgcaacctggggtgcgcggatgggtgacttgtatctaagtgcatctgcgtgtatacctgtgtgtgtctgtctgggatgatatgtttttgtggcagtctgtgtgtgtaatagtggtgtagggtatacagagaggtgggtagttgtagatacctgtgtgtggttgtcagcaagactggatatgtgtgaggtgtctgtgtgaatctttgtgcctgtatgagcatgactatattttggggagtgggtgatatggtttatctgagagcatttatctgtaaatatgtttgtcctgattgagggacacgatctgtgttccactctatagcaacatgactctagcaatgtgactttcggttccaaatctgtatcagtcagctactgctgtgtaacaaatgaccacaaatgtagcaaccagaaacaacacatgcttattatctcatagattctgtgggtcaagagcctgggtgcaggttggctgggtcctctacttgggatctcaggaggctgcaatcaaagcattcgccaggcagaggtctcatctgaaggcctgatcggggaaggatttgcttcttagaagctcatgtggttgttgcagcattcagttccttgctgttgcaagactgaaggcctcagttcctcgctggctgttggctggaagctgccctttgttctgtaccatgtgggtctctccacagcggggctcggagcatggcagctaagttagtgagggaaggtgagatggaggttttggtcttattgggtgtgaggaagcaacgtgtgtgtgtgcgcacgcccttttgtgcagtgagagagagagagagattgcacacatgtgtctctgtagtcatgtggccaggtgggactatgtaggtaacagattgctcgtgtctgatttggtacaagcatgtttgttttcctctgtgttcgtgtgagtgtttactcaacaaatgtttattggacacactcagagagagggagtgtgcacacgtgcgtgtgtgttgctatccagcacgtggaccgggctcccagaagagctggcattgtgtctgagcagagctgggtccccccaaaacttgggctggcccagggcccaccagcagctgatgttgcctcctctcctgtcctggcagtagcttctgggttctgaaggtgccggagagagtgaggctgggcaggggtctgcggccctttctcagggacacaccctgatagcacaatctccttggggccctgcccacctccaggcctctcccacctcaggccctgcccgaccctggggagagagggcatctgcaataggagggggcccgagcctgtcctggctgctggcccatcctgcctgggcatccctggtgctggggactgtgccaggccatgcttgctgtgactccgcccctgccccctctccccccgcatgtgggtgcccccactcccccatcgtggggtctgtgtagccttcgctctagacatagtcttcctgcaataaaaaagtggatcctgcattccccaccaaaaaagc

SEQ ID NO: 300414 - DNA, 2741 bp, Homo sapiens
cgcgcgcaagctccccgggcccagtaggctgggggtgggggtagaaggagaaggaggggaagggaggggggggttgggtgtctactctggtgaatagacggctgtggggcagagaagcgtgaaggcctggctgccgggcaggtgaactctccacggggtctagggcccgcgaaagggttcggaaccgagtcagcgcgccttgcgggcaggattcacgccgctgtgacccggaggtcctcagggggcgaagccccggcctaggcctcgcggagatgcccagctgcggtgcttgtacttgcggcgcggcggccgtccggctcatcacctcctcactcgcctccgcgcagagaggtatttctggtggtcgcattcatatgtcagttttaggaaggcttgggacatttgaaactcagattctgcaaagagctcctcttagatcctttacagaaacaccagcatactttgcctcaaaagatgggataagtaaagatggttctggagatggaaataagaaatcagcaagtgagggaagtagtaagaaatcaggctctgggaattctgggaaaggtggaaaccagctgcgctgtcctaaatgtggcgacttgtgcacacatgtagagacctttgtatcatccacccgttttgtcaagtgtgaaaagtgtcatcatttttttgttgtgctatctgaagcagactcaaagaaaagcataattaaagaacctgaatcagcagcagaagctgtaaaattggcattccaacagaaaccaccacctccccctaagaagatttataactacctcgacaagtatgttgttggccagtcatttgctaagaaggtgctttcagttgctgtgtacaatcattataagagaatatataataatatcccagctaatctgagacagcaagcagaggttgagaagcagacatcattaacaccaagagagttagaaataagaagacgggaggatgagtacagatttacaaaattgcttcagattgctggaattagcccacatggtaatgctttaggagcatcaatgcagcaacaggtaaatcaacaaatacctcaggaaaaacgaggaggtgaagtattggattcttctcatgatgacataaaacttgaaaaaagtaatattttgctgcttggaccaactgggtcaggtaaaactctgctggcacaaaccctagctaaatgccttgatgtcccttttgctatctgtgactgtacaactttgactcaggctggatatgtaggcgaagatattgaatctgtgattgcaaaactactccaagatgccaattataatgtggaaaaagcacaacaaggaattgtctttctggatgaagtagataagattggcagtgtgccaggcattcatcaattacgggatgtaggtggagaaggcgttcagcaaggcttattaaaactactagaaggcacaatagtcaatgttccagaaaagaattcccgaaagctccgtggagaaacagttcaagttgatacaacaaacatcctgtttgtggcatctggtgctttcaatggtttagacagaatcatcagcaggaggaaaaatgaaaagtatcttggatttggaacaccatctaatctgggaaaaggcagaagggctgcagctgctgcagaccttgctaatcgaagtggggaatcgaatactcaccaagacattgaagaaaaagatcggttattgcgtcatgtggaagccagagatctgattgagtttggcatgattcctgagtttgtgggacggttgcctgtggtggttccattgcatagcctagatgagaaaacacttgtacaaatattaactgagccacgaaatgctgttattcctcagtaccaggccttattcagcatggataagtgtgaactgaatgttactgaggatgctttgaaagctatagccagattggcactagaacgaaaaacaggtgcacgaggccttcggtccataatggaaaagctgttactagaaccaatgtttgaagtccctaattctgatatcgtatgtgtggaggttgacaaagaagtagtagaaggaaaaaaggaaccaggatacatccgggctccaacaaaagaatcctctgaagaggagtatgactctggagttgaagaagaaggatggccccgccaagcagatgctgcaaacagctaaactgtcatattgctgtcttgtatatacagcttttccttcttttgtttaggatcataattgtctctacagtctgatattaaaggcattggatctatcttggatatcatacatggtcagagaagcctttaggagaagaatcagatcatgtatataattgtaacatcacattgattttacggaagatgttatatggactttaatgacacaatgtttagagataaaatgtacattattttggttcagttttttaaaaaaaatatgctttaacaaaattcttaggaattcttttaagcaatgcaggtattgcgataactgtagattttacaataatgttactctacaaatgggaaaataaattctttaaaattgaatattgagataccattctttagtgttaccttttttacccacatgtgtttctgaaaatattggaattttattcatcttaaaaattggaccaggtaggccgggcgtggtggctcacgcctgtaatcccagcactttgggaggccaaggcgggtggatcacgaggtcaggagttcaagaccagcctggccaagatggtga

SEQ ID NO: 300415 - DNA, 3211 bp, Homo sapiens
cgcgcgcaagctccccgggcccagtaggctgggggtgggggtagaaggagaaggaggggaagggaggggggggttgggtgtctactctggtgaatagacggctgtggggcagagaagcgtgaaggcctggctgccgggcaggtgaactctccacggggtctagggcccgcgaaagggttcggaaccgagtcagcgcgccttgcgggcaggattcacgccgctgtgacccggaggtcctcagggggcgaagccccggcctaggcctcgcggagatgcccagctgcggtgcttgtacttgcggcgcggcggccgtccggctcatcacctcctcactcgcctccgcgcagagaggtatttctggtggtcgcattcatatgtcagttttaggaaggcttgggacatttgaaactcagattctgcaaagagctcctcttagatcctttacagaaacaccagcatactttgcctcaaaagatgggataagtaaagatggttctggagatggaaataagaaatcagcaagtgagggaagtagtaagaaatcaggctctgggaattctgggaaaggtggaaaccagctgcgctgtcctaaatgtggcgacttgtgcacacatgtagagacctttgtatcatccacccgttttgtcaagtgtgaaaagtgtcatcatttttttgttgtgctatctgaagcagactcaaagaaaagcataattaaagaacctgaatcagcagcagaagctgtaaaattggcattccaacagaaaccaccacctccccctaagaagatttataactacctcgacaagtatgttgttggccagtcatttgctaagaaggtgctttcagttgctgtgtacaatcattataagagaatatataataatatcccagctaatctgagacagcaagcagaggttgagaagcagacatcattaacaccaagagagttagaaataagaagacgggaggatgagtacagatttacaaaattgcttcagattgctggaattagcccacatggtaatgctttaggagcatcaatgcagcaacaggtaaatcaacaaatacctcaggaaaaacgaggaggtgaagtattggattcttctcatgatgacataaaacttgaaaaaagtaatattttgctgcttggaccaactgggtcaggtaaaactctgctggcacaaaccctagctaaatgccttgatgtcccttttgctatctgtgactgtacaactttgactcaggctggatatgtaggcgaagatattgaatctgtgattgcaaaactactccaagatgccaattataatgtggaaaaagcacaacaaggaattgtctttctggatgaagtagataagattggcagtgtgccaggcattcatcaattacgggatgtaggtggagaaggcgttcagcaaggcttattaaaactactagaaggcacaatagtcaatgttccagaaaagaattcccgaaagctccgtggagaaacagttcaagttgatacaacaaacatcctgtttgtggcatctggtgctttcaatggtttagacagaatcatcagcaggaggaaaaatgaaaagtatcttggatttggaacaccatctaatctgggaaaaggcagaagggctgcagctgctgcagaccttgctaatcgaagtggggaatcgaatactcaccaagacattgaagaaaaagatcggttattgcgtcatgtggaagccagagatctgattgagtttggcatgattcctgagtttgtgggacggttgcctgtggtggttccattgcatagcctagatgagaaaacacttgtacaaatattaactgaccaccacacccggccttatttaccatctttaatccattttagtactatgggtgagtacatggaattgaagtctggcttaaatcttcagaaagttatatatctattttattttatttttttgagacagagtctcgctgtgtcacccaggctggagtacagtgccacaatcttggctcactgcaacctctgagtcccaggttcaagcgatactcatgcctcagcctcctgagtagctgggactacaggcgtgcaccaccacacctggctaattttttgtatttttagtagagacggggtttcgccatgttgcccaggctggtctctcctgagctcaggcaatcggccaccttggcctctgaaagtgctagaattacgggcatgagccaccgcatccagccagaaagatacatatctaattctagaaatagcatgcagtatcagtcatagtaacagccatgtgctgacctaaataaaatttcttgatattgtgtatttaacctgaagtattgagctagtttttttgttttgttttttggtgctgaacattttggtctaattctttggcttcttagaacattttaaaaaatctatgttttgctatcagccaaagtaaatgtgttcacactaacatataagttactaaccttcattatacagcaaagctaaaaagtggtgggatatttggggtcttaatgaaaattgtatcatttaattccataaatattaaaatatttgggtaccttttaagctttttttctttccttctataatggtggtacaagttctatattcattcagtttaatctcatttgaaattgtttaaatcagagtacatgtaaatatttgtgggtttttttttttggtttatagactcgagctttccttttacacagttttttttagggaaaaactaaagctattaggaaattctaaatcttgttgatgaagagttgggctttctttgatataattaataaaagggatgtatggtatttatggctgggtaggaccagaaatgcactttgtattacagagtgttaaggctggttgctatagtatggaacagaaacacctctccttggtctccctagtaatggttcaagttcttcccaggaagtcttacatattataactttgttcattatctttcccttatagcatcattttcctttttgtagagtggaaatcagactagctgctaaacatattaaggttaatcctccagaaatgtactggggaggcattttagtcacaacaacttacatttggctttggaagttgttaacaaagcatagtcgatgtttttaaatcaaacataatttgtatcttggaacttacattttgacatttgaataaaacaaaaagactaaatgaaaaaaa

SEQ ID NO: 300416 - DNA, 3277 bp, Homo sapiens
cgcgcgcaagctccccgggcccagtaggctgggggtgggggtagaaggagaaggaggggaagggaggggggggttgggtgtctactctggtgaatagacggctgtggggcagagaagcgtgaaggcctggctgccgggcaggtgaactctccacggggtctagggcccgcgaaagggttcggaaccgagtcagcgcgccttgcgggcaggattcacgccgctgtgacccggaggtcctcagggggcgaagccccggcctaggcctcgcggagatgcccagctgcggtgcttgtacttgcggcgcggcggccgtccggctcatcacctcctcactcgcctccgcgcagagaggtatttctggtggtcgcattcatatgtcagttttaggaaggcttgggacatttgaaactcagattctgcaaagagctcctcttagatcctttacagaaacaccagcatactttgcctcaaaagatgggataagtaaagatggttctggagatggaaataagaaatcagcaagtgagggaagtagtaagaaatcaggctctgggaattctgggaaaggtggaaaccagctgcgctgtcctaaatgtggcgacttgtgcacacatgtagagacctttgtatcatccacccgttttgtcaagtgtgaaaagtgtcatcatttttttgttgtgctatctgaagcagactcaaagaaaagcataattaaagaacctgaatcagcagcagaagctgtaaaattggcattccaacagaaaccaccacctccccctaagaagatttataactacctcgacaagtatgttgttggccagtcatttgctaagaaggtgctttcagttgctgtgtacaatcattataagagaatatataataatatcccagctaatctgagacagcaagcagaggttgagaagcagacatcattaacaccaagagagttagaaataagaagacgggaggatgagtacagatttacaaaattgcttcagattgctggaattagcccacatggtaatgctttaggagcatcaatgcagcaacaggtaaatcaacaaatacctcaggaaaaacgaggaggtgaagtattggattcttctcatgatgacataaaacttgaaaaaagtaatattttgctgcttggaccaactgggtcaggtaaaactctgctggcacaaaccctagctaaatgccttgatgtcccttttgctatctgtgactgtacaactttgactcaggctggatatgtaggcgaagatattgaatctgtgattgcaaaactactccaagatgccaattataatgtggaaaaagcacaacaaggaattgtctttctggatgaagtagataagattggcagtgtgccaggcattcatcaattacgggatgtaggtggagaaggcgttcagcaagtaagcagttgaatatttttttcaagcccactaaaaggaagggaatacatcaacctcccaaatattggcttattaaaactactagaaggcacaatagtcaatgttccagaaaagaattcccgaaagctccgtggagaaacagttcaagttgatacaacaaacatcctgtttgtggcatctggtgctttcaatggtttagacagaatcatcagcaggaggaaaaatgaaaagtatcttggatttggaacaccatctaatctgggaaaaggcagaagggctgcagctgctgcagaccttgctaatcgaagtggggaatcgaatactcaccaagacattgaagaaaaagatcggttattgcgtcatgtggaagccagagatctgattgagtttggcatgattcctgagtttgtgggacggttgcctgtggtggttccattgcatagcctagatgagaaaacacttgtacaaatattaactgaccaccacacccggccttatttaccatctttaatccattttagtactatgggtgagtacatggaattgaagtctggcttaaatcttcagaaagttatatatctattttattttatttttttgagacagagtctcgctgtgtcacccaggctggagtacagtgccacaatcttggctcactgcaacctctgagtcccaggttcaagcgatactcatgcctcagcctcctgagtagctgggactacaggcgtgcaccaccacacctggctaattttttgtatttttagtagagacggggtttcgccatgttgcccaggctggtctctcctgagctcaggcaatcggccaccttggcctctgaaagtgctagaattacgggcatgagccaccgcatccagccagaaagatacatatctaattctagaaatagcatgcagtatcagtcatagtaacagccatgtgctgacctaaataaaatttcttgatattgtgtatttaacctgaagtattgagctagtttttttgttttgttttttggtgctgaacattttggtctaattctttggcttcttagaacattttaaaaaatctatgttttgctatcagccaaagtaaatgtgttcacactaacatataagttactaaccttcattatacagcaaagctaaaaagtggtgggatatttggggtcttaatgaaaattgtatcatttaattccataaatattaaaatatttgggtaccttttaagctttttttctttccttctataatggtggtacaagttctatattcattcagtttaatctcatttgaaattgtttaaatcagagtacatgtaaatatttgtgggtttttttttttggtttatagactcgagctttccttttacacagttttttttagggaaaaactaaagctattaggaaattctaaatcttgttgatgaagagttgggctttctttgatataattaataaaagggatgtatggtatttatggctgggtaggaccagaaatgcactttgtattacagagtgttaaggctggttgctatagtatggaacagaaacacctctccttggtctccctagtaatggttcaagttcttcccaggaagtcttacatattataactttgttcattatctttcccttatagcatcattttcctttttgtagagtggaaatcagactagctgctaaacatattaaggttaatcctccagaaatgtactggggaggcattttagtcacaacaacttacatttggctttggaagttgttaacaaagcatagtcgatgtttttaaatcaaacataatttgtatcttggaacttacattttgacatttgaataaaacaaaaagactaaatgaaaaaaa

SEQ ID NO: 300417 - DNA, 1746 bp, Homo sapiens
aatgcatgacactaacttcccaattggttctgtaaaaaaggcccatttttcttaccaagttgtctgatttatttaccatcttttttttttttttttttttaattgagcggagtctcacgctgtcccaagctgaagtgcagtggtgcgatcttggctcactgcaacctccgcctcccaggttcaagcaattttcctgcctcagccttccaagtagctgggattataggcacgcaccaccacacctggctaatttttgtatttttagtagagacagggtttcaccctgttggccaggctagtctgtaactcctgaccttgtgatctgctggcctcagcctcccaaagtgctgggattgcaggcgtaagccaccacacccggccttatttaccatctttaatccattttagtactatgggtgagtacatggaattgaagtctggcttaaatcttcagaaagttatatatctattttattttatttttttgagacagagtctcgctgtgtcacccaggctggagtacagtgccacaatcttggctcactgcaacctctgagtcccaggttcaagcgatactcatgcctcagcctcctgagtagctgggactacaggcgtgcaccaccacacctggctaattttttgtatttttagtagagacggggtttcgccatgttgcccaggctggtctctcctgagctcaggcaatcggccaccttggcctctgaaagtgctagaattacgggcatgagccaccgcatccagccagaaagatacatatctaattctagaaatagcatgcagtatcagtcatagtaacagccatgtgctgacctaaataaaatttcttgatattgtgtatttaacctgaagtattgagctagtttttttgttttgttttttggtgctgaacattttggtctaattctttggcttcttagaacattttaaaaaatctatgttttgctatcagccaaagtaaatgtgttcacactaacatataagttactaaccttcattatacagcaaagctaaaaagtggtgggatatttggggtcttaatgaaaattgtatcatttaattccataaatattaaaatatttgggtaccttttaagctttttttctttccttctataatggtggtacaagttctatattcattcagtttaatctcatttgaaattgtttaaatcagagtacatgtaaatatttgtgggtttttttttttggtttatagactcgagctttccttttacacagttttttttagggaaaaactaaagctattaggaaattctaaatcttgttgatgaagagttgggctttctttgatataattaataaaagggatgtatggtatttatggctgggtaggaccagaaatgcactttgtattacagagtgttaaggctggttgctatagtatggaacagaaacacctctccttggtctccctagtaatggttcaagttcttcccaggaagtcttacatattataactttgttcattatctttcccttatagcatcattttcctttttgtagagtggaaatcagactagctgctaaacatattaaggttaatcctccagaaatgtactggggaggcattttagtcacaacaacttacatttggctttggaagttgttaacaaagcatagtcgatgtttttaaatcaaacataatttgtatcttggaacttacattttgacatttgaataaaacaaaaagactaaatgaaaaaaa

SEQ ID NO: 300418 - DNA, 2333 bp, Homo sapiens
gggctgtacggccgggagtaaggcatggtaatcaacaaatacctgttgctgcattgatgctcctaaagcattaccatgtgggctagttccagcaatctgaagcaacaggtaaatcaacaaatacctcaggaaaaacgaggaggtgaagtattggattcttctcatgatgacataaaacttgaaaaaagtaatattttgctgcttggaccaactgggtcaggtaaaactctgctggcacaaaccctagctaaatgccttgatgtcccttttgctatctgtgactgtacaactttgactcaggctggatatgtaggcgaagatattgaatctgtgattgcaaaactactccaagatgccaattataatgtggaaaaagcacaacaaggaattgtctttctggatgaagtagataagattggcagtgtgccaggcattcatcaattacgggatgtaggtggagaaggcgttcagcaagtaagcagttgaatatttttttcaagcccactaaaaggaagggaatacatcaacctcccaaatattggcttattaaaactactagaaggcacaatagtcaatgttccagaaaagaattcccgaaagctccgtggagaaacagttcaagttgatacaacaaacatcctgtttgtggcatctggtgctttcaatggtttagacagaatcatcagcaggaggaaaaatgaaaagtatcttggatttggaacaccatctaatctgggaaaaggcagaagggctgcagctgctgcagaccttgctaatcgaagtggggaatcgaatactcaccaagacattgaagaaaaagatcggttattgcgtcatgtggaagccagagatctgattgagtttggcatgattcctgagtttgtgggacggttgcctgtggtggttccattgcatagcctagatgagaaaacacttgtacaaatattaactgaccaccacacccggccttatttaccatctttaatccattttagtactatgggtgagtacatggaattgaagtctggcttaaatcttcagaaagttatatatctattttattttatttttttgagacagagtctcgctgtgtcacccaggctggagtacagtgccacaatcttggctcactgcaacctctgagtcccaggttcaagcgatactcatgcctcagcctcctgagtagctgggactacaggcgtgcaccaccacacctggctaattttttgtatttttagtagagacggggtttcgccatgttgcccaggctggtctctcctgagctcaggcaatcggccaccttggcctctgaaagtgctagaattacgggcatgagccaccgcatccagccagaaagatacatatctaattctagaaatagcatgcagtatcagtcatagtaacagccatgtgctgacctaaataaaatttcttgatattgtgtatttaacctgaagtattgagctagtttttttgttttgttttttggtgctgaacattttggtctaattctttggcttcttagaacattttaaaaaatctatgttttgctatcagccaaagtaaatgtgttcacactaacatataagttactaaccttcattatacagcaaagctaaaaagtggtgggatatttggggtcttaatgaaaattgtatcatttaattccataaatattaaaatatttgggtaccttttaagctttttttctttccttctataatggtggtacaagttctatattcattcagtttaatctcatttgaaattgtttaaatcagagtacatgtaaatatttgtgggtttttttttttggtttatagactcgagctttccttttacacagttttttttagggaaaaactaaagctattaggaaattctaaatcttgttgatgaagagttgggctttctttgatataattaataaaagggatgtatggtatttatggctgggtaggaccagaaatgcactttgtattacagagtgttaaggctggttgctatagtatggaacagaaacacctctccttggtctccctagtaatggttcaagttcttcccaggaagtcttacatattataactttgttcattatctttcccttatagcatcattttcctttttgtagagtggaaatcagactagctgctaaacatattaaggttaatcctccagaaatgtactggggaggcattttagtcacaacaacttacatttggctttggaagttgttaacaaagcatagtcgatgtttttaaatcaaacataatttgtatcttggaacttacattttgacatttgaataaaacaaaaagactaaatgaaaaaaa

SEQ ID NO: 300419 - DNA, 3157 bp, Homo sapiens
cgcgcgcaagctccccgggcccagtaggctgggggtgggggtagaaggagaaggaggggaagggaggggggggttgggtgtctactctggtgaatagacggctgtggggcagagaagcgtgaaggcctggctgccgggcaggtgaactctccacggggtctagggcccgcgaaagggttcggaaccgagtcagcgcgccttgcgggcaggattcacgccgctgtgacccggaggtcctcagggggcgaagccccggcctaggcctcgcggagatgcccagctgcggtgcttgtacttgcggcgcggcggccgtccggctcatcacctcctcactcgcctccgcgcagagaggtatttctggtggtcgcattcatatgtcagttttaggaaggcttgggacatttgaaactcagattctgcaaagagctcctcttagatcctttacagaaacaccagcatactttgcctcaaaagatgggataagtaaagatggttctggagatggaaataagaaatcagcaagtgagggaagtagtaagaaatcaggctctgggaattctgggaaaggtggaaaccagctgcgctgtcctaaatgtggcgacttgtgcacacatgtagagacctttgtatcatccacccgttttgtcaagtgtgaaaagtgtcatcatttttttgttgtgctatctgaagcagactcaaagaaaagcataattaaagaacctgaatcagcagcagaagctgtaaaattggcattccaacagaaaccaccacctccccctaagaagatttataactacctcgacaagtatgttgttggccagtcatttgctaagaaggtgctttcagttgctgtgtacaatcattataagagaatatataataatatcccagctaatctgagacagcaagcagaggttgagaagcagacatcattaacaccaagagagttagaaataagaagacgggaggatgagtacagatttacaaaattgcttcagattgctggaattagcccacatggtaatgctttaggagcatcaatgcagcaacaggtaaatcaacaaatacctcaggaaaaacgaggaggtgaagtattggattcttctcatgatgacataaaacttgaaaaaagtaatattttgctgcttggaccaactgggtcaggtaaaactctgctggcacaaaccctagctaaatgccttgatgtcccttttgctatctgtgactgtacaactttgactcaggctggatatgtaggcgaagatattgaatctgtgattgcaaaactactccaagatgccaattataatgtggaaaaagcacaacaaggaattgtctttctggatgaagtagataagattggcagtgtgccaggcattcatcaattacgggatgtaggtggagaaggcgttcagcaaggcttattaaaactactagaaggcacaatagtcaatgttccagaaaagaattcccgaaagctccgtggagaaacagttcaagttgatacaacaaacatcctgtttgtggcatctggtgctttcaatggtttagacagaatcatcagcaggaggaaaaatgaaaagtatcttggatttggaacaccatctaatctgggaaaaggcagaagggctgcagctgctgcagaccttgctaatcgaagtggggaatcgaatactcaccaagacattgaagaaaaagatcggttattgcgtcatgtggaagccagagatctgattgagtttggcatgattcctgagtttgtgggacggttgcctgtggtggttccattgcatagcctagatgagaaaacacttgtacaaatattaactgaccaccacacccggccttatttaccatctttaatccattttagtactatgggtgagtacatggaattgaagtctggcttaaatcttcagaaagttatatatctattttattttatttttttgagacagagtctcgctgtgtcacccaggctggagtacagtgccacaatcttggctcactgcaacctctgagtcccaggttcaagcgatactcatgcctcagcctcctgagtagctgggactacaggcgtgcaccaccacacctggctaattttttgtatttttagtagagacggggtttcgccatgttgcccaggctggtctctcctgagctcaggcaatcggccaccttggcctctgaaagtgctagaattacgggcatgagccaccgcatccagccagaaagatacatatctaattctagaaatagcatgcagtatcagtcatagtaacagccatgtgctgacctaaataaaatttcttgatattgtgtatttaacctgaagtattgagctagtttttttgttttgttttttggtgctgaacattttggtctaattctttggcttcttagaacattttaaaaaatctatgttttgctatcagccaaagtaaatgtgttcacactaacatataagttactaaccttcattatacagcaaagctaaaaagtggtgggatatttggggtcttaatgaaaattgtatcatttaattccataaatattaagttctatattcattcagtttaatctcatttgaaattgtttaaatcagagtacatgtaaatatttgtgggtttttttttttggtttatagactcgagctttccttttacacagttttttttagggaaaaactaaagctattaggaaattctaaatcttgttgatgaagagttgggctttctttgatataattaataaaagggatgtatggtatttatggctgggtaggaccagaaatgcactttgtattacagagtgttaaggctggttgctatagtatggaacagaaacacctctccttggtctccctagtaatggttcaagttcttcccaggaagtcttacatattataactttgttcattatctttcccttatagcatcattttcctttttgtagagtggaaatcagactagctgctaaacatattaaggttaatcctccagaaatgtactggggaggcattttagtcacaacaacttacatttggctttggaagttgttaacaaagcatagtcgatgtttttaaatcaaacataatttgtatcttggaacttacattttgacatttgaataaaacaaaaagactaaatgaaaaaaa

SEQ ID NO: 300420 - DNA, 1359 bp, Homo sapiens
aatgcatgacactaacttcccaattggttctgtaaaaaaggcccatttttcttaccaagttgtctgatttatttaccatcttttttttttttttttttttaattgagcggagtctcacgctgtcccaagctgaagtgcagtggtgcgatcttggctcactgcaacctccgcctcccaggttcaagcaattttcctgcctcagccttccaagtagctgggattataggcacgcaccaccacacctggctaatttttgtatttttatagagacggggtttcgccatgttgcccaggctggtctctcctgagctcaggcaatcggccaccttggcctctgaaagtgctagaattacgggcatgagccaccgcatccagccagaaagatacatatctaattctagaaatagcatgcagtatcagtcatagtaacagccatgtgctgacctaaataaaatttcttgatattgtgtatttaacctgaagtattgagctagtttttttgttttgttttttggtgctgaacattttggtctaattctttggcttcttagaacattttaaaaaatctatgttttgctatcagccaaagtaaatgtgttcacactaacatataagttactaaccttcattatacagcaaagctaaaaagtggtgggatatttggggtcttaatgaaaattgtatcatttaattccataaatattaaaatatttgggtaccttttaagctttttttctttccttctataatggtggtacaagttctatattcattcagtttaatctcatttgaaattgtttaaatcagagtacatgtaaatatttgtgggtttttttttttggtttatagactcgagctttccttttacacagttttttttagggaaaaactaaagctattaggaaattctaaatcttgttgatgaagagttgggctttctttgatataattaataaaagggatgtatggtatttatggctgggtaggaccagaaatgcactttgtattacagagtgttaaggctggttgctatagtatggaacagaaacacctctccttggtctccctagtaatggttcaagttcttcccaggaagtcttacatattataactttgttcattatctttcccttatagcatcattttcctttttgtagagtggaaatcagactagctgctaaacatattaaggttaatcctccagaaatgtactggggaggcattttagtcacaacaacttacatttggctttggaagttgttaacaaagcatagtcgatgtttttaaatcaaacataatttgtatcttggaacttacattttgacatttgaataaaacaaaaagactaaatgaaaaaaa

SEQ ID NO: 300421 - DNA, 3193 bp, Homo sapiens
cgcgcgcaagctccccgggcccagtaggctgggggtgggggtagaaggagaaggaggggaagggaggggggggttgggtgtctactctggtgaatagacggctgtggggcagagaagcgtgaaggcctggctgccgggcaggtgaactctccacggggtctagggcccgcgaaagggttcggaaccgagtcagcgcgccttgcgggcaggattcacgccgctgtgacccggaggtcctcagggggcgaagccccggcctaggcctcgcggagatgcccagctgcggtgcttgtacttgcggcgcggcggccgtccggctcatcacctcctcactcgcctccgcgcagagaggtatttctggtggtcgcattcatatgtcagttttaggaaggcttgggacatttgaaactcagattctgcaaagagctcctcttagatcctttacagaaacaccagcatactttgcctcaaaagatgggataagtaaagatggttctggagatggaaataagaaatcagcaagtgagggaagtagtaagaaatcaggctctgggaattctgggaaaggtggaaaccagctgcgctgtcctaaatgtggcgacttgtgcacacatgtagagacctttgtatcatccacccgttttgtcaagtgtgaaaagtgtcatcatttttttgttgtgctatctgaagcagactcaaagaaaagcataattaaagaacctgaatcagcagcagaagctgtaaaattggcattccaacagaaaccaccacctccccctaagaagatttataactacctcgacaagtatgttgttggccagtcatttgctaagaaggtgctttcagttgctgtgtacaatcattataagagaatatataataatatcccagctaatctgagacagcaagcagaggttgagaagcagacatcattaacaccaagagagttagaaataagaagacgggaggatgagtacagatttacaaaattgcttcagattgctggaattagcccacatggtaatgctttaggagcatcaatgcagcaacaggtaaatcaacaaatacctcaggaaaaacgaggaggtgaagtattggattcttctcatgatgacataaaacttgaaaaaagtaatattttgctgcttggaccaactgggtcaggtaaaactctgctggcacaaaccctagctaaatgccttgatgtcccttttgctatctgtgactgtacaactttgactcaggctggatatgtaggcgaagatattgaatctgtgattgcaaaactactccaagatgccaattataatgtggaaaaagcacaacaaggaattgtctttctggatgaagtagataagattggcagtgtgccaggcattcatcaattacgggatgtaggtggagaaggcgttcagcaaggcttattaaaactactagaaggcacaatagtcaatgttccagaaaagaattcccgaaagctccgtggagaaacagttcaagttgatacaacaaacatcctgtttgtggcatctggtgctttcaatggtttagacagaatcatcagcaggaggaaaaatgaaaagtatcttggatttggaacaccatctaatctgggaaaaggcagaagggctgcagctgctgcagaccttgctaatcgaagtggggaatcgaatactcaccaagacattgaagaaaaagatcggttattgcgtcatgtggaagccagagatctgattgagtttggcatgattcctgagtttgtgggacggttgcctgtggtggttccattgcatagcctagatgagaaaacacttgtacaaatattaactgaccaccacacccggccttatttaccatctttaatccattttagtactatgggtgagtacatggaattgaagtctggcttaaatcttcagaaagttatatatctattttattttatttttttgagacagagtctcgctgtgtcacccaggctggagtacagtgccacaatcttggctcactgcaacctctgagtcccaggttcaagcgatactcatgcctcagcctcctgagtagctgggactacaggcgtgcaccaccacacctggctaattttttgtatttttagtagagacggggtttcgccatgttgcccaggctggtctctcctgagctcaggcaatcggccaccttggcctctgaaagtgctagaattacgggcatgagccaccgcatccagccagaaagatacatatctaattctagaaatagcatgcagtatcagtcatagtaacagccatgtgctgacctaaataaaatttcttgatattgtgtatttaacctgaagtattgagctagtttttttgttttgttttttggtgctgaacattttggtctaattctttggcttcttagaacattttaaaaaatctatgttttgctatcagccaaagtaaatgtgttcacactaacatataagttactaaccttcattatacagcaaagctaaaaagtggtgggatatttggggtcttaatgaaaattgtatcatttaattccataaatattaaaatatttgggtaccttttaagctttttttctttccttctataatggtggtacaagttctatattcattcagtttaatctcatttgaaattgtttaaatcagagtacatgtaaatatttgtgggtttttttttttggtttatagactcgagctttccttttacacagttttttttagggaaaaactaaagctattaggaaattctaaatcttgttgatgaagagttgggctttctttgatataattaataaaagggatgtatggtatttatggctgggtaggaccagaaatgcactttgtattacagagtgttaaggctggttgctatagtatggaacagaaacacctctccttggtctccctagtaatggttcaagttcttcccaggaagtcttacatattataactttgttcattatctttcccttatagcatcattttcctttttgtagagtggaaatcagactagctgctaaacatattaaggttaatcctccagaaatgtactggggaggcattttagtcacaacaacttacatttggctttggaagttgttaacaaagcatagtcgatgtttttaaatcaaacataatttgtatcttggataagtggcagacgagatcctcgtgaacgcc

SEQ ID NO: 300422 - DNA, 362 bp, Homo sapiens
caggcggattgcctgagctcaggagttcaagaccagcctggacaacatggcgaaaccccatctctactaaaaatacaaaaaattggccagatttggtggcttacgcctgtaatcacagctataatcccaaatatatatatatatatatgtttatatatataatcccatatatatgtttatatatatatatatatttgttttgtttgtttctttttccttgagtgaatggattccaatttgtgatttatagaataaaagcacttgtatgtaatctgttttcaatgtgattcattactttttatttctttaggaaaagctgttactagaaccaatgtttgaagtccctaattctgatatcgtat

SEQ ID NO: 300423 - DNA, 451 bp, Homo sapiens
gatttattgaggcatgtctatatttgatgtagatttccttttattttcaggtatttctggtggtcgcattcatatgtcagttttaggaaggcttgggacatttgaaactcagattctgcaaagagctcctcttagatcctttacagaaacaccagcatactttgcctcaaaagatgggataagtaaagatggttctggagatggaaataaggtaattattttatcttattggcatctgtacacattgtgagttccctcctttaaaaaaatataacagtactgtctcttactggcttatatgttttctgtaggaaatatgagatagctaaaatgatctgaataattttatgtaattagatgtttcattttgaaccttaaaatacttttataagcattgcacatagtaagcagtaattaaaatttcttacaccccaaagtagtaaagaagtgt

SEQ ID NO: 300424 - DNA, 2375 bp, Homo sapiens
aacaggcgtgacgccagttctaaatcttgaaacaaaacaaaacttcaaagtacaccaaaatagaacctccttaaagcataaatctcacggagtggtcgcacttggagggtctcgccgccagtggaaggagccaccgcccccgcccgaccatggccgaggagctggtcttagagaggtgtgatctggagctggagaccaatggccgagaccaccacacggccgacctgtgccgggagaagctggtggtgcgacggggccagcccttctggctgaccctgcactttgagggccgcaactacgaggccagtgtagacagtctcaccttcagtgtcgtgaccggcccagcccctagccaggaggccgggaccaaggcccgttttccactaagagatgctgtggaggagggtgactggacagccaccgtggtggaccagcaagactgcaccctctcgctgcagctcaccaccccggccaacgcccccatcggcctgtatcgcctcagcctggaggcctccactggctaccagggatccagctttgtgctgggccacttcattttgctcttcaacgcctggtgcccagcggatgctgtgtacctggactcggaagaggagcggcaggagtatgtcctcacccagcagggctttatctaccagggctcggccaagttcatcaagaacataccttggaattttgggcagtttgaagatgggatcctagacatctgcctgatccttctagatgtcaaccccaagttcctgaagaacgccggccgtgactgctcccgccgcagcagccccgtctacgtgggccgggtggtgagtggcatggtcaactgcaacgatgaccagggtgtgctgctgggacgctgggacaacaactacggggacggcgtcagccccatgtcctggatcggcagcgtggacatcctgcggcgctggaagaaccacggctgccagcgcgtcaagtatggccagtgctgggtcttcgccgccgtggcctgcacaggtgagctgcacgctgggatgtgggtcatgagccctgggagggggcacgaagagcactggagtaggaatcaggacatccctgccctggtcctgccccctgccaccaacactctcaatgcgctatgtggcctagagcctgtgaccaccctctccggtcctttatccaatagccatccctccagtggttgttaggatcaagggctatcattggagagactgcatgggctcagggctgagaacttgggcactggagcccacgttctcaaaaactcaggatttttaacttgagttaaaaaccccctccctcccaccacttgctctgtgaccttgagcaaatgacttctttctgaacctcagtttcctcgtctggaaaatggggacaacatcaagaccttcctcctagagtgggtgtgacatgaagctactcagcacagaacctagcccagtgtcactctcggcaaatattagccagtaataactggatcctaacagtaatatcagtgtcaagaaagaaagcatgttctaaaatgtagagggggaatatcgagcaatttaaaaccaaaaaagtaaaataaatctaaaacaaaaatcttcaaaatttaaggccagaaaatgtcgatgattgttgccaggctgatgatggtgcttatgagaatgggttagcatcacatgctggctaagaacgtagactcaagacatgaggattgcttgaggccgggagtttgagaccagcctgggcaatatagtgagaccttgtctctacaaaaaaataaaataaaataaaaattagcaggcatggttgtgtgtctggagtcttggctactcagaaggctgaggcaggaagatcgcttgacccctggaggttggctgcaatgagctatgattgcaccattgcactccagcctgggcaacggagcaagatcctctctcaaaaaaaaaaaaaaaaaaaaaaaaagagagagagcacaaattctgaagtcaaggcctgggttcaaatcctagctctgcttcttaccagctgtgtgtccttaggtaaatcacttaactcctctgaaccacagttccattgtatgtaaaatgggcacaacggtagtacctttatactgggatggttgtgaggattaaatgagttaatatgtgtgaggtagctgagcgtggtggtggtgcacctgtagtcttagctgtttgggaggctgaggcagggggatcacttgagcccaggaggtcgaggctgcggtgagtcatgattgcaccactgtactccagcctgggtgacagagcgagacctcatctctaaataaataaatgaatgtgggaagtgcttaaaatgattttgggtgcataatagaaaatacttatgtgatgata

SEQ ID NO: 300425 - DNA, 3077 bp, Homo sapiens
ctatggtcatttcctgcttttgcaattgaagaaagtgctatggtgaaaacaaagatacccttttttccccatcatagggttcatagacccctgaattctgttggtagtgccttggggggatccgtgggccctggtttaagacctccagcggcatggaacattttttcccagctctgtccacttctggataaagcattggcatttctccagcagatagttttctgtgatttgaatttttatttaatgtgaccgtggtccatcacatggatgtgctagactgtatctatccagcctctagtcctcagcattggaagtctgcggacagtgtggggcggttatcaaccacacttacgtaaacatcaggcacccgtattcacttggagaacacacacgccctggggctggccccatgcggggcactgagctccactctcagtatgagcaggaaacgagacagatgtcctccttgctaacatgttgcctgtccttggctccataatttcctcaggatgtctgggatacatttccattttatttatcaaatacttgcatagcatttagtataggctatgagctttacatctataattcaggaatgctcattaggtggtccagatcttatctccacatgaaactgccgcttcgagaagttagtgactggcccaaagtcaccagctaataacaggctgagctgggatttgaaccttaaaagttgtgctccagagcccctattctgaacccttgccctgtggtgccctcctggaagtggagtccttccgtcagagggccgcgtggtcttgaggtttttggctacatgtgattgaattgtggagcgttttagaggacaccacccaaccttcacccaggcccatcccttcccctttctacctctgccagggacgtactgctgtggcccagttccagttcgtgccatcaaggagggcgacctgagcaccaagtacgatgcgccctttgtctttgcggaggtcaatgccgacgtggtagactggatccagcaggacgatgggtctgtgcacaaatccatcaaccgttccctgatcgttgggctgaagatcagcactaagagcgtgggccgagacgagcgggaggatatcacccacacctacaaatacccagagggtatgtgccctcagagtctttaatgcagccttgaagataagcatccagttttcccagcccggcaggctcgtgtatgtgtgtgcgtgtgttttaattggtagcctacgtacagcaatggccccgtaggctatactccatcttcagcaatgccttagaaacaggagcaaacatgttgagggacagtggtagaggattattcatttagggaaagagttctctgctactgatgttaaatcagttgcaggggaaaggacttgatttatttttaaaaattggatttgagcacatcgaacagccaattcaatatggtatctaatttctaagcaaatactaagcatagcaaagcatacagaggggactaagaaaccatagttcctgccttggcctgaccctcactgactttccagggttgcctggccatactctagctgaaagggataacacagaatgaaatgatgctctccccatcccctgaaaggtctagagctgatagtttcatagaataaatagatatgcacccaacaacactgggagaaaaaaatcaaaggagcacaggagagaggcaaatggaatataaggaagggagcaatcagagacagggagggaaaggattttaggtagaagtaatccctgtgtaattgcttgaaggtaagaaagattgcactgtattcgtgcctagtatgcaccaagcactgttgtaggcactggataagtaaaacacagccttagccctcgagcagctcaagaaggtaagtttgaaacagaaaacaacacaggggaaggagtggtcagagagggcttcctggaggaggggtcatttggggttgagtcttgagggatgtataggagttcactagtggaaaattaatgaaatgctgtgtccttctggcccagaaatgtagagaaggggctccttcatggctgccctgagtcatcaggcctctgcgaagacagctcgccctgttgcagcccccttcctgtgatctattccagctgtgattgaggctctcttctcaacccctacagggtcctcagaggagagggaggccttcacaagggcgaaccacctgaacaaactggccgagaaggaggagacagggatggccatgcggatccgtgtgggccagagcatgaacatgggcagtgactttgacgtctttgcccacatcaccaacaacaccgctgaggagtacgtctgccgcctcctgctctgtgcccgcaccgtcagctacaatgggatcttggggcccgagtgtggcaccaagtacctgctcaacctcaacctggagcctttctctggtaaagccctgtgttcctggagcatttgttgaccgccaactgacaacatgctaggtagtgacctaaccacttagcatgtgtgatttcaccccacagacacttacatggcgctgactctggggcaggccctgtcctaagcactttataaatatcaacccacttaattcttattgcaagagtgagggggtggattctaacatggctccgttttccagatgagtagactgaggcacagagaggttaagtaattttcttaaggttgcacagttggggagttaacctgtcctcacagcagctatactgtttggtttcacctcatcttcgtgtgacccctgactgctttcacagaccctctgctgccctctcccagtgaattccactgtctccagcccctcatgcctcagcagcctctctccatgggcccttcgagaacctctcctgtgcctctggttgctctcggcctcaaagaaaagtctctaacccagcgccttggaaagtgcctgttgcactttccacagtgatggagacgtgctgagtctgcaccgcctatccagcatggctgccaccagctgcacgtggctgctaagcgcttgaaatgtggctggtgcaaccgtagaactaaagtttgtttgtttgtt

SEQ ID NO: 300426 - DNA, 1028 bp, Homo sapiens
cgccgtccctccctcgggctccggtcccctgggtgagccccagcgctggcggcgtgggcccgggactgggcaatgggtggcctcccaggtcgccgccttcccgcggggccccgcccccggcccgccccaaagcgggctataagttagcgccgctctccgcctcggcagtgccagccgccagtggtcgtggtcgcacttggagggtctcgccgccagtggaaggagccaccgcccccgcccgaccatggccgaggagctggtcttagagaggtgtgatctggagctggagaccaatggccgagaccaccacacggccgacctgtgccgggagaagctggtggtgcgacggggccagcccttctggctgaccctgcactttgagggccgcaactacgaggccagtgtagacagtctcaccttcagtgtcgtgaccggcccagcccctagccaggaggccgggaccaaggcccgttttccactaagagatgctgtggaggagggtgactggacagccaccgtggtggaccagcaagactgcaccctctcgctgcagctcaccaccccggccaacgcccccatcggcctgtatcgcctcagcctggaggcctccactggctaccagggatccagctttgtgctgggccacttcattttgctcttcaacgcctggtgcccagcggatgctgtgtacctggactcggaagaggagcggcaggagtatgtcctcacccagcagggctttatctaccagggctcggccaagttcatcaagaacataccttggaattttgggcagtttgaagatgggatcctagacatctgcctgatccttctagatgtcaaccccaagttcctgaagaacgccggccgtgactgctcccgccgcagcagccccgtctacgtgggccgggtggtgagtggcatggtcaactgcaacgatgacaggtgtctgttggaccttggacacactcgggacgggtagcccattctgatcggactgaatctgggctgaaacacgtgcaccgtag

SEQ ID NO: 300427 - DNA, 1010 bp, Homo sapiens
  misc_feature (1010)..(1010): n is a, c, g, or t
ccacaatgcctgccgtctcccgctaatgtctccagctgcctggaaggcagcatggggctgcggtcactctggggcagtcttctggcagggccccccaaatcccagggaaggacttggagagaatcatgctgttgcatttagaactttctgctttgcacaggaaagagtcacacaattaatcaacatgtatattttctctatacatagagctctatttctctacggttttataaaagccttgggttccaaccaggcagtagatgtgcttctgaaccgcaaggagcaaacactgaaataaaatagtttatttttcacactcaaaaaaaaaaaaaaaaaaaaaaaaaaaagggggggcgcgcccttttttttatttattaattataaatatttataataatatgatattttattatcatctagctacttcatgatgcttagtccttgcctcgtacgtcaggagacgagctctcatgtatagtaggaacaaggaagagcagaaagagacgaggcagaaagtagagggagagggaggacgacaaggagacagcagagggcggacaaagagagaaggacgaacacgcaacaactcccggcaacgaaccagatccacatcacaacaacgaacagaaagcgacgcaggcacgcaagacgaatcaaggcagagcgcaaggctacgaacacgcaaggagcggcagcacgaagcaagacagaacacctccaaaagaggaaccaaaaccacgacaacgaagcaaaagaagaactgaacaggagagacacacacacaggaagacgaaagaagcaccagagcaaataagacggggaagcaaaaacggagagcgaagaggcgcaagcacacgagagagagcataaaggagaccaagacaacgtgacacaacaaacggcagcacaagacgaagacgaacaaacaacgccagacagcgataacaacacagaaaagagagaacagcaagaagacacgacgcaacaccgccacgctaccccgcgaccgn

SEQ ID NO: 300428 - DNA, 3971 bp, Homo sapiens
aacaggcgtgacgccagttctaaatcttgaaacaaaacaaaacttcaaagtacaccaaaatagaacctccttaaagcataaatctcacggagtggtcgcacttggagggtctcgccgccagtggaaggagccaccgcccccgcccgaccatggccgaggagctggtcttagagaggtgtgatctggagctggagaccaatggccgagaccaccacacggccgacctgtgccgggagaagctggtggtgcgacggggccagcccttctggctgaccctgcactttgagggccgcaactacgaggccagtgtagacagtctcaccttcagtgtcgtgaccggcccagcccctagccaggaggccgggaccaaggcccgttttccactaagagatgctgtggaggagggtgactggacagccaccgtggtggaccagcaagactgcaccctctcgctgcagctcaccaccccggccaacgcccccatcggcctgtatcgcctcagcctggaggcctccactggctaccagggatccagctttgtgctgggccacttcattttgctcttcaacgcctggtgcccagcggatgctgtgtacctggactcggaagaggagcggcaggagtatgtcctcacccagcagggctttatctaccagggctcggccaagttcatcaagaacataccttggaattttgggcagtttgaagatgggatcctagacatctgcctgatccttctagatgtcaaccccaagttcctgaagaacgccggccgtgactgctcccgccgcagcagccccgtctacgtgggccgggtggtgagtggcatggtcaactgcaacgatgaccagggtgtgctgctgggacgctgggacaacaactacggggacggcgtcagccccatgtcctggatcggcagcgtggacatcctgcggcgctggaagaaccacggctgccagcgcgtcaagtatggccagtgctgggtcttcgccgccgtggcctgcacagtgctgaggtgcctgggcatccctacccgcgtcgtgaccaactacaactcggcccatgaccagaacagcaaccttctcatcgagtacttccgcaatgagtttggggagatccagggtgacaagagcgagatgatctggaacttccactgctgggtggagtcgtggatgaccaggccggacctgcagccggggtacgagggctggcaggccctggacccaacgccccaggagaagagcgaagggacgtactgctgtggcccagttccagttcgtgccatcaaggagggcgacctgagcaccaagtacgatgcgccctttgtctttgcggaggtcaatgccgacgtggtagactggatccagcaggacgatgggtctgtgcacaaatccatcaaccgttccctgatcgttgggctgaagatcagcactaagagcgtgggccgagacgagcgggaggatatcacccacacctacaaatacccagaggggtcctcagaggagagggaggccttcacaagggcgaaccacctgaacaaactggccgagaaggaggagacagggatggccatgcggatccgtgtgggccagagcatgaacatgggcagtgactttgacgtctttgcccacatcaccaacaacaccgctgaggagtacgtctgccgcctcctgctctgtgcccgcaccgtcagctacaatgggatcttggggcccgagtgtggcaccaagtacctgctcaacctcaacctggagcctttctctgagaagagcgttcctctttgcatcctctatgagaaataccgtgactgccttacggagtccaacctcatcaaggtgcgggccctcctcgtggagccagttatcaacagctacctgctggctgagagggacctctacctggagaatccagaaatcaagatccggatccttggggagcccaagcagaaacgcaagctggtggctgaggtgtccctgcagaacccgctccctgtggccctggaaggctgcaccttcactgtggagggggccggcctgactgaggagcagaagacggtggagatcccagaccccgtggaggcaggggaggaagttaaggtgagaatggacctgctgccgctccacatgggcctccacaagctggtggtgaacttcgagagcgacaagctgaaggctgtgaagggcttccggaatgtcatcattggccccgcctaagggacccctgctcccagcctgctgagagcccccaccttgatcccaatccttatcccaagctagtgagcaaaatatgccccttcttgggccccagaccccagggcagggtgggcagcctatgggggctctcggaaatggaatgtgcccctggcccatctcagcctcctgagcctgtgggtccccactcaccccctttgctgtgaggaatgctctgtgccagaaacagtgggagccctgaccttggctgactggggctggggtgagagaggaaagacctacattccctctcctgcccagatgccctttggaaagccattgaccacccaccatattgtttgatctacttcatagctccttggagcaggcaaaaaagggacagcatgccccttggctggatcagggaatccagctccctagactgcatcccgtacctcttcccatgactgcacccagctccaggggcccttgggacagccagagctgggtggggacagtgataggcccaaggtcccctccacatcccagcagcccaagcttaatagccctccccctcaacctcaccattgtgaagcacctactatgtgctgggtgcctcccacacttgctggggctcacggggcctccaacccatttaatcaccatgggaaactgttgtgggcgctgcttccaggataaggagactgaggcttagagagaggaggcagccccctccacaccagtggcctcgtggttattagcaaggctgggtaatgtgaaggcccaagagcagagtctgggcctctgactctgagtccactgctccatttataaccccagcctgacctgagactgtcggagaggctgtctggggcctttatcaaaaaaagactcagccaagacaaggaggtagagaggggactgggggactgggagtcagagccctggctgggttcaggtcccacgtctggccaggcactgccttctcctctctgggcctttgtttccttgttggtcagaggagtgattgaaccagctcatctccaaggatcctctccactccatgtttgcaatgcttttatatggcccagccttgtaaataaccacaaggtccactccctgctccacgaagccttaagccataggcccaggatatttctgagagtgaaaccatgactgtgaccaccttctgtccccagccctgtcctggttccttcctatgcccaggtaccacccttcagaccccagttctaggggagaagagccctggacacccctgctctacccatgagcctgcccgctgcaatgcctagacttcccaacagccttagctgccagtgctggtcactaaccaacaaggttggcaccccagctaccccttctttgcagggctaaggcccccaaacatagcccctgccccggaggaagcttggggaacccatgagttgtcagctttgactttatctcctgctctttctacatgactgggcctcccttgggctggaagaattggggattctctattggaggtgagatcacagcctccagggccccccaaatcccagggaaggacttggagagaatcatgctgttgcatttagaactttctgctttgcacaggaaagagtcacacaattaatcaacatgtatattttctctatacatagagctctatttctctacggttttataaaagccttgggttccaaccaggcagtagatgtgcttctgaaccgcaaggagcaaacactgaaataaaatagtttatttttcacactcaaa
